United States Patent Application Publication US 2005/0208558 A1 - sequence listing, part 26

SEQ ID NO: 26056 - DNA, 6316 bp, DROSOPHILA
tttgctttttctttgcataggcttggttttgcttgaattggcctgactgacctgacacaaatgtttatccatccagttgctactttgtttgttttttggttttttttttttttttttttgtttggttactgctcttttctttggaaactcccactaaagagaaagagatatgaaagattgattcagaatacccctctaacgcccacaatcatcaaaaacctgtcacgctcatactgtggcaaaattaaatcaatttgtttgtttattttattaattgatttgcctgtttatacccgtaagcctaaaacattttgggcacgttttagatccgctttgttgagtcaaaaccgaattgcataatgtggtggaaagtaagcaggtagtggctgtgatcattgtcacaccatcttggcgaattgatacgcggaagttatataaacaatggtaccaataacctcccgctgcatcgaggcttttccagttcgccacaaccacgactggttgtgggcacaacacgtttaacaagtttttctcttttgattttcaggaagtttttgcagatttagccggtctgtataaaacatatataaaaaaatcgaaccgtaaataagtgaaaactacgacaacaaaactttgagattatccaagcccaaggtgtttgttcgcggtcaccgaaatccttcaagcccttatcaagaaaaagctatcgtttcagtcgtttaccacagtcatgccaatgaacgaactgatcaaaatataatactacgacaatgtcagcggaagaacacgagacagtattcgacagtgcgcagaactgcgtttcacggatgaaccagcaaaatacctaaaacaatgaagggtagattctagtcaaatatagctagagagatactacagccacccgcagtttaccactagatttttggaaattttggaaataaagtggcaaagtggaaaattgtgggaaaagcaaaacagtgccccttacctagtggcaaagatgtcaaacctaagcatagccgtgttggctgtcctaatgctcaacttcaattgtgtcagcaagtgctcgaatgagaccaaaaaacttgaaccagcccccttggcaggacatcggcttgttagcagggatggcaacaccaccattctgcatgaagtgcagaaaacggaaacagagttaccgctatttttaaacactcacgagatcctgccgctcaagccgctaaagaagaaaccttatttgcccctggagaagataatgccgaccattgagtatgtaaagccaccacaaccactgaaggagttcgaactgcatccggttacctttgacttcaatttgggagatttagaggatttggaacacgaggttattaagaagggtgatctgaacaatcagaatcagcatgtcctgaccttggacactagctacaatccctcaaatcccgatgagaacgatactgtggatatacacatcgccgagttttccacagagcccaacacagcaactttgtcgggaacgtcgtcttctttttcggcgataaccagcagtacttccaatactcacattctgaagatcctgggtagtaagccgccaatggcaccaaaactaagtcgcgatctgcttaagcaaactggagacgatgatatgcagataaaaaccttgggcagcactattaatagcattcatcgttatttggggacgaccgcgaatggaacaggaaacggcactgcagttgagagtctttatggccaggccaactatttccaactggtggcaaatctctatgaccacttttactggcagatttctgagatccgaacaaatgttcacacaggctgcgggctcgaaatgcaagcgtatttaacggcacttcattctagttacgagtgggctcaaaagggtaagtcactgcatgagaatatccattgctaaattttctaatcccatttcgatcttaactcttgtagcttatgattcatctgggcgctaccgtggccagctgctctttggaaacgataagtggctcggtcagctttccttctgttatgagctcaaccgccagagtttaactgaagagcggcagcactttgatctgcagttctatgtggcggatgttgcgcttcatttgcccagtctaaatcgatcggttggttcttgatttaaacttcggatttccaacatttattaaccacaattaccgttccttcttcagatgcttttgagtctcggagagtgtttacccaaatcttgttctgacattgatgtcaaatctatcttgtcccttgatccatatgctcgaatgttgacagttttgggcgctcacaatacctcgatgcaacaacctccgcttcagatcctccatgttcgcactgtgcctggaatttattcccactggcgtcagttaaagtttcaggtgttcatgtaggttatcatcttagaaacactcatcaacttattcaaattgttttcccactgtagcagctttatgctcactctctttctggtgattttggttgcttcctattatcagctcaaaatcgacgaacgtcgtttagttgtggcacctattgcggccattagtggcaaatgcgatggaacctctaccaaaaacgacgtattttatggcaagtccttcgagctatttcaaatgcgccccttgggctgcaccagttcttcaacggatgaccccgaagtagatgtgaatggaaatagacaaagatgtggggactcatctgacatggaaaacggtgttcaacgggaattcgctgaccccaacacttccacgtcagttggggaaaagtcagaaatgggagattaccaaatggaaactgggagttgtgctggaggcactggaacttatgaggcgaagcaatctgttggtgagcatcaagccataccatggttcatttacctaataccagtcggcctgtccctaatcgactttacccttcgcagctttgcaccaacaaatactattgtgcttcgcattgcaaaccaatgccaaggcaattctaaacattaacaagaccaaggaggtaagtttagaggtaaaatatctgcaattaatccattcatctgctactgctggcttccctaagcagatccacactgcatgcctgcatggattaagagtattctccgtgctttggaccatgatggtgcacacttatcttcagatgtttgccattggtgaaaataaagtaagtgctttgctataaaaacaaaatggaacgaatcgaattaacaaagcgaaacgtcagtttgaaaggatcatcacagagcgctctttttggtatcaggtgattggcaatgccactttctcggtagactcattcttctttatcagcggcctgcttgtcacaatgctctacctcaagcagaatcgcaaatatccgacggaaacatgccttttcataaaaagctgcttttcggaatcgcttatgatgctgctctatcgctacctacggctaacaccagtttatctctttgtagtcatattcaatgactttgccgtaaggtgagctatatttattgcagtcttttataataatttcccataaaatggatttattattgcaggcaagggctagacacttcggtctttcagccggccaaaatagagcacaacacttgccgcatgtattggtggcgcaatattttgtatataaacaactattttccgcaaaccgaaatgtgcatgatgtggagctggtatatggccaacgaaatgcagttttatgtgatggctgctctgcttttagctttagccagaaagtgggtgaaagcttttccagtttactttcctagaacttaaaacttaccgttttcaggtacttcaaagccgtggctattacgcttttcgtttttctactcagctcgtggagcatttctggtataatatccttgacatatcagtacacccacaaagtttctctgcccttcgaatcttttgatttcctttatgacaaaccatggcaacgagtgggctcttatataatgggtgagtaaacacttaactgatatagcgtcagtttacctactaagtagcagaattgtttataataattacatggaaatgaacaatttctagtaacactaaaaataaatttataatgaaccctcatagatcatcgcggttttaaaaacataaaaaacgagatagaaagctttgacaagggaatgtttttatacccttgcagtacttaggtatacatttaaaaacgggtatattttgaataattaaaaacaaaggaaatcttttatataatttttaatcaatttccaacagtttcaatggcacctatatgatatactcctttgattatccaaaaaggtttataccaaagcttctaagattcgttgaaaagtatgtaacaggtagaaagaagcttttccaaccatatagttaagaaaataagtataagctgagtaacaggtatggaaaaacaagactataactttctatcttgtgaatatttgtatatctctatatataataaagtggtttatttcgacccgttccgacataatacttgcaatagaaaggcgacttttcgaaagttgtaaaacggaaagataaacggacagactgacaaacgtgggcatatcgatatcaatgatgtgttgcaactgctgactcaaaacaatatataatataaaacagtccaaaagcatttattgtttatgtttaaaatccctaaaacgaagtaaaatattaaaacttaaaaacaagataatattttcaatgaacacatttcggcacaatattttaatatcggtatatacttgaaattgtgaatttaattcttgacttaccttaattattcacctcttcatttatttcacaggaatgtgcaccggatacgttttgtataaggtgaagactccgccgctgatttccaggcgtttaaatctttccctttgggcatgcagccttttcgtacttctgatcgtggtctttggggtttgggaaggacatttaggcaccaccagcagcgccttttacgtgggcgtagcccacacagccttcggatgtgggctagtgtggatcgtcttatcctgctgttgggggcttgtgccaaccgtaaatgcaatactgtcgtatcgcgttatgtggccactttcacgactcacatactgtgcctatctgatccatcccatcataatgttcatttgctcttcgcacatgagcggcactgttcacctaagcaatcctctcatcctgaccttgtttttaggcaacgccgtcgtgtcgttcggatgcgcctttgtcatatccgccttttttgaggcacccgttatccgaatacttaaaatatgttttaaaaagtaatggaatctgaataccttcgtacgtcaacgtcaattggttttttaaccttttggcagccaatttgttatttgttggttaatatcccatatatgtatcttcaaagtgtacttggttcttctccatttttttgtgtctgcaacgaagtaatgcacaatcagatgtcatcttatgcttataaatatctataggcttaaatatgttatatattcttgttaatgaagtaggcagctaactggagatacgtttttttttaataaaatataccttaaaccaaagataatcaacatttaatttgtatacaagtattctacatgatatccgaggggttccgctttaaattggcttggagttttttgtaaaataaacttgacttagttcatggcaataaatacatagtctgtacgtcaacgtgaacaccattgtcacaacaatatgtttattttatacgtaaaaaatgcctcgatgatgcgattagccatgaccaggatagattacggtactgatgagttaaatgcagaactatataacttgcacaggattgtttggaacgcaaaaattgtattggaaaggttggaaagaattttgctttaattcccccaaaatgaaaataagtctaatttacaaggcgcattttgaaatgtttaagtaaaaaatgttttaaatattttaaactgctctatttagtacatcttaataaacttgttgtaagacaatgtattttatttttccataaattattttggtattgaatcccagacctacaacgcaatgagcatttggctatagcgattatcttggacatatcgatgttggtgaacgcggtactatcgataatactatcgtatttttgcaattctattgcaattattattatttcaattcaattaaattatagcattgaagtaccctacagaaaatatgtctaatttttttaaaacagatccctaagcgtttttcttaaaacccgcgttcataagcaaaagctt

SEQ ID NO: 26057 - DNA, 2564 bp, DROSOPHILA
atgtcaaacctaagcatagccgtgttggctgtcctaatgctcaacttcaattgtgtcagcaagtgctcgaatgagaccaaaaaacttgaaccagcccccttggcaggacatcggcttgttagcagggatggcaacaccaccattctgcatgaagtgcagaaaacggaaacagagttaccgctatttttaaacactcacgagatcctgccgctcaagccgctaaagaagaaaccttatttgcccctggagaagataatgccgaccattgagtatgtaaagccaccacaaccactgaaggagttcgaactgcatccggttacctttgacttcaatttgggagatttagaggatttggaacacgaggttattaagaagggtgatctgaacaatcagaatcagcatgtcctgaccttggacactagctacaatccctcaaatcccgatgagaacgatactgtggatatacacatcgccgagttttccacagagcccaacacagcaactttgtcgggaacgtcgtcttctttttcggcgataaccagcagtacttccaatactcacattctgaagatcctgggtagtaagccgccaatggcaccaaaactaagtcgcgatctgcttaagcaaactggagacgatgatatgcagataaaaaccttgggcagcactattaatagcattcatcgttatttggggacgaccgcgaatggaacaggaaacggcactgcagttgagagtctttatggccaggccaactatttccaactggtggcaaatctctatgaccacttttactggcagatttctgagatccgaacaaatgttcacacaggctgcgggctcgaaatgcaagcgtatttaacggcacttcattctagttacgagtgggctcaaaaggcttatgattcatctgggcgctaccgtggccagctgctctttggaaacgataagtggctcggtcagctttccttctgttatgagctcaaccgccagagtttaactgaagagcggcagcactttgatctgcagttctatgtggcggatgttgcgcttcatttgcccagtctaaatcgatcgatgcttttgagtctcggagagtgtttacccaaatcttgttctgacattgatgtcaaatctatcttgtcccttgatccatatgctcgaatgttgacagttttgggcgctcacaatacctcgatgcaacaacctccgcttcagatcctccatgttcgcactgtgcctggaatttattcccactggcgtcagttaaagtttcagctcaaaatcgacgaacgtcgtttagttgtggcacctattgcggccattagtggcaaatgcgatggaacctctaccaaaaacgacgtattttatggcaagtccttcgagctatttcaaatgcgccccttgggctgcaccagttcttcaacggatgaccccgaagtagatgtgaatggaaatagacaaagatgtggggactcatctgacatggaaaacggtgttcaacgggaattcgctgaccccaacacttccacgtcagttggggaaaagtcagaaatgggagattaccaaatggaaactgggagttgtgctggaggcactggaacttatgaggcgaagcaatctgttgctttgcaccaacaaatactattgtgcttcgcattgcaaaccaatgccaaggcaattctaaacattaacaagaccaaggagatccacactgcatgcctgcatggattaagagtattctccgtgctttggaccatgatggtgcacacttatcttcagatgtttgccattggtgaaaataaagtgattggcaatgccactttctcggtagactcattcttctttatcagcggcctgcttgtcacaatgctctacctcaagcagaatcgcaaatatccgacggaaacatgccttttcataaaaagctgcttttcggaatcgcttatgatgctgctctatcgctacctacggctaacaccagtttatctctttgtagtcatattcaatgactttgccgtaagctcgtggagcatttctggtataatatccttgacatatcagtacacccacaaagtttctctgcccttcgaatcttttgatttcctttatgacaaaccatggcaacgagtgggctcttatataatgggaatgtgcaccggatacgttttgtataagccttttcgtacttctgatcgtggtctttggggtttgggaaggacatttaggcaccaccagcagcgccttttacgtgggcgtagcccacacagccttcggatgtgggctagtgtggatcgtcttatcctgctgttgggggcttgtgccaaccgtaaatgcaatactgtcgtatcgcgttatgtggccactttcacgactcacatactgtgcctatctgatccatcccatcataatgttcatttgctcttcgcacatgagcggcactgttcacctaagcaatcctctcatcctgaccttgtttttaggcaacgccgtcgtgtcgttcggatgcgcctttgtcatatccgccttttttgaggcacccgttatccgaatacttaaaatat

SEQ ID NO: 26058 - protein, 844 aa, DROSOPHILA
MSNLSIAVLAVLMLNFNCVSKCSNETKKLEPAPLAGHRLVSRDGNTTILHEVQKTETELPLFLNTHEILPLKPLKKKPYLPLEKIMPTIEYVKPPQPLKEFELHPVTFDFNLGDLEDLEHEVIKKGDLNNQNQHVLTLDTSYNPSNPDENDTVDIHIAEFSTEPNTATLSGTSSSFSAITSSTSNTHILKILGSKPPMAPKLSRDLLKQTGDDDMQIKTLGSTINSIHRYLGTTANGTGNGTAVESLYGQANYFQLVANLYDHFYWQISEIRTNVHTGCGLEMQAYLTALHSSYEWAQKAYDSSGRYRGQLLFGNDKWLGQLSFCYELNRQSLTEERQHFDLQFYVADVALHLPSLNRSMLLSLGECLPKSCSDIDVKSILSLDPYARMLTVLGAHNTSMQQPPLQILHVRTVPGIYSHWRQLKFQLKIDERRLVVAPIAAISGKCDGTSTKNDVFYGKSFELFQMRPLGCTSSSTDDPEVDVNGNRQRCGDSSDMENGVQREFADPNTSTSVGEKSEMGDYQMETGSCAGGTGTYEAKQSVALHQQILLCFALQTNAKAILNINKTKEIHTACLHGLRVFSVLWTMMVHTYLQMFAIGENKVIGNATFSVDSFFFISGLLVTMLYLKQNRKYPTETCLFIKSCFSESLMMLLYRYLRLTPVYLFVVIFNDFAVSSWSISGIISLTYQYTHKVSLPFESFDFLYDKPWQRVGSYIMGMCTGYVLYKPFRTSDRGLWGLGRTFRHHQQRLLRGRSPHSLRMWASVDRLILLLGACANRKCNTVVSRYVATFTTHILCLSDPSHHNVHLLFAHERHCSPKQSSHPDLVFRQRRRVVRMRLCHIRLF

SEQ ID NO: 26059 - DNA, 3708 bp, DROSOPHILA
atcgttgaacgaccaaccgcactggtcgcacacgtatcgctttatcgagcgatcgaccttgggttttggtcgccgctttctgggctttcggacgtgctcccgcggaggtggcggtggactatctgccttctcgaccacaggcacacgaagccgcttgaccctgactcgtggggactgtctgttcgggaaattttggtcctcgatccggatttttttggccggaggatatcttaaaatcggcttttcgtcctccaagaaatccttatcatcatccattaaatccttatcatcgtccagtagctccttatcgtcctcggtgtctactgtatcatccagcacctcccgtttcagcagcggatcactaagcactggcgaaacctccggggagccttttgaggcgacacccgccttcgaggagatcctctggtggagatttgcgtgcgtctccaggcatcgctgcctgaaggctacggcttgggtcaggtccaggagacaacaagcgcatatgtgctggggcagcatattctctaaaacgatctggaaatgcatagattatgaataattccggacaacaaataaaagggacgccacctctaagcccgtgatttgctcgatggccatccgaatgcgatgattgcgcttctcgaagatgttctttgggtgcggcgtgaagatgcgctcgccgcagatccgacactcggtgctcattctttcgaaactaaataaaattgattaattttaattacaaattatagtaatttttgcgcagccggtttggttttgaagtgtgaccgttgtccgcaactagaggtgtcaaacattgatgtttttaaaattttccgatatatcgatgtttatttcagactatcgatattggtgttcaaataaaaaaaaatcggcactgcatcccgtgaattttcttttttaattgaaatacataatactcctaagaaaacacgctttacaagcgaataaatagttgtatatatctcctttttttagcaatttatttttatctttaggctacgattataaaaataaaataagcatcataagcaagtttgaagctcttttgtgtacagaatttgtagtaactagcctagaaaaagcgattagcaatcaaaggaagtctctcataacgtgtaattgtcaaatctttgtcaaaatgctctatagaaatgcctccagtacgggggccgcgatcaggcgccaactctcccgccatcgcagctcctggaactcctggattttgcgctgaaaaccagctcttgtctccaggatgctgggattctttggaaaattttcgaaccaaatcctcagctgctcggccagctgaacatggtcgccaaacacgaagccattctcgccgtgcttcaccagctcatccaggctaaagagccatttgtagaagttagtaagtaataatagtaaatggcaggattagttaccacttgaaatcgtaggcgcagacaggcagcccgctgccgaacatgtcgaccaccttcatgggcaggtcgagcccactggtgctccagtgcagacacacgcccaggtcggcgctggccagaacagtggggtagtcctcgatctctagccagggcgtgatcaccgacaccttctgccattgcagcttctcgatctccgccacatagtgctccttttgtggcccctttccggtgatgatacacagcagggaaggataaaccaacggctctgcttgcgcagtctcctcgtaagcttgcaaagccttaagcagtataccgaagtcctcgtccggcgtccaactggtgctggaaaccagcacggcttgtcgctgtggtctgtactgcacaacaccgctggccagcttttgggtaagagcggtggcctccagaacatcggattgttcggcgtccttggcctggaactgtgggtagtctttggccagcttcaggtacagctcgtgcttgtgagtcaagtcgatgggatggaattgcgcgggcgcacgatcatacagaactttgacaggcctgaaagatgagtcgcggctgagttatttacttcgtttagatggatgtgatgaggacttacccaatgccccagttttgctgcagatcctcttgcatggcccgcgtcacacagaagtgtgtgtgtgccttggagccgaagtatcgctccagtcgcctaaccaatcgtattagaggactctgctctcccttcgacattcccaatgccagcactgtgtacgtgtagttgtgccaatcgatggccagcttggttcgtgtgaccgcacagtacagatagcacacaatcagcgtgggaatgccgggcggattctggacgagtaggaagctgggacggccaatggagatgagagccatcagcagactgagcgtctgccaaaaggccttgaagagcaggcgcagtttgggtgttaggttcgtcactgggacggcagttagctcgtggattcggcaacgtggatgttgagtcagttcctccagcggcctcgtctccagatacccaatcatgtccacgtggtagttctcctcgagaagactctgggcatggtactgcatgcgcggactgcgtccaatgtcgcccagcacgatgacgcaggcgttgcgcttcttgggcagcacttccgccatcgctgggcaagaaaaataagcgctttatctgcgatcaaagggaattgcgcgttttgtttgtgattcggttgaatcctgtggaatagtgggaccgtactcagccgctgcaaaatgcctcggaactctgctattatggcgctatgttagggtggttcatttcaacatttatttactacctgttttaaaaatttgggtattttatcattttatccatctattctatttcatttaattttttaagatgagtaatcagaattcttagatttatatgagcgaatatatatactgtttagatttcaaagtatgaagtgataaaatagcataattttaagctacattttttctctaacattgcatttacatttcttaacagtactgtaaaataaaatgagtgcggttaacagggaaataacttaacagttgccgagtgaccgtacctgctttgcgtatgtatgatcttaattgcagtaaacgtgactggtcacaccacaccgctcaaactgaattctccattcaaattcggattcgtatggacgtaacgtcgcggctcgtgagtgcggcacttttctagcgggacttcaagctcagtgtgtgtgtgtgcgcgacagtgcgtcggtgtgtgtgagtgtttacccacaaagctgtgctacaattttcgcagcaactaatgctcaggtagaggaaatattattaaatatactagttggtgatgaaaaacaaataattgaaacaaagtttatgactgcttaaacgggagaattgccggtgagtaaaatcaggaaaagcactccaactgccgttattttacgcattttcgccggcacaacaagccggctttccaccctccagttggcgcctgtctggatgtcaatgtgtgggtggctctatcgttgtccgcgtgtgtgtgtatctgtgtctgtgtgtgggggtatttcgagccatcgaatttcgatgaagtggaaatgcaaatttcgtacaccacatactacaatttcccgagctcctgctggctttgttctccatttatgcatttttatgcgcgtagtatttttcctctctagtgccatcgtcaaatttg

SEQ ID NO: 26060 - DNA, 1589 bp, DROSOPHILA
caggattcaaccgaatcacaaacaaaacgcgcaattccctttgatcgcagataaagcgcttatttttcttgcccagcgatggcggaagtgctgcccaagaagcgcaacgcctgcgtcatcgtgctgggcgacattggacgcagtccgcgcatgcagtaccatgcccagagtcttctcgaggagaactaccacgtggacatgattgggtatctggagacgaggccgctggaggaactgactcaacatccacgttgccgaatccacgagctaactgccgtcccagtgacgaacctaacacccaaactgcgcctgctcttcaaggccttttggcagacgctcagtctgctgatggctctcatctccattggccgtcccagcttcctactcgtccagaatccgcccggcattcccacgctgattgtgtgctatctgtactgtgcggtcacacgaaccaagctggccatcgattggcacaactacacgtacacagtgctggcattgggaatgtcgaagggagagcagagtcctctaatacgattggttaggcgactggagcgatacttcggctccaaggcacacacacacttctgtgtgacgcgggccatgcaagaggatctgcagcaaaactggggcattgggcctgtcaaagttctgtatgatcgtgcgcccgcgcaattccatcccatcgacttgactcacaagcacgagctgtacctgaagctggccaaagactacccacagttccaggccaaggacgccgaacaatccgatgttctggaggccaccgctcttacccaaaagctggccagcggtgttgtgcagtacagaccacagcgacaagccgtgctggtttccagcaccagttggacgccggacgaggacttcggtatactgcttaaggctttgcaagcttacgaggagactgcgcaagcagagccgttggtttatccttccctgctgtgtatcatcaccggaaaggggccacaaaaggagcactatgtggcggagatcgagaagctgcaatggcagaaggtgtcggtgatcacgccctggctagagatcgaggactaccccactgttctggccagcgccgacctgggcgtgtgtctgcactggagcaccagtgggctcgacctgcccatgaaggtggtcgacatgttcggcagcgggctgcctgtctgcgcctacgatttcaagtgcctggatgagctggtgaagcacggcgagaatggcttcgtgtttggcgaccatgttcagctggccgagcagctgaggatttggttcgaaaattttccaaagaatcccagcatcctggagacaagagctggttttcagcgcaaaatccaggagttccaggagctgcgatggcgggagagttggcgcctgatcgcggcccccgtactggaggcatttctatagagcattttgacaaagatttgacaattacacgttatgagagacttcctttgattgctaatcgctttttctaggctagttactacaaattctgtacacaaaagagcttcaaacttgcttatgatgcttattttatttttataatcgtagcctaaagataaaaataaattgct

SEQ ID NO: 26061 - protein, 446 aa, DROSOPHILA
MAEVLPKKRNACVIVLGDIGRSPRMQYHAQSLLEENYHVDMIGYLETRPLEELTQHPRCRIHELTAVPVTNLTPKLRLLFKAFWQTLSLLMALISIGRPSFLLVQNPPGIPTLIVCYLYCAVTRTKLAIDWHNYTYTVLALGMSKGEQSPLIRLVRRLERYFGSKAHTHFCVTRAMQEDLQQNWGIGPVKVLYDRAPAQFHPIDLTHKHELYLKLAKDYPQFQAKDAEQSDVLEATALTQKLASGVVQYRPQRQAVLVSSTSWTPDEDFGILLKALQAYEETAQAEPLVYPSLLCIITGKGPQKEHYVAEIEKLQWQKVSVITPWLEIEDYPTVLASADLGVCLHWSTSGLDLPMKVVDMFGSGLPVCAYDFKCLDELVKHGENGFVFGDHVQLAEQLRIWFENFPKNPSILETRAGFQRKIQEFQELRWRESWRLIAAPVLEAFL

SEQ ID NO: 26062 - DNA, 63209 bp, DROSOPHILA
aatagactacaacacatggttctcattccggctctttagctggggagcatttattttagaaacccccacacgtacatacacctagcatatgaaagtaactatcctcatgagattcaaccgtaaagacttgacctgctacttaagatactcgcaagacaaaccgtacacaaaactcgctcaaagtgttgacctaagtctccgcattgtttaacttgtacataacaataattattaggtaaccacttaattttaattgattttgttagttttagcttagttgtaaacactattgtgtcttccctcgaattttaattgaccttcgataccaattacaacatacgtactccatacccaagtgttaacctttaatattctatcaaaagcatttactctgtacaacttataaatgcttcaaatcgcagtatttgcgctaatccaatactcattttgcattaacttaaaattaaaattcaatactgtttggttgtgtacaacgtattttttattgtccattgatatagatgcagtttgcactgtactccgagtaacttaaattgatattaatgtatgtatgttccctcaatatcagcgtgtgaaaaattataaacacatttgtaagcatacatattccgccaaatcgctcggcatggctttgtgtggatattgttggttaagcaaataaatatatacaaactaaactaatcaatcagtgtttaatcagtgttttatattcaaaataaaatagttatcgtcttataaagataattaagttctacatttgcagctgaaatccaagcaaacacagtccacaaggcaacaggtgagaaatgtcccagaaatttcccaaacaatcgccccttcggacacacacacacacagaaagcgcaaagagagaggatgagagggagagagagagagcgccggtttaagcgttgtatctaaatccgatggcgagtatctgagcatccgattcagtcttgtttggaccgtcgagcgatcgagaaccggatttcagcgctagtcggcgaatcgcgagagcgtgcgagtatttgtgtgtgcgtgtgagcgtttgttttgggacaccgatacggatacgggtacggatagacggatatacggcagcggtacgcgattagcaatccgccaaccggttgcagcggtgctagtgcaccaccctacaaaaaagtgaataatagtatgcaaagtatctgaaagatagtcaagagcagagcaaagtatctgtgtttgtgtgtgccgtgcttttgtgcggagtcgccacccccgtggattagtggcaccctgctgcaaatagcccaccactctcacaagtgtgtgtgtgtgagtgttaacaattaatcgcatttaaaaaacaatttggccagccgcagtaacaataacggtaagaaaagtcggcggtaccgttgggaaattttcaccgttgtctggcaacttctttgtgcccgtcgtgtatgtataggttgggtgcagaagtgtgcgtgagtcctgcccacgcccaccgagtagcgctagtctgcgaaatcaactgcaggatgctgtaggttgatattttatcggttagatgataatagtctttggtcttccttatgatttttcgccagacgttaagttttttcaatttgggaatgcaaaaacggttactttatgcaccgtatcacatcacacacacttgcaaaagggtgtgaaaatgtactgccatgagggaggaaatatgcatgttctacgactcccaaacaagtttcatactaaatttccgaatgtcttgtttagtacgtaggggagtttctatatatttcatgctactttttatttataaatcgagttttagaggaaataattgcagtccctgaattttcagcgattttttttcggcgcatgcgcccttggaaccgcagaaaagcaactctgtgattaccgttgtattcgcttgtgcgtccattcgtgtgtgtcagtcagtgtgtgtgtgtgtgtgtgcaacctgtgcctcctgccgccaggtccttggtcctttgtcgccgtcaggtagttttcagctttccctactcaaaacgcttcattctcaagaacctcttaaaattcttcgcagtttccatgtggcacacatacgtcgcgatcctttcagcgcacatgtgtgtgtgtgtgtgagtcctgatgttagtgttgtttcatcccctgcttgtaaaatcactgaaatcccgtgcagctgccttcgtcctttccttgctggtgtgtctgaagtttccactatttgattttgcaagtgttgcactaccctcctcctccgcttccttctgcgtctgctggcgatatactttttattttcctgcttctttttctggtttttcgtcggctcgccatcctgttgctaggcggttttccccaccagttggaccagtgccaattttccatgtgactccctgttttcagagcaataaaatagtcagtgaattacctatacacctatgaacttgcagtaatattattgaatagtattttaggcactattgatttaattttttttaatttctgtttacattgatactccgcttaatgtaaattattatacttattttacaataactaattatttatttacccacatgaattactggtgtctccctttaaatgtactgaatagatcctggacattttttgaaatcgttaataagcttttctgaaagtgctccactcgttgagcgaagtgctcaatgagttttggcaaccaataaaatcaataaataaatccaatagtgtgccattttattcacacacatttcagataagttctaagttgttttagtgatggttactccacccactaactaatttatacacagcacgctggtggttaaacagatttactttggccgctctcatcgatttgatgagaatgcactcatcgggtcgcttgtgaaggcaaatattgatttccacttgggcagcaacatgacacagcggaaaaggttaaagtgaacaaaggaccgaataaatatttccttttgtttctactgccgccgagagcacttgaatctcaattagggccgcagtgcggaagctctgggcgcgaatgggtcacagcagcgtttctggacaatggatgtgtgtcctctgcctccgccgacgaccctgcactgggccactgccctcagtgcccactgtgccccatccgaccattcctgcggcaccacccttcctaaatttattggctcgtcaccccaatttaaagttacacatgcagccagacggggcaacaagaagaatacgaaaggcgagcatgagtaatattaaaatgcttttgattcgttgattttaccacgcgattgaccaaacggatccgctcaccgagggttgtatctctttatgtaggtacattgtatatggtatagatgtatccgcacatatgttgcctatacggatgcctggatccgttgactgattaccagatgttttccaaattgcttcagtcgagcatcagttgtcggtatgggaagcgaacaatttctaagctgaaagctcaaggagagatgtattgatgagtcattactcgaatatttacgtgctgttcggcaattttgggcaaattacttttccatttatgatttatctatttattttttaaacaaaaatctaaattcattgatatacttgatggattagaaaaatgcacatgattcttaaaggaacgtgattcaattaaaatttgcaaccatttctatatgtggataaacttcttcgtcttcaaagtgtgtttttgattagcaaatacatttcaaaaataattaatatacataactattttccaccatccgcattcctctctctaattctaaacttttctggaatacttagtagagtcagcttaaaagggaatttttcggttaataaactcgtgggtttgatgccacacccctgatggaatagtttggccaccccagagcctttgatgcagctgtttccctgctgcaagctacagtctgttcattaggccaattgaaaagctaacatgggtacagtagaccctccaccaacccccgattttattattccaaaggggcacagatcgctctatacgcctgcgcaaccctctgagcaaataaacccaaatcgtagataagccctagctttctagttgaatgatccgacttgaattgaacgcggagtaaaaaacgaaatcttcgtccacaaacgaaggaatccacttaaaagttaattaagcgttaagaagctcagcaatttgctcttcaatctatttccatgcacaagtatgtgtatatggaacaattagaagcaagctggtggattaaagtaagtcgctggccatgcggaggagctggatctcttggggccgatgtcaaattgcagccatcgaggggatcgggggacaaacagacagacagaaatgtggaatcgtgacttcctgcctgtcataaagtgttttttttttcttctccaagctgcggtggtggcggcggggaagggggacgcgtgacattttatggatagcagaaggcggaaaaacgaaaagtagttgcctccttcttctatcgccatttgtggtttaattaatgacatccatccgcggaaccctccttccactgcccactgttgcctctttcgtgtggttccccctattttttattccatttgctaaacgcttttacagggcttctctactggaaatttgttggagacacttttcgggatagacctcagagttaggtatttgttttttattcgattcgtgctgatattgttgctccataaacaatactatgacagatacttgggaattgagattttagcttgaagagcaataaacacagccattggaggaattaaccttacagtgttggaaaggaattaatgaatatattaaagtgctgcggattgcattgtatttaacttttttgtgttttaagtagtaaaaaaaaagggtaaaatgaaggtactctgtagagggtggtttgcctaatcaaattacttacacttcattaaacaaaaggggacattttgcaaaagttttttaacttgtaatttataagcacaaaaggagtagcccctataaaaaatgtataaacaaaataaatcatataatatcttataaagtaatgaaacaatgcttctccccctttttcagataattcggacgtgccaagggtgcttttcagtggatttttgcgtaaaatcgatagtcagatagacccgctctctactgccaacttcacacaacccgctcagcggaaacacggcatacgaaatgaatatgcccaacgaacgcctcaaatggctaatgctgttcgcagctgttgccctcattggtgagtaattgcacttggcccaatacattcgtgtttaaggcataccgaactggtgaactgtagaatccggaaactatagaactttgatatttattgctatttctcggccgttctaaaatttacattacgaaatcaaagcgttcgctttagtcgagtgtcccgaatatcagatacctattactcatctaacagcaattcatgccttcaggcagagatgaagcaatgcgtttgctttagtcaagtgtcacgactaccagataccttttactcatatattaacactaagtaattatgccttgattatgcacatgcatttatgtactgaaaatacgtaatttatcttagagatacatatattgtataaagatttgaggttttaggcacctgtgggtaccgactttaattgaggtggtaactggataaagaatttgaactgtctgaattatatagaaattttgttttaatccaaataattgccgacttatcgtggcattgatgttatttaattcaggttcgttttcacttttaattttacgcttcttatctctgttgacacatgcgcctcaactttttacccaattttcccgctgtggatttcccaaacgtttctgtgcatttttgattctgtttttcttacatttactttggctttcgctttttgtttcattgcgcttgtcggttgcctgtagttggatattgtggttcgagtgtgcgtctggacggatacatttgtatctttttgtgtgggggtgcagataaacgtgcggttcattgcctcgactgtccggaaaatgttgttgttgggtggggagaggggactctgaaggggctgtgccacatcagtgggtcagattgggaattagtcagcccaccgagtagatgagtaatttcagttctagacagactgtggacataatttcttatgaacggatttattcctccattttacttttccctattatcgtaataattgataaattgcatatgcaaactatttgttattatacaaacaattatgatattgactgacgtaggccttaaacatcaatacatttcatacgttctcagccatttttatctttgttattcaagttacctcttatgttagcttaaatggaaatcaattaggaggccagtattcttgacccatcgccaaataaagctttcgtttatattacgaatttatagagtgacttctttcatttacgttatcagttcgcaaatgtgtattttgtttattcttcgcgtataacatcataaaaaaacgttctatagaaataaagaacaaatatataaatagattaggaattacagaaaatttgctccgtcgatggagtcaggaatgagaattacatttttaaacgggaatcgcgtgatgagatactttgttggaatttcgaataaataaacgctaatggaacagaatattttagaaaaagcaaaaaaaaaaaaagaatactatgtttgaaatgagctaagcagatcagcagagatgatgatatcgtaaatttaaagaacacattatgcaaagtgagtacaaatattcgcccgtcggaatgaaaagatctcagagatacaactttgagtgagcgtcttatgttgattgtgcgggtcatcattcaattgaaattgattaaaaacattttgcgccagtttttacttttttttattattatatgtttcgctattgtggcgatgcaaggcaaaagcaaagcatgttgcattaacatttaaagccagacttaaacaataaagtggatttattgtgcgctctacgttatgggaaagtcggaatgcgatgtttatgttgttgttcctgtctccgctacagtcggacgcatttaattcgcaatttcattgaattcaattgaaattcagctcgcacacgacgacggacactgtaatggagcttaaagttcacaagtggccacagtgggttcaaaacactgcagccgaaaagcaaaaagtgggcatgtaacacaaagcaaataaacaggaagcagtcaatttgtgtgcacatgtatgtgcgaatcaaatggcacatatgtacatatggcattatggaatgggcttgctatgcttccgaagcatgctttttgtcattttctattgaaaagataaaaagttatctgattgctagctctaattagagcatacccatgcttctcgttcgctattgagttctatttatatctatttctcgcagctaaagccttgtacaagctataatataagctagataagagcatattccaatgggctaacttactgctgataagagaaaccacttatcaactgggtcacaactgcaatcgtcgagatctctccttaagagatttcgtaagcaattagaagcactgcatgccactcaaagcactcgtaaatatgacagagatcatcggggagatcactgaaccaggccctgttctaggagaaactatttccgttcctacacaaagccaaatggtggagaatgcaagaaaggagccgaaatgtggggatggagtggggctgtccaagatgggaaatgcattccgtaattacagatgattgatgtgcccctcctgacactttcttcgccctcttcgcagtatgtgttatgatacctcgacgattgaggcacatcacacgcttggtttgttgaagcaactccaaggggatgcccatgccatgctcctcatctcatccatatacttagaactccaggttttcattcatccacatctttcgatatcccatgcaatcagcaactgcgaacgagttttcgataattgcgtaaataagtgcctgataacgatgctgaaagttggcagcaatgccgtgctaaatgcatttcagagaggaatctagtcgaggtcactttcccgaaaactcttaacaaatccagcgagaagtcgcgacatttcagggcatcaaagcgtttgttggcccattaaaagcatttgtcatatattcgagctcattgagtgctcccccagaagttgagaaactttcggattcatgtgcatgtgtaaaaagtattaagttaactcaaaatattttatgagctgcagccagcgaaagaatttgtggggcccgccagaatttattttaagatatagttttaagtgggtgtagcgtaaatggcgctgctcttagcgagacttttaaaacttcggcaataaagttttccttttcaaccccgttggtgttggttggtggaaaaccccaaaggtctgctgtctgctggctctcttcctctgtcgctgacacccctaaatcgcagtggagagaaaaagttgtgaaaaatgagaaatgtttgtttagtttgccagcgaagatttgctcccatcgcttgcaacacacgcttttcattttgcccggcaagagagaaaagtggcacccacccccagattcccctcgaacagctgtaatgactgagggccacgttggcggcacgcatttccacctcctccatgccaaacattgtcctaccctctggaaaattattatgtacttatttacgtttccctgcctgacaagctgaattcgagcgacgcgccgttgccgctcttcactcggcgggattccccttgcagcgccccctggcgacgagttagtcggtcaagaagggcgtcgtgggtgggaagggttgtgcacatgtggttgccattttgcactatccaaccaaagggactaaatataatattctgttgcctcaaatataagtcaatttcttctttatttcgactcttcattcaagtgacattattttggatcactccaaaataaaccgtatgttgtggggatacttaagttaacacaaactcgtcgagtgattctacaatagttccccaagtcactctatggctaagaatttagtttcggcacataaggcaccataaattgtgtggcgttaaatgaaaagaaatctcttatgcggaaagatacgaaccgaagatatctcaaaaatcaaattcttgagtgcgagcgacgaggggaagaggattaccatcgttttggcgccccctaaaatggaacggaatcaagtcgtcataataatttgtaaaatatgttcatggccccacccattcacccgtccaccgatcccagttccagtccaacagcctcggagaactgagacttatcggcacacatcatctatggatgtgatcgcgcacgtccaggcatttcgaaggcgggatttgattggagtccccatacaccttcccttccaccttctgctgagtcacgttttttgtttttttggggctgccgagtctcaacccatttgtatcattccatctccataatctgcatgcgaaaaaagtgtttaaacttaaattgtagatacatgcgtgtatatatgtacgtatttttcaacagccttttactgtgtagctcgaagtcttaattaatgcgcacgagacgatgacgatttcaacttgaatttatatgcaaaacacgtctgcagttggtcttccctttgtcaggggtacataatgtgtgtatatattttttgaacgcttctgtcgttgaagttgtctttatctgaccataggaagtttgcatacagtggtctttaaagttaggaaacgtaggacacgtcctaaaagatttctaaaactgatcaaaattgtcgtatagatctgaacttttagttttacacttgcataaagccattgcatatttccttattcgcattgtactgctcttattcttcatgacacttctgtatctttgagataaattccgatacttactgaaaatgatgcacgtgtccgctctgctttacttttctcttcttttcgtaaatgttttgcaacgctttcaattatacaacaaatccacccccaagttctcccttctctgctactctcttcctcggctccattgttcagcccctgatgacagtctctctctcagaagacagtggtattcgagctgagatggttgctttacttgcttgaaaccgaatttagggcgatattacatattgtgtgaagtagtaaaaagtagtaggttagtataaaactgaatgattaaaaaaatgtttttgaaataaaacaacataatatttcacctcgttgagtgggctgacatcctcaatgatacaatattttatttgaagcgctgttttaagttgcttaaattaattaaagcattggcttaaagaagcaaagaatctataattatttaaagtattagaatagaatgttttgttgccataacgacaacattgacccactgtcgcctggcatctagtgccactggaatcagccgcatcatcatcactcccggccctccacctggccctgaagtgtgttcatattccgcgtggcctgctccagttcgtcccacttctgcctcctgtcgacttaacggcgttttcctccgctcccggttttcgcacctggctgcggtttcgctgctccctggccactggtgttcccgttgtcagcttctgtcgagtgcggcatttcgtcaccgtgactccctgtcatcttttgagtgccggcgaggtggacgggtgagttgcgggcagcttgcggtctcggacctttccacgggtgacttgcacttgccgacagttggaggcgtctattcagccagatagatagctgttagaatcgtgtgggcagtgcgtctgcagttaagtgtgtcacgcattacacaattagttggtgtctctgcactggaaaatgagatacatttgaaacgagactaaacacggttgcttctcataacatttggtaattaaaaatcacactggcagtaactatgtgatttggttattgcagcaagaacgacttggcttgaatggttaatcatatttagctgtagttttaacaaaatgttatcttaacaaatgaatagctgagaaaagaatctaactataagaataggtatgttcagtagagcaaaattttaatcgatttttgccctgtgtagctgaatttgtattttcattaatacatacatatgtatgtccgcacgagttgtaggtaatgctttttggactgtgatcgtgatcgtgagcagtgtgtgtgtggggtaaatgctgtgcgattcgcatgaatgagtgggtaacgctggcattgagacaccgatagcgatacctgttctcccaatcccgccgtactcctccgccgaacagctgtcgaactggtttctgagctcccgagcagatgtttctgtcttttaccggtcgaaatcgcggtgaaaaagtcgagattcattgggtttttggaaggggtatatatattcgattcgattggggtgggaggcatccatccagcctgggcagttcctttcagttccattcctgacctcgatgacaagagtgcgtgatgtggacgcttgggcgatgggcggggcatgcgtgtgtgcctattgaacttttaggccctttgtttttgtttagccggatgttattagtttccaatttcctagcttaaggggtgttaggggtttgtatgtgccacgaaataagttaattaggtgggcagcagtccttcgatgtcgaagaattacatacatatcgaaaataatacatatgttattaatgcgtgtgaaataaacgcagcttaataattgtttgcaccctcgaagtgcgtgtttctatctgtatttctagaggcactcctctacctgaagtttattataagttttgattactagttgatttgctcactagtttggcccgcttttcggctagtctaattaaatacgatataaattcgagcatctcgcgctgagtcactcgccatcttaaacttgataaagcgaccttagattcgtccgcccgcaccatcatcatcttcatcatcgtagcagaattatcatcgcattttgcaaattgccagcttgagtggaaaattgcgaggcgaaaaacttaacgaattcagcacacaaaaattcaagtgcttgattagcttgagttttgccgccgttgacatcgcagttctgcttttgcctccaaatgcttttgcttatgatttgccttattctacttttttttactttactcttttttttttgctctttaaagtcggcttcctaaccggtttcgttctgcgtgtttttgttcgcagagctttgggtttgaaagcgaaaaaggtaaaataaaaacacacctgctgctttttctgcagttcgaaacaaaactaaaactgggagcaggtgtaacttaaacgaggatagtatataaaatcaaaccccaaaagtgaagtattggataggaaacataaaggatgcagtttccggaattttagtatcttctttttaaatgatttcagttctgctcaacagttgcaatatttacaataattcgctctgcgtgtttcttatttcctttctctactttaccctcggtttttgctgttttttttcgcacgatccatccaagattttacgatttgtattccgaatggccaccatatgctggaaaaaaaatatataaatatttatataattttgagtgtgtttgccgatatacagtctgttctgcaattacagttcagcttgcatttaaaatatgtataatgtgttggataatcacttcttttagcttagttaaactaaagtgaagcttaaactattactttatagataaaagtatatcctcacaataattttgtttaacaaatgcattcaaatgacacttaataacagacttgcactgtataaaaaatgtttattgttcgacagaaaataaggtttaataaaaattttattttccacttaactgaaatcttaaatgattaagttattccgttttcaactcttagaaactgcgatagtagtctattcgaaatttcaattgttcattgcattcacattatttaattaacaattaataaataattttattttaaatttcataagactttttagaggtcttagtttacttaagaacataactatacttattctgtgcctttgagctttcttatattaatggatttaaataattcgagataattggcatatctctagttataagaaatgtttttctgcatgctaaacatacattcttcagttgatatatgggttcttaagttgaacatttgcagcatacaaagtacatgcagagaagtagctaaccaagcctacaatagcttttgccctcgacaatttgcatccatacgccccgagaattgcatccgagcaatatttatgcgggaaagggcgttgggtgggcgtgtcaccacagagaaatttgtcaacaccttttggtaataggaaatggtggatgggggaaattccgagcgccatgacgatgcatacacgaggtctgaaatcgtttgccaatgcaaagtgacggcatcaacaaatgaaacccattgggggagtgggtggagtctgcaaagtgtcaacgaacgattttcagcctgctggtcttttgtttgtcctcaggggcggtgggtggaactggaggtggaactgtggctggtttggcagagaaggtatggaatggaacacagcttttgttggccgtgcagctccgaggagtcactgatccatgcccctcaattgtcaaactgaaatggctggaacaatagtcacactgttgacatgaatatgagaatgcacttccgctgcggaagttctgaccatagagcgtagcccagtgtttgttattcaagtgcagggatggctgacaactacatcaaattagaaatataaacagaaatacaaatagatttaaagatatcactgcggacgacaatccacgacaatctattttatcagttcaaatctataaattgtataaattagtaaattacctaatgctcgcttgaatttttgttccattttagcttgtggtagtcagaccctagctgccaatcccccagatgccgaccaaaaaggacccgtcttcctcaaggaacccaccaaccgcattgacttctccaactccacgggcgcagagatcgagtgcaaggccagcggcaatcccatgcccgagattatttggatcaggagcgacggtaccgccgtgggtgatgtgcccggattgcgtcagatctcatccgacggcaagctggtcttccctccattccgcgccgaggactaccgccaggaggtccatgcccaggtgtacgcctgcctggcccgcaaccagttcggatccattatctcccgggacgtccatgtgcgagccggtaagttgtcagggttcagaggtaaaccaggggcagtgcaaagtaaatgttggtaattgacaaagaaagtcattcttaaaaaaggatagatatgagctttatatatttttaaaaagtttaaaaaaatatttaataataatatataaaatattacaaatattcatttaaatgaaactcaacatttagtttaacagatttttaatacaaatctgcaatcaaaatacaagaatagaagatgaaaaagctgcgagttaaagtaactaattattttgaagtcggtagaaaattccttttgaattaggcaaccaacaggtgactactttgcactgccctgagtttacctttcttttacaggttcacccaaatgaaggcctatgtatctgcgttggtttcgtatctccactacttggcactttcagtttgcagctaaaagttgccggttgcctttgcgtgtcaagtcgctctctgcagtctttaaccccttgtgtttgacttattgttgcaccggctgcggcaattaaaaccgagttttcacgggatttccatcgaacgctctgcgaattgccaaagttttccgcacgctttcattttcacacatttcttagtcgaactatgcaacgtttagaggagtttaatgcaagttggcatttcagtttaatcggttcgttttcgcagctttacttcctgtcgcaatgttttgtcggcaactgtacctgtcatgcccgtgcatgtctgttcagcaacctttaacagcttccctggaagatgtggcagctgcgacgatgacgatgatgaagaagatgatgaaactgtcagactatttagcgcacaccgtggggttgacgggttgccagctgatcgagttatggaccagacccaactcccttggatatcagtcacttccgcttccatggagccatccctaaatgggccagacttgagcacattttagctaattatgtcggagccatgccacccgcttactcatcgccggctgacgtgttccctggcaattagccagcacacctatcccagacaccacctctcgacccccgttccagaagcctgacatcattattgtcgtttgctttcgcttgctattaaccggaggaatttatcattttatagtatgcttatgtgtgaataaggcgcagacgaggaaaacattctgcacagccggcccgcagctagttggccgaaatgagttatggtctacaccctgaacacgggctggcgtaaagaatattttggttaattgaaattaacttttgcctgtcaagcagcggcgcgatgatagtttcggggttttcgaccagaaggtcgtttacaacggcagaattttccaggaactcagttcctaagcactttcaaggttgtgagaatgttttggacataataggtaataatcggccttttcccagtggttgcccagtactacgaggcggatgttaacaaggagcacgttataagaggcaattcggcggtcatcaagtgtctgattccatccttcgtggccgatttcgtcgaagtggtgtcctggcacaccgatgaggaggagaactactttccgggcgcggaatacggtgcgatccgagctgcagatgcaggcagataggatacatgtgtagttttgctctactaaaagcatgctggggtcgcgattccgctagttgcacagaaaatccctgcattccatcattcattcattccttattttaatctgaatctcaccactattatcgtttctcctacctgtttagtcgtttcccaacactacgaagaagatatacacaaggcatttgtcatccgcggcaattccgccatattgaaatgcgatataccgtcgtttgtagccgatttcgtgaatgttatatcctggcatagtgacgagaaagagaatttctatccaggcactgaatatggtgtgtgactagaagaacagtctctgtttgtgagcttttagaaaactatccttaactaccttaaccgctactgtacaacactgcaaaaaaggcaaactcactgaaacacttgtgcacagtgcaagggcagttaacgggaaacactaattacaaaattctgtaaaatatacaacacaccaaactcaaagaataacgtattaaccaacactggctaggcagaaaccagtcgagaatccttcgctccctcgtcgtagctttcccaattcgtcagagtttcgttttcagttctacccagaatttgatttcctttcggttttattacataaacgcatttatttgattgctgtcattgctgttttagtcgttgcccaatactacgacaccgatgtaaataaggcctatgtaatacgcggcaatgcggcggttctgaaatgcgaaatcccctcctttgtggccgattttgtgagcgttgtctcctggcacaccgatcagaacgaggactttctgccaggcagcgaatacggtttgttggccaactttttgattacattttgggctagctatacatacatagggtttgtacagttgcgtgccacctaagaattatggataagtacctaaccattttccctcctgcatctattatgtttacttttatgcgtttatcttcgctatctcgggtgactgcgtgttgatgagccatgttatcaaaaccattattaacctcttgcccggagattttctcagggaagcgcggagctcgcgagctgattgcgcttagggtcccattaagtgcactccgcgatattgtctgcgctgttagaagacactctcgtttcaattagctagcttcacattttcacacgcccgccgcacgcaaggcttggacttaaacttgggttctgtaggcgccccatcccccatctttccctccgtaccatcgcatcattatgtaatcagtggctatgtgaactcaccttcagttgtgcagcagttctatgaatcggaggtcaacaacgagtacgtcataaggggcaatgcagcggtgctgaagtgctcgattccatcctttgttgcggactttgtgcaggtcgtatcctggcaggacgaagagggtcagctctacggctcgctaggcgatcaacagggaacgggtacacatgcactatagcgaaacctaatggttatgtaggattatccacagcccatcccgcacctaccccaatccttcattcagcaatttcatttcattttggttcctactcataaaaactcttgctttacagtcgtgaatcagtattacgaggctgaggttgtttccgagtacgttatccgtggcaatacggctgtattgaagtgcactattcccagttttgtagccgacttcctgcgggtcgaggcctgggtggccagtgacggcactgagtacgctccggaagaggattttggtacagtcccgcaccgttgaaactattaagaagttagtcctaagcagcaatcccattccttccccatttcaatttgcttcagcttctgtttcatttcaccactctaccccattttaaatcgcagttgtgaatcagttttacggcgccgatatcctgatggagtatgtcatcaggggaaatgcggcggttttgaaatgttccattccgtcgttcgtggccgattttgtgcgtgtcgagtcctggatagatgaggaaggcaccgaactgcgtccctctgagaactatggtattaccgcagagtcaaaaattcttgcaacggcaacactttgtgggggtttcgttcctatcccatcctatatccaacttttctatatctttccgttattgcacacctttgcagttgtcaatcagttctatgaggcggagattatgaccgagtatgttatcaggggtaatgctgccgttctgaagtgttccatcccgtcgttcgtggctgattttgttcgagttgagtcctggatcgatgatgagggcaatgtcttgtccttttcggacaattacggtgcgaggcaaagatgttcatccagtagttttatgcttaatttccaccagctccattcccagtgatcccctcttttccatttacttattattttattcgattcaaagtcgtttcacagttctacataaccgaggccgagaatgagtacgtaattaaagggaacgcggcggtggtcaagtgtaagatcccatccttcgtggccgatttcgtgcaggttgaggcctgggtggacgaggagggcatggagttgtggcgcaacaatgccaccgacgcctatggtacagttcaagcaaaacatactgcttcggttaagtgcagcactaggtcccaacaaccacttccttgactcccaacccccaaacccatattttacactacattatttctttgtttttctatcgactcagtggtcatccaaagctatgaatcggaggcggacaatgagtacgtcattaggggcaactctgtggtgatgaagtgcgagattccctcctacgtggccgacttcgtgttcgtcgatctctggctggactcggagggtcgcaactactatccgaacaatgccgcagagacgggtacttggccaggtttctttgccgtagctctctcaggctcctctatagctatccagaaacccattcccgttcacttcggttattatttcaccaagttcgctctgatttccttcagttgtccaccagttctaccagacacgggtcatcgatgagtttgtgctgcgtggcaactccgccaccttgaagtgcttggtgccctcgtttgtggcagacttcatcgatgtcgagggttggatcgacgaggagggcgtggagatcctgcggcccctcccggacgactccgttggtaatcactacgactttcggcattagcatagttagagtacgaaaccttcaacccaccgacccttccctgtcccgatttttagtttctcacctcccgtcttgcagtggtgaagcagtttttcgagtcgcaagtctacgacgagtatgtgatcaagggcaatgcggccattttcaagtgccagacgccctcctttgtggcggatcacatagacataaccgactggatcgataccgagggcgaggtcttcacgaagaacataactggtaggagtccgagtctcgtagatttgtgccgttttctcagttacatgaatggggatcctctttcagacgcctcttttatccttatgatttaaccccacgtcccactcactcaatcaatgtcttcgtacactttgcagttgtgccacaatcatacaccgtcaatgtcatggacgagtccatactgcgaggcaatagcgccatcctaaagtgccacattcccagttttgtggccgatttcatagtggtcgattcgtgggtggaggacgaggagcgagttatctatccccaggaggatatcgcggaaagcggtaaatttacagactaagagctctcgcattgcccactcctccgtaacatcatcctgcgtcccctatccaattcggttcgcttcgatctggtctcgatgtggtttctttagagctctgtaaaagaagttctccacgttcagcgctgcttaggcttttgaatggccttcattgtgtatttctttcattctgtccgccttttctttctatgtttttttgtttttttttttgttttcccatcccaaccctttttagttttcccctccaaaaatccatgggtcgctcctgacttgcccaaaaagaagccgaaaccccttcatgtagttgaacgtagcgttgataaagtagcgtagtgtaaataaatgcaaaaatgctaataacccatcgaccacgtaacaatatgtaaatacatatcatttcaaacgaataatccaacattgctgtaattgtatataccataaagattcgagtatatataatatgtaacatgcatttcatctaagattattggcatttttgtttcatgcatgtctagaattaagcacaatgccatggaatttggagaatcacgatcgaagcaatcaactaaaactatttgaattgtaaaaatgtatctcaattcgaaatttaaatagattacaatcaatctttccggtttgattctgtttgtttatactacaaactcttgggcattgttggtgtatagtaaatgtttatggaactttgttaaaacaaattcgattgaaatcaaaatcaaagactaaaggagatcctaacaagcttagtagttaatcttgctctaaaaaatttcataaatgaatcaaattaataacgaattctatttttaatcaaacatgtgcgaaataactacaagggcttctcatttagtctatagatcttaacttatccttaatcatttcaaagtcacattgcatggtcaacgattagcagcattcaatttttgcacaattaaaagtaacacaaaatgaaaaatgattaccagccatgtggctttcaaatgtagagcgaattaattcaattgaatgcatgctagtcaattgattttgttcgccgtactgtattgttaataagttaagttagccgacaattcatcactaacatattctttattctctatctgcacatatcaaaatatcagatggaaagtacctggtattgccctctggagagctgcacatccgtgaggttggacccgaggacggatacaagagctaccagtgccgaaccaaacatcgtctgaccggagaaacccgattaagtgccacaaaaggacgattggtcatcacaggtaagtccgcctggttggccaatatgccaatatactagccaaaaaccaaaaacttcagctattgtgttcttttaaccaatttggcactttataataataaatgtttaaggaacatattccattcgtataaatttcttgcaacatctacgataactgaagtttttttttgctgtagagtaaatttcaaaagatacaaagtttaaataaatttgtaaacttcgagctattagagaaatacaacatttgtgttatcccaatacgatttgtatcttttggagttttctcatctacagctcaaatagaatagatacaaatcaagtattaaaatacatattataaatattgatttgtttctattcttatgtgttcactaaatatttgaaaaattgagatattaagcatttcgataatattaaaattacatttacttaagataaaaataaaacacttatagcgtaaaagaatttaaaacttatcatatttcaaatatttttgaacacataaatttaatgtcaaattgtttggattttgcactcaaacaatgtaattaattgatattgattgcagtttccaaacaaaaataatttaaacaacaaacaagcaacaattcttggattttagaaaaatgcaatcaaaacgattttttgcttaaaatctctttctttgcgtaccgtaaatttacaaatataaatatatatataattcaatataaatattgaaatatcaaaaatgtaaatatttaaaatgatatttccgaaaagaattgttgctgtagcctaagtctaaattgaaaactgcctgaatgttgggatagggtactcgacaatgctgagagcttgaaacaaagccaaatagagtaggtgttgtccgttcttaagatatccgagttaactgaatcgccaggtcttagaaataattcaagtcccaatcgttggctatcttcacttcttattctcctttgaactgcgctcaaggtaagtcacttcacatccacttccatatcttcaccaattggcattttactatgtaaggctattaactttgaactatatttcgcttcattcacagaaccagttggcagagtttcgcccaagtttcccaatactctgaccagcagcagtttcacgggagacgaaggctctagtcaaacccttctatgccctgcccaggcttatccagctcccctttttaggtaggactaatatccatccagacccagaccaacttgcgccagtttccaattgagattgctcgccttagttgttattagcataatccagcataattagcttcctctttcaagaacccattgcgagtgtggggcccagacttctctctggtaatgacattaaggtgcttcagttctctgcgagccaagccagcaccctcttgtgtccagctcaatcatatccagtgccagtctttaggtaagacatacgcccatctgcctatcccaactgaaggtgttcctttcgagaattaaatattgggttcccctcttcgaaatcccagagcctgttggcagtattggaccccgtttgactagcggcgatgagtcgcgaattctccgggtgtatctggccgcaagtgcaactcttctctgcccggctcaggcttatccggtgcccttctttaggtaaacccaacccaacacttaggcttatatatgtagattacgtttccggtctattaatatgccgaattcaacagaaccggtcggaagtgtaagtccccagctcagtggcaatggtaatcaggagcacataactctcactcgagttcccaagatgggtagcgttacactgatgtgtccggctcaagcctatccagtgcccttctttaggtaacaatcctcctaattttatgcccaacttcaggcagggtctagaatctaaaaggttaatttttatgtgaaacctcctttaagaacccgttggcagcgttgggccaaaactcacatcaggcgacgattcgcggacggtgaggattaggcaggaggatagtgttacgctcctttgtccagctcaagcttatcccgtgccggtgtataggtaaaatcagctcttttatttcagtcagtcccttcccatctcaggcacaaaatgatcttgtagtggtttgaactagaatccctaactattcttccttatagagcctgttggcacagtcagccccaagataagtactggtgaggacttcaagcaccttaagggaaagagcagccaggatttgagtatcctttgtccagctcaagcgtatccacagcctttctttaggtaaaagctccacaagaatatccctgactttcacttcggcagtttacaattgagttaggaatcttgtacgaaaatgaaacgaatttaaccttgcagaaccaattggtagcgtcagtcctaagatctccaattccgatgacttgaagcatgtgaaggtcaagagattgctgagcttgagtctgctatgtccagctcaggcatatccacagccaatatctaggtaactttcaactcctaggcccaacattcaagaaaaagatacctgctttctacatggggatagctaattttcgattttgtagaacccgttggcagtgtggcgcccaagttgaacttcttagagcgctttaagatgatgcagatccagagcggaactagcttcaacattcagtgtccggtacaatcgtatcccatgcctgttttcaagtaagattcagtgaggttttactttaaattaaaatccaaacacattcagtcagttgcaataagggaaaaaatctttaaattttagaacccgtgggcagtgtccgacccaaagtgaatccccaagacaagcaccagttcatagacgtagagctggccagcagttattcgctcctgtgcatggctcagtcgtatcctaccccgtccttcaggtgggtttccctttcccaacatcatcatcagacagttttccttgcttttccgtgactctccttgatgttttgcccgtagaacccgttggctctgtcaagccgaaaataaatgttcaagacaaactgcagacacgcgagatttcccagggaatcggaatcgctctactgtgtccggcgcagtcatatccgattccagcccacaggtttgcatgccatcaattgggaacatttataatttacagggcggtattcgaattcaggacactgctgtttaagtgattattctattaggtttattgggatgtggtttttgagccagctcagacccatgattgtcctcaaatgtccatcccagacatatccccttcccgcttgtaggtaggtagtctttacttgctcaacttccaacatttgggcagatttcctgggtatatatcccagtccttaaagtcttatgtttcgctcagagcccgtagcttcggttcctccaaagctgaatctcttggaaagagttcgaacaatggaggtgtctgtgggcaccaaatacgccatgcaatgccctggtcaggcatttccagtacccattaacaggtaatacgtagcccatcccaacaccaattcagactgtttttttttattgggacatcctgaggatttcaatatacttcatattccagaacccattggctctgtgccaccaaaaatcaacaatatcaacgacaagtttcaactgatgcaggttaaattggaaagctcctttgcgatgcaatgtcccggtcaggcatatccagttccggtcgttaggtgggtgtcgtttcattctatcccagcattccagatagatgatttttgagaaatatttcccctaatagtattgtttcaaacaatcagaacccattggatctgttccgcccaaaattaccagtctgcacgacaagtttcaagtgctgcaagtgaagttagcagaggatttctccatgcaatgtcctgggcaggcatacccggtgccaattgttaggttagtctcgatgccctccaccaacattcacttttgtatgccgaagaattaacttgaaattatcttaaacccagaacccgtaggctcagtggctcccaaagtggacactcgcgatgagtttacttttgccaggacacgtatgggggcctccaaggctctcatctgtccagctcagtcgtatccaatgccgttctttaggtaaatacccctgtccaacattcaggtatttcttagcatggcctactaaggagtcaatttctcttagaacccgtcggtagtgtggccccaaaagttgatattaaagatgagattaactacgcccgggtgggccaggatcgcagtctagctatagtttgtccagctcagtcttatccagtgcctgccttccggtgagtaccagctgtcaggacttgtcccagcacttaggcagtaaatcgaaatcggcagatgccatgactaagctcccccctaaatctttgtagaacctgttggcagtgtggcccccaaagtggatcccaacgatcggatcaagtgggtcgacaagcccaggggcagctccctgaatctgctatgtccagctcaatcctttcccatgccaagcgctcggtaagctttcaggcagttttcttaaaaagatcttcttaagctcatatgtttttggagattggatttagcacttgtactatttgcagaacctgtgggcagtgtagcgcccaaggtggatgtaaaagatcgcattacttggctggacaagcctatgggtcaagccttaagtctgctgtgtccagctcagtcgtatcccatgccagtttataggtaggaatatctcttctctgtcttcgtcaggcagttttcaaagtttcctttagctgataggtgtgctatagtacaatacatgcagttcttactgaacctttcagaacccgtgggcagtgttgcacccaaggttgatatgcacgataagatggacttcaccatcaggagctcgaatagatctttgaacttgttctgtaaggcgcaaggatttcctatgccggcatttaggtaatcacattgctgagtacagtccacaggccacggttttcatgagattgggatcattagttgtatctatacctccgatatacctttcttacagaacctgttggtagtgtggcacccaaagttgatatgcaggataagtttggtgtgaatatcagacaagcaaataactcattgaatttactctgcaaggctcaaggttatccaatgccagcgtttaggtaaaaacattgttgagtacaatcctacagatcgggttttccatttacatagaatgtttagaagcaatataagaatataatttcagagcccgttggcagtgtgggacccaaggttgaaattaaagataaagtgggcatctttgtggccaaatccaatagctccttggccttgctgtgcccagctcaatcgtatccaatcccagcttttaggtaaacacttaagatttaaattgtccagtacgtgaaaccattctggcagattttttgaatcaaaactaagataaaacctcccacagaacccattggtagtgttgctccccgagtaaatcgcaaggatgagttcaatcacgaccgtataaagagctcgaagacaatttccatacaatgtccagctcaggcctttccggttccggtttataggtaatgtcgagtgccctggttgccttattcatgtagttttcatggtctatgatggtcttacgtaattcggcactgtttccagagcccgttggaagtgtggcgccaaaagtgaataaaaacgatgagttcagtcacgatcgtattgccattggcggaatggtggcccttcgatgtccggcacagtcctttccagtgcccgtttataggttggtcattgtcgagagctctttacatccaatactttccaggcagtcgaggcagttcattcccatcataaatctcatcttaaatttgtagagcccgtgggcagcgtggcaccacgtgtcaataaaaaggacggtttcagtcacgacagcatccgccaggacaggacaatagccatcttctgtcctgctcaggcctaccccgtgcccttctataggtacatataatgacaaattgtgcggcatgcccaaagttttccaattacaagaaaagctcggtctcggtcctcaagcctcattggtttcaaactctaattagctttgtgtccaaatctgccacccgatttaacccattcagtgtcacaatcaccccttccgctgcaaaacttagttgaatgacaggtggcttccaattgtgtcgagttccttgggcagttttcaatctcagcacgggttttcggttctcatccccacttccattgcttccagagcctgtgggtagtgtgcagcccaagatcagtgtgggtgagcgtcgcaaggacgccgaggttcccaagcacggcgacttgagcatattttgtcccgcccaatcctatccggttcctgcattcaggtgagccccatccatttccactcaggcagttttcactagacttcggttagctggcactttcaatattcattatctttcagagcccgttggcagtgtaggtcccaaaattagtgtgggcgaacgcctcagagatgctggtgccccatccaagtccaccctgaccctcttttgtccagctcaatcgtatccggtaccatcgtttaggtaatcccaagttcgttcaggcagacttcaaactgacttttaaattctcaaatgttttactaaatgggcaatctcttttagaacctgtgggcagtgttgcgcctaagatcagcgtagaaaatcgtctgaaaaatgcagaggctcgaattggttccaccttcaccctcttttgccctggtcaagcctatccagtacccttctttaggtaaatccctacgcattttaggcagttttccggtttacttagttctagtgttgtataccctctgttttatagagcctgtgggaagtgtgggtccacgactcacttccggtgacaagacccggaatgtcgatatatccttagcaggaagtgggaccctgctatgtccagcccaggcatatccggtaccattcttcaggtgattctgctcagacattcagggagttttaagttatggctgtcttggagtgaatcgttatggaatattatgatttatgtttcagaacctattagtggtgctgctcccagagtggctctcattcagaaaaccaacatagaatacgtacggctgggtgaaatcgtttctataatgtgtcctgcgcagggttttcccgtgccagcttttaggtgaggtccaacattcggggagttttcaataaacaatagttttcctttggtaaaatggtgttattaacctttttagaacctataagcagtgctgtacccaaagtggtatctctggcgaagttcgacatgaagacatattcaggttcctcgaccatggcgcttctatgtccggcgcaaggctacccggtgcctgtgtttaggtaatcaaagcggaaagattgggaatcagtgtcaatattcaggcagttgtatggagttgttagagccttctatagtcgcaaattgaaatctttttgcagagccggtttccagcactgctcccaaggtgccacctctccaatctcgacctatgatagttcctggtcacaccgatctctcaatattgtgcccagctcaaggctatcctgcgccaagttttaggtcggttttcttccaaaataggaaaatacattttttgcttcttatgattcccacattcagacagttcgcggcacttactctccttaacttttgtaactttgtaacttttgcctttcgtagagcccgttagcagtagtccgcccaaaatcaatgctctgacctataagcccaatattgtggagtccatggcgtccaccgcaatactttgtcccgcccaaggctatccagctcctagttttaggtgggttctacagattctgtaggggccttgaaccaacatcaggcttggttttcgatttccttttacatagaaacactataaaactataacaagttaaatccatatacatatgtacgtatgtagaacccgtcggcggtaaagctcccactctgctctccaatgacataaagcgctcttggatcgaacgaatgctgtccaccaatctggctttgttctgtcccgcgcagggatttccagttcccgcctttaggttcgattaataacagttatatctatttgtatttgaatgaaaaagaagaacacaaaaataattaaaatatgagctcaaccgtttctagattccccctcagagatgaagtaacaaataaatagggtactgttcagcccttagaccaacatcaggctgggatatcgatccataagaaatacttcaccataatctcttcacagagcctatttcgagcagtgctcccagaactccagccctggttcaaaaaccgctggaactgatggtggcgcacacaatatcgttactttgccccgctcagggctttccggctcctagttttcggtaagccgagctcaaaaactacgcctgtgatgtttttaaggaatttacttatctacggagtaagattcttgtttgccccattgagcttaattttatagtaatacttgttttattgcgcttaccaaataccacgtagaaagatcccttatagcaagcttacttcctatcccatacattcgtgcaatgtccgcgatagattctaatactgccatcatcccacagagcccatctcggccaaggcgcccgtgctcgcggtggacaccaagtggtctgggatcgaaaggcaccgcgacatggatatagtgctcctttgtcccgctcaggcatatccggtgcccattagcaggttagcagattctttcggctctcttattttgagcgttccaacgtgacattaattatgcatgaggagtgtgaactgctgccctcagatttgttgttgctttgtgtgggtgaacactgggtggggagctggtagttcgagggggcggagggtccattcataaaaatgcgcgcgcaaagcaaaccaaagcaaaccataaacaaaataggcgcacttccccacactctcatacgcagaaaagtaagctacgtaaacaaaccataaacagagagcgctggaaagagagggagagtcgcggtgcacatggctgtgcatgtgtgggtgcttcccctttccactttccactttttcgttgtgcactggtgtgagtgagcactgttccactgcgcatgcttggcatccacagaaatttcccaaacaattacccctcccagactggtgtggattgcatgtgtctcgctcgcacaccggtttatgaatgaacgcacgtttgtgggtcaacaaccgttgctctgtgccactttcttaaggtcgaatgacattgagaagggggcggagtgagcgctggtgacctccacttgttgcgcgctcagctgtttgtgttcgaggccgtgattctgcgcatgtccatggccttaactttgaccgaaaggaaatatgcattagttatcgccatcttctttccttgcacttagttgctaagtcaggttcacgacctcgtggggtcacgtccactgcctaagtgaaagtttgttgctttgcattaaatggaaagtatttgatgactttcgtcgacccccaagcacattcagtcagtttattgtttgcgtttagcttaattaatgggtgacttaattcacagagcccgttggcgccaaggccccaaccttttcccttgagtacaagctcatcgaggtgcaaaagtcaaagggcacggcttttgccctgctgtgccaggcccaagcctttccagtgcccatcattaggtaagccccacattcaggcagttagtaagttactagtggtatgatttttggaacacaacttaatcagaatgccaacttattaaaatttcccagaacctattggttccaaggctccgtcggttccaacaggcgtgatggtctttcaacaacaggttccactgctctccacttttgccatgctttgccaggctcaggcatttccggtgccagtttttaggtatatacaattttttggttgaagaaagtaagtcaggcccgaaatttcagcactcagagcagttagatgtgaattgtggtctttagagttaaaattgtacgtgtaactttgcagaacccattggttccaaggctccagctgtgcccacaggagtacttgccttccagcagaatgtcccgattcattcgatctttgcaatgctttgccaggcccaagcatttccggtgcccatttataggtattatatagaatatttatgatacgggaatgttagatttgatattcaaatatactccacttctttatgttaaaatgggtcgagctgttgataaacccaattttcagtcagttttcatttaagtgcattttcctgccttaataaatgtatttcaactctttagagcctgtgggatttaaggcgcccagtttccccagtgtagcttcaacattcaccatacagtcgcccaaaaaaagcgaattggccctaacttgcgaagcccaatcctatcctgtaccaatatttaagtaattcaattcaatccaacgctgttcaactggttctgttagggttcaaatagaaattaatgccaaagacatattacatttatctattatagagcccgttggggcgaaagctccgaccttttcgagtgactccaagggcagtatcttcgagcggtcgattaaggccagctttgctcttttgtgccaggctcaggcgttccccgttcccatcattaggcaagtttcagcaaacaggcttctaggttaatcctctttaaaaacattgcagagcccattggtgccagagcaccttccttctcctccgattacaactccttctcctatgcccgcgttgttgatcagagttttgcgatgctttgccaggcgcaggcttttccactgcccataatgaggttagccttgatcccgtcgtaatcaggcagttttcatagagattagtcacttttaaattggttaatattatttgcagagcccatcggggcaagagctcccaccttttccaccgattccaactcgttttcctatacacggtctgtgggtcagagctttgctctactttgtcaggctcaggcatatccagttcccattatgaggttagatattataactatttagcatcaggcagttttcccatatacaaatcccttgaactaaagttccaagtcattgttttcagaacccattggcgccagggctcccacattttcaacggactcaattgtattttcctatattcgcccagtgggtcagagtttcgctttactttgtcaggctcaggcctatccagttcccgctatgaggtactacatgacctaaacccaaacctattcaagcagttaattaagcgaccctcaaaacaatcttaagtttccaaatttattcgaactttcagagcccgtgggctccaaggctccaacctttgctacggcttcaaagatttccagtctactcggctcgagttcgagtgatattgtgctactttgccaggctcaggcttttccagttccctatacacggtaattgcagttcaggcagcttagaaggcttttctttcttgtttactagaacccgttagtgctaagggaccaacttttgcttccgatatgaaaagctatacatttgtgcgccactttggtcagagtttcgcgttactctgccaggcgcaggcgtatccagtgccattgataaggtagccaataagtagacttaagactacaacatcaataagtcccataagaagcatattgttattacttttgtagagccagttggcgccaaagcacccacgttttctggcgagtccaagagtttcacatttgtcaaagagatatccactagtttcgcccttttgtgccaggcgcaggcttttccagtacccattatcaggttagtccaacattcgggcatatccaattagacagaggggccatctttacgtaagtgctgatcattttcagatgggtagtgtatctcccaaaatatcaggtggccggctgcaggaaattaccaagtcagcggcaactgacttggccatattgtgcttgggacaatcgtttcccacacccgcatttaggtaatgaaagctatttatcagagccaacattcaggcagcaaatagcatttcaaatagggatcttacagaattttgctttgatttcagaacccattggtagtgtagctcccacaatatcgggcgatcgtctgcaggaacaaaccaggaagctgggccacagtttctctattctttgccagggacaagcgtatccgcatccagtgtttaggtacagatcgtagtatagaaagcgggttttcttctaaggagtcatattagagaaggctgagttgcctttgaaaactccactgttaaaatcactgatcccagagaagtgcctttgaagtttaattggacagggaatccatgtaccggtttatacgtagatcatagggtcccccattactaggccgaggataggttctcccaaatccccaaaagtggtgcacagaatgagcagattaaatgtaaaatatattacttacgcaggtaagtaagatccgtctcaccaagccttggaaaggtaagtagttcgtctttacatgaatgctcttcacaaaatagactgactcactctgtgcccacttgatcccgatgccaatccttaacctcggagttccctactaacaacacgttctcgttccagatggtacaagttcatcgaaggaacaacccgtaaacaagctgtggtgctaaatgaccgtgtgaagcaggtctctggtactctcattattaaggacgcagtagtcgaggactccggaaaatacctgtgcgtggtgaacaattccgtgggaggcgaaagcgttgagactgtgcttaccgtcactgcccccctatccgctaagatcgatcctcccacacagacagttgacttcggacgccccgccgtattcacttgccagtacactggaaatcccatcaagaccgttagctggatgaaggacggcaaggctatcggacacagcgaacccgtgctgcgcatcgaatccgtgaagaaggaggacaagggcatgtaccagtgcttcgtaagaaacgaccaggaatcggcggaggcgagtgctgagctgaagctcggaggccgtttcgatccccccgtcatccgacaggccttccaggaagagaccatggaacccggaccaagtgtattcctcaagtgcgtcgccggcggaaaccccacgcccgaaatttcctgggaactcgacggcaagaaaatcgccaacaacgatcgctatcaggtcggacagtatgtgacggtcaacggagatgtggtttcctatctgaacataacctcggtccacgccaacgatggcggtctctacaagtgcatagccaagagcaaagtgggcgtggccgaacactcggccaagttgaatgtatatggactgccctacatccggcaaatggagaagaaggcaattgttgctggagaaaccctgattgtcacatgtcctgtagctggataccccatcgattcgattgtctgggagcgaggtgggtggagaatttaatgaaatttgaaagagagatattatctttctagtaactatttgaatcaacagggaacattcattttcttcacttttgctcataaaaacttaattctttcgttagataaccgtgccctgcccatcaaccgcaaacagaaggtcttccccaacggaacgctgattatcgagaatgtggaacggaactcagaccaagcgacctacacttgcgttgccaagaatcaggaaggatactctgctcgaggatctctggaagtgcaagtcatgggtaagttaaaaattatactattcccagagttccccagaatctgggaatgctctggtcgatcctattttcttgggtgggtcttaacttttcagcctcatcgttggtcgtccatcgtgcttctctcaatcgaatacccaaacctctcgctcagttccaccgcaggtcgtaccctttgatttcggtgaggaaaccatcaacatgaatgacatggtctcggccacgtgcacagtgaacaagggcgacactcccctggagctgtactggacaacggctccggatcccacgacgggagtgggacgcctgatgtccaacgatggcattctaatcacaaagacgacgcagcgcatcagcatgctgagcatagagtccgtgcatgctcgccatcgggcgaactacacgtgtgtggccaggaatgcggccggggtcatctaccacacggcagagctgcgcgttaacggttcgcttaggccttcttcgattcgtagattgattagttccttggtttttgagttctgttttcttgaccctactcgcatcctcgccctcctccgcagttctgccccagatcgtgcccttcgattttggcgaggagaccgtcaacgagttggacatggtctccgcctcctgtacggtcaacaagggcgacctgcccatcgatgtggcatggacgaagaacggcggccgagtctacaccaacgatggtattgtggtgaccaagaccagtacccgcatgagtgtcctgagcattgagtccgccagggcgcgacatgccgggaactactcctgcgtggccaccaataatgcaggcgaaactcggcaatgggcagtcctggccgtcaatggttaatagcatcgaatagccacatgatcgtttttgattttcccttggttctcttctgttaacccaaccccatcccagtcttaccccaggtcgtgccctttgactttggcgaggagagcatcaacgagctggatatggtctcggcctcctgtacggtcaacaagggcgatctgcccgtggacatctactggacgaagaacggcggtcgggtctacaccaacgatggtctaattgtgaccaggaacagccagcgcctgagtgtcctgagcattgaatccgtgcgagcgcgacatgcggggaattactcctgcgtggcgaccaacaacgcgggggccataactcagtccgccatgctagcagtgaatggttattgtccagcagatacggtgtcaatttcttaagttttccttgccatcttttgctttttgccttcccatcccggctcaaccagtcctgccccaaataatgcccttcgacttcggcgaggatgtgatcaacgaactggacatggtgtccgcctattgtaccgtaaaccggggggatcttcccgtcgacatagcctggaccaagaacggcggtcgtatttacaccaacgatggtctgatagtcacccgaaatagtcaacgcatcagcgttctgagcatcgaatccgtcagggctcgacatgctgggaactactcctgtgtggccaccaacagtgcgggcgagaccagacagtccgccatcctagctgtcaatggttaatccctgttgatctcttaagatttgcttttgtttcttacattttcgttatgaccctttctttaccctcactccattcgttccctccaatgccattcagttccaccgtcgatagcgccgttctccttcggcgatgatcctgtgaacacgggcgagaatgccggagtgcagtgcatggtccagaagggcgatgtcccaattaccatcaagtggacgctgaattcccgacccatcatcaacggcgaggagggaattaccatactgaaactgtctcccaagacaagtgttttgaacatagccgccgtggaacaggatcatcgtggggtcttcaagtgcatagccgaaaataaggcagggtcaagtttcacaacatcggagctgaaagtcaacggtacatggacccagggacctcactctaagctcctttattattatttgcttatcataattttatttactttaattttatttacacctttcgaaatctttagtacctccccatgtcctgcccttcagtttcggcagcgaagtctttaatatgggcgatgttttgagcatcacttgtgttgtcctcaagggggacctgcccttgagaatccactggaccttgaatggtgagcctgtggcaacaggtgtgaatggattcacagtaatgcagttgaatcaacgtaccacctacctgagtgtggatgcactggaggccaagcatcgcggctcctatagctgcgtggctcagaatcaggcgggtgaagcgatttactccgctgacctgcaagtcaatggttggtgaaactcccttttggatctctctttatatccgcctgtaaagttgcttcctactaacacgatcctggtttatttggtggctaagagctttgtatatgtctcgagctttaaatggatttcccttcatagttgcaccacagattagccccttttccttcggtgatgagcccctaaatcgcggagaagtggctagtgtcaactgcgtggttcccaaaggtgacttgccactagatatctattggacactaaactcggctctcattgtaaacggtgaaatgggattcacgttagtgcggctgaataagcgaaccagttcgctgaatgttgactccttggaagctgtccatcggggtagctacaaatgtatagctaacaattcagcgggatatgctgaatacgtttccacactagatgtcaacggtttgtttgaccttatcactatttgtagtgctttaagttttgtatttgatttcatattttacttactttacttttgattctctccacctcatctccacttctaaagttcctccccaaatccaagcgtttgactttggttctgaagcggccaatactggtgaaatggcgggtggcttttgcatggttcccaagggcgatctgccaatggagatccgctggaccctgaattcagcacccatcatcaccggtgaacatggattttccctgtcgcgccttaatccacgtaccagctccttgagcatcgactctctcgaggccagacatcgcggactgtaccgatgtattgcctccaacaaggcgggcagcgctgaatacagcgctgaattgcacgtgaatggtcattatgcaaatcatactcatagttaaacgtttttctattttaaattatttatttgagttttaatttaccacttatttcctgtccatttaagtgccgccccaggttttgccctttagtttcggtgaatccgccgccgatgtcggcgatattgccagtgccaactgtgtggtgcccaagggagatctgcccctggagattcgctggtccctcaactctgctccaatcgtaaacggcgaaaatgggtttaccctggtgcgtctgaataagcgcacgagtctgttaaacattgattctctaaatgcttttcatcgcggtgtctacaagtgcatagccacaaatccggctgggaccagtgaatatgtagctgaattacaagttaatggtttgtccccacaagaaatattgaataaggagaaataagagcacgcttactgtctatgttgttttcacttagtattgcttgaggtgtttggtgttggagcagtcgcattcatatgatatttgtgctgaatgtcatataaatcagaaaaattaggtgtaatatgattattaagacaagctacaatactttaagaaaaaatattctgaggagctgttttgtcattttggtagataaaatacgaccgcgttctctttgcccattcgcatgcagtgccccctcaggttatgccctttgtttttggtgaggaaccctccaactacggagacagtaccgcggtccaatgtatggtcttcaagggcgacacacctctacagctccactggactctcaatggacagccgataacgaacgagcacgtcggtatacgaatcatcaaaatgtcccccaaactgagttccttgagcatcgacgccatcaatggccaacatcggggactgttcaagtgtatagccaccaatgcggcggggacttctgagcagagtgctgaactgatggtcaatggttaatatctgaacaaggatatgggacttaagttatatctttatttcttctaccccctcctctcccctactcctatcctgccatttatggtccagtgcctccacaaattcgaccctttgacttcggcgacgaggcttccaactcaggcgaaaccatgggcattcagtgcacggtgatcaagggggatctgcccatcaatattacgtgggttctcaacaatcacaccctgaacagtggtgacctagacgtggtgatcggtcgaatgtccagcaagtcgagcaccctgaatatcgactacatagccgccgagcaccgtggggtctacacctgtctggctcgcaatcaggcgggcgagagcagctacagtgctgagttgaaagtcaacggttactacccatagatttcctatatatatatattttggtttacttttcgaatgattttaaacgataccccacatccatcccagtcctgcccagcatccatccgtttagctttgatgcggaggccaacgagggcgacagcgttcagttgacctgccacgtggccaagggcgatctgccgctcagaatccgctggacccacaatggtctgcccctcttcacgcacctgggcgtgatggccagcaagatcggggaacgtattagcctgctcacggtggaatcggtcaaggctgccaattccggaaactatagctgtgtggcgagcaacaatgcggggaacgtgagctcaagcgccgagctgctcgtcaatggttacccattaatattcgttaacattaatgttctgttgattgcgatcattttatacccatcaccgtcccaatcacttcccagttctgccccaaattgtgcccttcgcctacgaggatctgatcaatatgggcgactcgatagatttgttttgccaaatccaaaaaggcgaccgtcccatcaaggtgcactggagtttcgagcggagcgctggagactacggctttgatcaggtgcagccccagatgcgcacgaatcgcattagcgagaagacgagcatgatctccattcccagtgccagtcctgcccacaccggccggatacctgtatagccagtaataaggctggaactacaacatatagcgttgacctgacagtgaacggtactgaaattgagtgtgtcatgatttagttttagtggttgcggttactaaaggtcttgctagttgttgctactaatcaaacccatgcccatttctctaactttctatctaactaagcctgcgtggataactgtgaacttttttgcatattgcccttacttattcgaactgcattttctatcccccaaaagtggctcccaagatagcgtcctttgatttcggggaagagcctctgaactacggagaacctgcgtcagtacagtgcaccattttgggtggagacctgcccatgaatgtcacctggttgctgaataacgccaccattgatagttttcatgacatttccttctcgcggatcgggaagcggatcaatgtgctctccattgagtccgtgtccgctcatcacgccggattctattcgtgtcacgcgcagaacaaggccggaatcacggcgcactcggcgcggctgatcgtgaatggttagacaaacgaagagatcgcctttagacctaagaatattacacatcatttatgattttgtgtttacttacgttgatttgagtacccttacccctaccttatctcagcactgccaaagataagtccctttaactttggcgaggagtccatgagctacggcgagtttgtgaatgtacaatgcaccatttcgggtggtgatctgcccgttaacattacctggaccttgaacaacaagcccttcgaggattaccttgaaatcttgacgactaagcgcggcaaacgcatcaatgagttgactattgaagcggtgtcggccaaacatgctgggaactattcctgcattgccgaaaataaggctggagtcgctaaccacacggccgagttgaaagttaatggttaatactcttgaaatatttaaattgtccttttattttttttcattttcgttttatctccttaacccccaaaaaacacccttgataagtggctccgaaaattgccccattcgatttcggagatgagccctcgaactttggtgaatcggctagtgttcagtgcctggtcacctcgggtgacttcccggttagctttgcgtggctcttcaatggacgtgagatcaatgagaacgtatacgatgtatccatggttaagttgggaaagaagatcagcgcgttgtccattgatattgtccgggatcatcacgctggcaactacacttgtgtggcagtcaaccgggccacctccgttaactttaccgccgaactggtggtgaatggtactttcaacagcttgacaatcagttttaatgtacaccatgattttgatttgatttatttattccacactcccactcttccacattccccgaagtgccaccaaaaatcgcccactttgatttcggcgatcatgccgtcaacttcgaggagtccgtctctgtgaattgcttgatctacctgggagatctgcccatggatatcacttggttattcaacggggctcacataaacgcgtatactggagtgtccatagtcaagggtggcaaaaaggcgagcattctgaccatagattcggtgcacgcaggacacgcgggaaactacacctgcaaggctcgcaatgatgcggattcagcggaatactcggctgaattgattgtgaatggtattgtggggggaatatggtattgtggtattgtggaatatcacagagagctacgtacgttactcgttcgaatataatttgaatccctccacatcctttaattcccattaagcaccaccgaaaattgcgcccttcgacttcggtcagtcggcgtcaagctttgaggactcggtttccgtgaactgcctggtcacctccggtgatctgcccatcgacatcgagtggttatttggcggggagccaattaactttgcaacaggcattgcaattcttagagggggcaaacggactagtcttctgaccatagattcagtgcacgcgggtcacgcgggaaattacacctgcaaggcgaagaaccaagcatcgagcagcgagtactcagcggccctgattgtgaacggttggcagggaaacccttgtccataagttatataattgtttggttttttttttttgaatatcggacttttattttacctattccctcattcctcttaacaagctccacccaagatcactcccttcagtttcggcgaagagcccgctaatgtggaggactccgtctcggtgacctgtctcatctcaactggggacttacccatcgatattgagtggtttttcaacgaatacggcattagttcctattcgggaatttcggttatgaagggaggaaagcggaatagcgtactgagcatcgacagcgtacaggcccgtcatgcgggcaattatagttgtcgggccaagaatcatgccgctgctgttaactacaccaccgatttaattgtgaacggtattagatcatttaaaattagtgtttcgataaatatttcccttaatttttcatattaaattgactttaatttacctacccaagttcccccaaagattactccctttgactttggagacgagccaacaaactttgaggattccgtatcagtcacttgtcttatatccagcggtgacttacccatcgacattgagtggtttttcaacgaatacggcattagctcctattcgggaatttctgttgtaaagggaggcaaacgtaatagtgtattgagtatcgatagtgtccaagcccgtcatgccggaaactatagttgtcgggcgaagaatcatgccgctgccgtaaactacaccaccagcttgattgtgaacggtatatcggttaagggttttatcaactaatgttaagtctttcgttttatttagtaagattttcgttcaattttacgtctttacaacccaaagttcccccgaaaatcacaccctttgactttggagacgagcccaccaatgttgaggattctgtgtcggtcacttgcctcatatccagcggagatttgcccattgatattgaatggttcttcaacgactacggcataagttcctactctggcgtcaccgttgtcaagggagggaagcgaagtagtgtcttgggaatagataatgtccaagcacgtcatgctggaaagtatagttgtcgggcgaagaatcgtgcagctgcagttaactacaccttcgatctcgtagtgaacggtacccgcaaatgtttagaggaaaacttcaaattaggattattgtttttaagttcctttaattattattacactccaatccctttagttcccccgaaaatcacacctttcacctttggcgaggatcccaccaatgtggaggactcagtctctgtgacttgtttgatatccagtggagacttacccatcgatatcgagtggctatttaatgacttcggaatcagctcgtattcaggaatgactgtcctcagaggtggaaagagaaccagcatgctgaccatagataatgtccatgctcgtcatgccggaaagtatagttgtcgcgcaaagaaccacgcagcagccgtcaactacactactgagttgattgtgaatggtacacttagttgaagtatacataattagttgggcttttggattagcttattgttttgtgtattcttgcgtatttatcaacattttgattaacccatagttcctcctaaaatcactcccttcaccttcggcgatgaacctaccaatgtggaggattcagtttcggtgacctgcttgatctccagcggagacctacccatcgacatagagtggctatttaatgactacgggattagctccttctccgggatgaccgtttatagaggaggaaagagaacgagcatgctgaccatagacaatgtccatgctcgtcacgcgggcaaatatagttgtcgagcgagaaatcatgcgtctgcggttaatttcacaaccgagttgattgtgaatggtacacttgtgttactagatttaatggagtttagagtttattttccttaaagtttactttctgttctcccccccccccatattgcactcaattcacacaaaagccccaccgaaacttgctccttttgactttggtgactcccctgctaacttcgaggattccgtttcggttagctgcctcgtctcttctggtgatttgcccattgacatcgagtggctgttcaacggggaatccataagctacgcctcgggaatcgctgttttgcgaggtggcaaaaggactagtgtactcacgatagattccgttcatgcgggacatgcggggaactacagctgcaaggccaagaacaaagcggccagcagtgaatactcggcggcccttattgtcaatggtcattagattatgcttataaaaatccgtcgctgtttaccactttcatttaagattatcgtttatttcctcccacttaaactgaataaagttccacccaaaattacgcccttcgacttcggtgacgctccgacgaatgtggaggactctgtttcggtcatgtgcctgatttccaatggggacttacccatcgacatcgagtggttctttaacgactacggaattagttcgtactccggaataaatgtagttaaaggtggcaagaggaacagcatgctaagtattgatagtgtccaggctcgtcatgccgggaagtatagttgtcgggctaagaaccacgctgctgctgtaaattataccaccgaactaatagttaatggtacacctacaattttcttaaattcatttttagtgtaaggtacatctttaattttatgtaatttttattaaaaccaccttcactccaaagttcctccgaaaatcacgccatttgacttcggtgccgaacccaccaatgttgaggattccgtttcggtgacttgtctaatctcctccggcgatttgcccattgatatcgagtggttcttcaacgactacggaattagctcctactccggtataaatgtagttaagggtggcaagaggaacagtatgctgagcatcgataatgtgcaggctaggcatgcgggaaagtatagttgccgggcaaagaactacgcagcagccgtcaactacagcactgaactcatagttaatggtactgatggatacgttcccacctatgtacctacaatatttattattatcgtttttatttcatagttttgttttgagaacccaagattattgtagccttcccaatctatgtcactagttgcccccaaaattgcacactttgactttggcgaagtggcggcaaacttcgaggattcggtttccgtgaactgcctggtcagttccggtgatctgccgctcgacatcgagtggatgtttaacgactaccccatcaaccactactcgggcatatccacctccaagatgggaaagcgcctgagtgtgctgatgatcgatgccgtgagtgcccgccacgtgggcaactacacctgcaaggccaggaatctgtgggcatccgctgtctacacagcacagttgacagtcaatggtacttgcctgcgaagtcagagcttctgtacagcacttcagtgtcgttccgggttatttagtttctatttgtatacccactcctgtttttcccacacacagtacgcatatacagattgcatgtttgctttggcttttgtgtcttggcttttgtagcttagctgtaaggtttttaactggggatctgcgaagatatcaatccactcttatgattaagatggacataatccatagatgtacaataccctttgattgcccatctttttccaagtacctccccatatcagtccttttgagtttggggatgagccagccaatttcggggactcggtgaccgtgcaatgcactatttcgaaaggcgatctacccgtggacatcacctggttgttcaatgactatgccatcaacgagtatcacggggtcacctcttccaagatcggcaagaaggtcaatgtgctgaccattgattcggtaaacggcaacaatgccggaaactatacgtgccgggcaaggaacaaggcccaaatggtggagtacactgcggccctgattgtcaacggtgggatagagatccacatccatatgcatataccgtagagatagagatcaccttatttgtcttcattttttccttgattgttcgttgagttgactgcttttgttttgtgtatcccacaagtcttgccacaaatcacgccctttgccaccggttcgcagcccacccatctgggccagtatataacgtaccagtgcaccctgacggagggcgacttgcccctcaacatccgttggacgtttaacaaccaaccgctcttcaatgacgatgaccaggacatcctcatagcgaagatgggtcgtcgaagtagtgttctgaccatcgaaagtgtggcagatcgtcacgcgggcaactacagttgccacggggaaaacgccgccggtcgtgccacctacagcacccagctgcgtgtgataggttctcatcccagcgtcttagtattaagagaagctttcgttgatgcggttatgttttaattttatgcaccttttgttttaccatcacatcactttaccgaaacgcacatccagttcttccgcgcatcatacccttcgccttcgaggagggtcctgcccaggtgggtcagtacctgacactgcactgctccgttcccggcggagatctgcccctgaacatcgactggacgctggatggtcaggcaatctcggaggatctgggaataaccacgtcccgcgtgggtcgtcgtggaagtgtgctaaccatcgaggccgtggaggcctcacatgcgggcaacttcacctgccacgcccgcaatttggcgggccatcagcagttcaccacgccgctgaacgtctacggttaggaattctccgggattgggtcgctcgagtagtttctttgtggccgattactaacctagcgtcgctgcatgaccgtctgtctctgctgctgtcctgacttatttttccgtctttctgaccgacttagacccatcactcctctttggaatggcctgacgcacatacacactgaaagcttgcatgtatgatacccagactgcactgaactgttctgaccagaataggctacgtttcagagatacaaaaactaaaaacaaaaactaattttctctagttattgctatcgtataaggtataaagcagataatacctcgagttccaaactgattagaaatcttaaaagtttccctctcgaaaggaagttgtaaagacgaacttgagatgttaataagtgtccattataatggaaatgagataggggcccttcgtcaaccgaattatattttatgtttaacttttatttctcccttttttattggaaccatacaatgcagtgccccccaaactggctcccttgcccgtaaattcgccactgtacgtgggcgactactaccagttgacgtgcgcggtggtgcacggcgacgcacccttcaacattacctggtactacaacaacgagcccgccggagacttggccggggtcaccatcctgatgcacggccggcgcagcagctcgctgaacatcgagagcgtggggggtgaccacgcgggcaactacacctgcaagggcgccaaccgggcgggcgaaaccacggctgagacccacctgagtgtcaagggtttgtgcgaattactcctaaggaatcgctagctgggggtggcgtcttagtcgtagattggaatcctagaataggatcaaggcatctgtaaatccccactctctgtctgtgcctccttgtctggtgttggtactgcataagcacacgaacctgtattatctgtattatacaactcgagttgggggttttcgtagtacacccatccgaaatttcctcgctgtacagtgtgttcattccatgcacggctttcttatcatccgctcccagagctgccccaggttgatcagttccacttcaatgccaacggggtgaatggcggccaggcagtgcgggtcatgtgcatggtctcctccggcgacctgcccatcgacatctactggctgaaggacggacagcccctgctgcgctccatctaccacaagatcgacgaatacaccctgatcctgtcgctgcgtcagaccaccattggtgactccggcaactacacgtgcgtggccagcaacgcggcgggcgtggccagtcgctggtccatcctgaaagtgaagggtactttgtcgtgtatatacgtttaaattgtgcctttttctgtttgtacaaagttattctccttagattccatccaatcatcgaaatttatgtcaattaaaagcggggtagttctgaagttagtatggtaatcatatagctaacatatacacagaaaacaatgtttgataggcagaggattcgattttttaaaacacttcccttacaggaatgtcttcttaatgattaaatcatatcaaattcgtatcactaataaattaagcatcttcagtttgaaaaaagggttttccatcgacgcagactgaaccgactgcactcactcaactttccatgaatgacttactttatgacctgaaattttaataatggcaccccttcctgttccctcaaaaaaaaaatatcccaagaaccacctatgctctcgccactgctgctttccgcttccgtttgcgatgtcggcgactacgtgcaactcacctgcattgccagccgggggtccacgcccattatgttcgaatggtggctagatgggcgtcaggtgcacgatgatggcaacgatgacgtcactcaggccacagttggcgaacacaccagcctactgctgatcaacagggcgggggaggggcatgcggggaactacagttgtcgggcgatcaaccaggtgggcgtggcagaacgccggaccaggctaactgtgaatggtaaatgggcggttatcagattatcagatatgccaattccaaattacttttgactcctcttgctgcagctaatccagtttttctcgacttctctgaatctatccatattccacatccgtaggccaaagaccaagttgaaccaagtcgaacgaggtctatactatactatagtttgtgtaaatatatgtgaagttaaaactctgcattcgaccgcatcagaaaaccaatcaacgttgggcaaagttagccaagatctaacctaggtcccactgcgtatcagcttactcgattgttatccctaaatgtcaaaacagctcagatctgaccctgcacacacatacatgcacagcaaaatccacacacagcactacacatagcacttattctgagaagaactcagaaatacgacctacagccttcgatttcgagtgacttttagagggttatggtttctatgtaaaatacaagttcacagggctcatgctccaacaccgaataaaccaataacagcaagatctattatctaatatcctaatcgcttctaattgtctacttaaccgaaactaaacataaacttaatcgtaactatggaacccagtcctccaccaaacgagactgactctttgcgcttccacaaacgtaaacaattcgccctgatctgtccctgatctcaaaaagaaaccgacatccccatccaatccctcattaagtattccttgtttattaatcattatttacctaggcgttaaggcacaaagcgaagtcctttggcaaggaaacacaatatgacaaagataatctttaacgaggacttcgttttgcactgattgcatgatatttaacctttactttggtataacataagttttattaatgccccacttttatttgtcctattatcaccttggttatttgtgctaatgtttctgttgtagtttggccttttaagttaatctcgattgtaagcgatcgtgtggaaatattctattgtgtatcataagacgatgttcaatcaacacttaaacttttgcattgaatgagatagcaataaaatatttccacacataaagaaaactgaaatgataataaattatttttccaaaactttttataacatagttatcaaattaaatgagaattgttgagtgcttcaaatgatcatttcactttgcttgaaactaagtccgtctatccgcttccgtcgatactcttgaccatgttgcatgcaacaccttatgctagaaaccacaagagctcaactaacgtattttctttccacaatcgcgtcatcaaacccgaccaacagtacctcccagatggatcctcgagcccaccgataaggccttcgcccagggatccgatgccaaggttgaatgcaaggctgatggcttccccaaaccccaagttacatggaagaaagcagttggtacgtacaaatcagtagcatcccttggaaaaaccccacttaaaatgatatcctgcaggcgacacccccggagagtacaaggatctaaagaagagcgacaacatccgcgtggaagagggcactctgcatgtcgacaacatccaaaagaccaacgagggctactatctgtgcgaggctatcaatggaataggctccggcctctcggctgtgattatgatcagcgttcaggcccctccagagttcacggagaagctgcgcaaccagaccgcccgacgaggagaacccgccgtactccagtgcgaggcgaagggcgagaagcccattggcatcttgtggaacatgaacaacatgcgactggacccaaagaacgacaatcggtacaccattcgtgaggagatcctttccaccggagttatgtccagtctgtcgatcaagcgcaccgagagatccgactccgccctattcacctgtgtcgccactaatgcctttggatccgatgacgccagcataaatatgattgtccaggaagttccggagatgccatatgctttgaaggtactcgacaaatccggacgttccgtgcagctgagctgggcgcaaccctacgatggcaactcccctctggacaggtacatcattgagtttaagcgttctcgtgcctcctggagcgaaattgatcgcgtcatcgtgcccggacacaccacagaagcccaagtgcagaagctcagccccgccaccacctacaacattcgcatcgtggccgaaaacgccatcggcacatcccaatcctctgaagcggtcactatcatcacagccgaagaagcaccctccggcaagccccagaacatcaaggtagaacccgtgaaccagaccaccatgcgcgtcacctggaagccaccaccacgcaccgagtggaacggagagatcctgggctactacgtcggctacaagctatccaacactaactcgtcctacgttttcgagaccatcaacttcatcaccgaggagggcaaggagcacaacctggaactgcagaacctgcgcgtgtacacccagtactccgtggtgatccaggccttcaacaagatcggagctggtccactgagcgaagaggagaaacaattcacggccgagggaacgcccagccagccacccagtgacaccgcctgcaccaccttaacttcgcagaccattcgcgtcggatgggtgagcccacccctggaatccgccaacggagtgatcaagacctataaggttgtctatgcccccagtgacgagtggtatggtaagtagattgaagtcaaatatggaaacttccacaactgaaaggtcttagaagaatggcaataaagataaaagttatgaacattattcaattttctactttctcattgtgaagtagccccccagaatgtaacacattctctgtttaccaaaccatttcagacgagaccaagcgacactataagaagacggcctcctccgacacagtcctccatggcttaaagaagtacaccaactacacaatgcaggtcctggccacaacagccggaggcgatggcgtccgcagcgttcccatccactgccaaaccgaacccgatggtgattcaaaactatgataatataaatatagcaatttctaacttctttgctttgacagttcccgaagcacccactgatgtaaaggctcttgttatgggtaacgccgctatcctggtatcctggcgcccaccagcacagccaaacggcattatcacccagtacaccgtgtactccaaggccgaaggcgctgagactgagacaaagacccagaaggttccccactaccagatgagtttcgaggccaccgaactggagaagaacaagccctacgagttctgggtgacagctagcaccaccattggcgaaggccagcagtctaagagcatagtggccatgcccagcgaccaggtgcccgccaagatcgcctccttcgacgacaccttcactgccaccttcaaggaggacgccaagatgccctgcctggccgttggagccccccaacccgagatcacatggaagatcaagggcgtcgaattcagtgccaacgatcgcatgcgcgtcctccccgacggatcgctgctgatcaagtcggtaaatcgccaggatgccggagactactcctgccacgccgagaactcgattgctaaggactccatcacgcacaaactgattgttctggcaccaccacaatcgccccacgtcaccctctcggcaaccaccactgatgccctgactgtaaagttgaagccccatgagggagacactgctcctctgcatggatacaccctgcactacaagccaggtgggtggatctgactagatattacagtgcacttctaatatttaaagtataatcgtcactcttagaattcggagaatgggaaacatcggaagtgtctgtcgactcacagaagcacaacatcgaaggtctcttgtgcggctcccgctatcaggtctatgccacaggattcaataagtgagtgttttaatatccagtgagatataaaactaattctaaaacttatatagcattggagctggcgaagcttctgacattttgaacacccggaccaagggacagaagcccaagctgcccgagaaacctcgcttcattgaagtgtcgtccaactcggtgtccctgcacttcaaggcctggaaagatggaggatgccccatgtcgcactttgtggtggagagcaagaagcggtagatcacactttaaccaggcatatgaattcgatctaagattgtttacctctgcagcgatcaaattgagtggaaccaaatttcgaacaacgtgaagcccgataacaactacgtggttttggacctggaacccgccacctggtacaacctccgcatcactgcccacaactcggctggcttcactgtggccgaatacgactttgccaccttaaccgttaccggaggtatttatgatctgttctccgattcccagttgattcctgcattgcttttgtacatagagtactctacgttgacagcttcggggtctgatgctgaaaaaaccgctccgagggcttccaagaagcccattaactgggcctggatgtccggagagttggtttggcgatcgggatcccgaaacactgtccatatacaaataacaagatgagaagcaccaagctatacaatgttgtacaaagcaattattgagtttattttgtctttaccaatcacgaaaagttatgatatatttttaaaaaatatgagcaaattatgattttcttgcttttcaatgtgaacaaattgcacagtatataaaattatattattcctattttttgttgttcaaaccaagcttgtcgatatagtcgttttagttcgtttatgtctcatagttttgaaaatagtcacttccttatgtttttaactgccagaactctgaacgcagaagcacctgaagtgtaaaatcattagtgtaaaataataatgatttttcttacgtaaatgcaatttgtttccttccgtttttatcaacaatcccagtgaagagccattgcaacgtatatgcatatgtacataactgaatagttaactaactcaccaaacagccacgattttcattttattataatttttactagacccaagcattgtagtgctctagatcacagtatgaatatgaatgtgggaatatccttgtcaataacatcataaattgtatgccttctttttgttcagtttttcagctcacgtaaggttaaaaaaaaaaaaacaaaagtagagctttcttaaattttaataccgagttacaactacattattagaactaaatacggctgatactcgtagattaaagaagtatattaagtattagactcgttgccgaccctttaaaatatatatattcttagcttgcctgtccgtttgtccgtatgttctgtccgcttgtctggttgtcgaggattctaaaacggaacaacacggaatcttttgaaaatcatgtacttttttttcaaaagaaaatggtatacacgaaaagaaaatatttctatatcttaaaacctttttttattagctgcgcaacggtatataatagtcgggcattcgactctatcgttttattttcttgttaaatacttggtgttattgacatggaacgtcctcttatgatttcgaatagttatttatgaatttttttttttttttgcatttctgtgcccagtctgtgaaagagaatttgtaaaatatacacgcggtgtggaatatgaaaaccgattgagcccaaatagctgtcgtcattaagcatattaaatagttgttgttacacccgccgaaccaatcccgaatatattgattgtacagatctccaattgatataacttcccgccaattagatgttttcatggatcatacccatattccagaacctattcaactgccagatctagatattcccacccacaactggtcacagaaactatttacccaccaaaaacgatacttttatgattttagctaacttgatttgctttttatttgattaaaaatatcaaagtgctcatttaacagaggcttggaaaagacaaagcaagtgtgaaactcaatccgaagaatcgagcagagccaccataacatgacaatcaagcacaacaaccaaagtatctcaatcctgttccatgggagtcctggctctgaccagggagtctgagctgagagagttgatttcttaaacttttacttatggttcgacttatcacttatcactacagtcacacgcagacattttcagacatttttggtttttgccatttcgattcgattcgtttcagttatagttatgtcaagttacagttgagttccacctaagttagttggtttatttgaaggatacgtttctccttctggaatgcagttccattcgtttcgtgcagtcttagcgatctaataacatacatcattaactaactagctctaagcggatcacaaacaaattgcattgcgtttagtgtttaaaaaagtaaaaaaatactgttttttatacaatttcgatatacaattttgcaatagtttaactagttctcatatcaacttaaccacattttgatgcgtgcttcagttctgcgccatgtaaaataaccgaaaaccaatactctttaatactcttacttttctctcatacgaataacgaaaacgactacatatcgacaagttaacctttgaatttttcgcctgccacagtctgtatttgtatatgtatgtgttgagtgctttcgcgatgtgcgcggggtacaaaggtcaatgtgccagcagaggtcacaacgtgtaactgatcctcccctctctctctctctctctctgtctctctcacactatgtgtctctgtctctatccgccccacccactgtctgctcccacccactgaccacccaaaaccaccctttggttgttgttgttattgttgttgcaggcactatcgcaccctcgcgagatttacccgagttaagcgccgaggacacgatccgcattatcctctcgaacctaaacttagttgtgcccgtcgtggcggctctgctcgtcataatcatagcgataattgttatttgtatactgcgtagcaagggcaatcaccacaaaggtatctatgctgaccactaattaagaatttcgttcttttttcggtttctctctacttctctctgaacaccacgaaactgcaacaccccacacttgcgcttgtgccacgaaaatccaaataaccaaaatacgaaaataccatattgcctgtactgcctgcccatatcccatattgctgttgtctatgacccaaccaacaccaactattgcatgtgcgcgaatccggtttgtataccccctaaaaccccgaaaggcaccattgcgcccctggacgacggatccggccacggcaacgtgcacacccgcatccgcctgcccgcctggatgcccgagtggctcgatctcaacttcatggtgcccctaattgccaccgtggtcgtggtggcggtgggcatctgcgtggtgtgcgtggccctatctcggaggcgagcggacgacatgcgcggcggccaaaaggatgtgtactgtaggttctcccccaaggactccgtcccacaagcgcaacctcttctcttgaactctaaccaaatgtttagcttaccgtagaccgtagatcgatatcttatttctgttttgcatcatgttggctaaatgttggtatcctttctattcaccaattattatcctttcatttacaaagataatattttgcatccaattaactaattttacgttaagtattaaaaaaaaaaaaacagtttagccaacatgtcgataaatttagccgtcactccaaaagtcaaaatggtcggtttgtaatcctttgatataatatcataatgtattaatggaatgtcaatgtgtagtttggctttgcatgatttacttatatttccaaaaaaaaactcaatgatacaagatatacccacaaaaatataccaaaagttatcactccaaaaatataccaacatacagacaaagaatatatactgaaaatataccaaacaatcaaataatataatacgagcatatatcaatataatatacttagtgtcaataactgtgtgtacatacgaaaaccatcatcgatacttcatcgtcattaaaatcaattggtttttcaattgccaaacatgactttaaagttgtactgaagcacccaataacttctgaagaatagatcagtttgcagaccgagttgtaaacttatttatcaacagttgttattggccctgtggaggactgtacttaaatgcaatactagaataatcccagtaagcgatatatctacatatactagccctattgttgtacatacgttttgcttatgaactgagcaacttcacaatcaaatattactctatatatatatatatatatatttccaaatccatatcctccacaaaacaagacaactcaaatctatcatttttgagttccgaattctttccgtatttttcccttatgaacaaccaaaactaagatgctttttgaaatcaccatcgagatccttgatcgatgacaaagaaaagtcgagtaaatccaaaattaagttcatcgctcatttcatgtcattattaacagtcgtaaccgtaatcgttgaccagttggtatattttgaaatcgaaaacaaataacctgaacacttcacgtaacctcttttggaatcttttttcgcaatcgtaaaatgtaaacttgtatttttgagctaccaaatagcacatttagtgtgttgacatgccgcaccaaaaccaaaaaaaaaaaaaacatctgaatccaaaattaattgtaaaaccagtaacgagtgacggaacaagtcgagatcgagtcgaaaacagaagtaaagtatgcgagttgattgaatgcgagcggcatatgatgaaggaaaagcatcttcagtgtttcaatattgagttggcgatatcatatattaattctagacgatgtagtttacaatcagacaatgggacccggcgccaccctggacaagcgtcgtccggacctgcgggatgagctcggatacatcgccccgcccaaccggaagctgccccccgttcccggatccaactataatacctgtgaccggattaagcgaggtacagtcataagtaagcatctaaatttccaatgcaacatttattaatgccgccacgccgtgtcggatacccggatccacggatctaggattcctggtcatggatggggcttagttctttcttccatttactttgcgaacgaaaatcatatacgaaaagtattttgcgttgccttgcattcaaacaaactgagggtatctctagatctctacccacataccacactcaagctaagcttttccggacccgaaaaattcttagtgttgctttttaagccgcttcctgttcagttcctccaaagaccacccccaatcctggcatgaaagaatcgtgttattaaatgttgttgttaatttagatacattttttttttttgcattgggatgttcccagccttgatttaatccgagtatacttatcgttttatcctctcgctccccatgcaccaactccaaatcccgcacctcttcggttgcttcaattcgattatgatttccgttgacttatcattgatgttgtacgaaattggaaattgaaaaacaccacactcgaaacgaacccatccactacacctcaccccgaaccacacaaaaccactctacgacatgtccaggccgcggtggcctccggtccaaccactcgacctgggaccctcgacgcaatcccaacctgtacgaggagctgaaggccccgccagtgccgatgcacggcaaccattacggccacgcccacggcaatgccgagtgccactacaggcatccaggtaggcggagtggagaggagcagctgctcccttctacggatttaagtttcttagtcccccatcaataaccccactaacccaccccacctttttaatggagctgatcgatgcacgggcttaatatgtctggattagctagtctataatctatgttaagccatactgcctctactctttgagttatcaaatttctcctctgacagttgttatggactaacattatccagcaaattgattcaacctgtaaaatcgatctctccttaaatgtacctatttttaagtttgttcgctctaccaaaaagtctaacaactggtcgcatccaggtaactaaagctaacaaactagtaagtaattatttggtaagggaaaacgaacgggtaccaggtatcatcgcagcatacttaacacactaaaacaagtccacttgaacaacacataatttctcatagcaggcacactcactaatcgtttccttttcccgcaaggcatggaagatgaaatctgcccctatgccacgttccacctgctcggattccgcgaggaaatggaccctaccaaggccatgaacttccagaccttcccccaccagaacggacacgccggcccagttcccggacacgcgggcactatgcttccaccaggacatccaggacacgtgcactcccgctccggatcgcaatcgatgcctcgggccaatcgataccagcgaaagaacagccagggcggacagtcctcaatctacacgccagctcccgaatacgatgatcccgccaactgtgccgaagaggaccaatatgtaagtaataatcaatcgcagatttcgagtcgaatgtctaatgcattatattgttggtcctgcagcgtcgatacacccgcgtcaactcgcaaggcggtagcctgtactccggacccggacccgaatacgacgatcccgccaactgcgcacccgaagaggatcagtacggctcccagtacggaggaccctatggacagccctatgatcactacggttcccggggatccatgggacgtcgtagcatcggtcagtgaagagcctttaaagatttatgacttgattaactcttaacttgaaccacaggctctgctcgcaatcctggcaatggatcacccgagcctccaccaccaccaccacgcaaccacgacatgagcaactcctcattcaacgactccaaggagagtaatgagatctcagaggcagagtgcgatcgtgaccacggaccacgcggaaactacggaggtaagttggccacatgagttctattcggatgaaaggacattttagtgttagttacaatctaacgaacgcgcgatatatatttgaaagttcggtctaatcttaacaatctcaaatcgccatctttttcaattctatccaaaatttcgtattaatataaatcagaagactccaacgagggtgagtgatcctatccgaagttgagttagtttgtgcgattttcacgatcatcattcgaaaaaccgatcacatctcatacttcgattcctcacgaaccactcgcctctcttgctcatgatcaattataactatttcatatgatatatccaacgatcattgaaagaacgtcattaccatcgaaactcctcgcatttctcagcgaattttagttactgcgttcatacgtaaatattcatgctgtgttttgctacattttattatagaacatcagtgtttttaagttattaagatttaaatttggttttggtattttttttattattaagatcaaatttattgcacacttacatatcatttcacttcatagagcacaccgtttgcatatcaatgttttatgttttacgtttgtaactaatcacaactagtcaattcgaatgaattgtcactagaattctgcatgggatgaccttttgagggtccaaatacataagtaatgataccggggatcagcacttattttgaaagtagctgcacgattggacgcctactcgatgggttttaatttagatctaagccggttttacttttatcattttatctccattccgaatttttctttctactttcttttatggaaccctattaaatttttatactaccccactctatcggttcgggcaacacaaaccaatttcttttgcaatattccgaaccccaaatgctgaactcgcagcagtgaagcgatctccacaaccgaaagatcagcgcaccaccgaagaaatgcgcaaactgatagaaaggtaagatcagaccaatgggcccgaccctacatatgtatttaccacccgacacgtaattaaccagatgttaaagcatttgcaccgaagttgatatacatatgtagttctggtgcagttcccctgtcactaatcgcaatctaacaatcttccccgtctttatttacccactttcctaactctgaatcgtatgatcgctgacactagtcgacgacagttgtaagtcttgaataaggaacctaccaatgtgactagccaccacgactatcctgcatgcccacgcaccaatcaatactaacccaaagtgcattcagtactcacatctatgtataaaccgtcttaagttcctgtttgtatattcatttatacattggttttgtctttaatctttgatcttttcgtttggttttcggttcgacagcaaatcacagttgaatgttttgaaaccttttgataaacttactccatgcgataagcagacccaccacatatctgtctatcacgaaatacttaagtgtttccataaatactcgtattaacactttattgcagctttgtgcttggcctcagcttgccaaatcaaaaagaaccagaagtaaaccatgttaagccacgaacagaacataaagacacggccaatggggtgagatgggatctggccggagatagagatagagatagagatacttggaaaatacttcaaagatcgcccgaaagatcccatctcgactcttgcaatgctttggttgcagcataaacataatccaacaagtcccgtttccaatgcttcctactaatcagattcatctctttccgtgcagaaacgaaaccggcccaaaacaactccaactccaacaagcaaatggcgcaggattcacagcctacgatactatggcagtgtaatttgtaagcgccctctgcggcggtgggcgtggcattttagcttagtgttttaggtgcatgaagtgcgtgggagttgaatgacacttagagacacaggacacagatacacacagacagatcatcaggacacaaggaaagagatagagaaagagagggagttatataccgaatatacacgtaaaatattcaactacttcgagtaattatagcgaaggaatgcaagtttcaagaaacatatttatattgtctatgcaagcagcaaaccaaacttacataaagtatataagtacattcaatggataactactataagagagtgctggagacactgaaggaaattactcaagttattcgagaggaacagaaaacgaaatctcaagatcaagatcatacttacgtattcgaactaattttcaataatgtactttagttttaagcggtgtctaccgaaatatcagagcaacagcaactgagatggattcttgtgtgtaagaggagatgattcgaaatctgtttgtgtaaacttttgccatctatgccaggagcagaaaactcatcctttgcctagcctaagtcaaagtcataatattaactcgtctaattgatatatttagtcgtaacatatgcgtaatatgtatgatttcttcctatgcattttataattcgtatggacagcgcacatttggagttttgtttgcgttttgcgttgacttgtgatgattgttaatttacagagctttgtgagtgagtacttacgattgtgctcattactcgctttgttctttatttacagacaagtgattgtcctatcttagttcgcccttatttttaattcaaaaatgcgcttccaacagaacaaatcgaaactgttcaatgcacaaatcgcagccacaacaattgaatgtattatacaagatccccaggacaccgaaaaaccaaaacccctaacccgaaacacagatacactcaagcacgatttattaaaccaattctgatatagaccgttctgaacatgagttata

SEQ ID NO: 26063 - DNA, 6592 bp, DROSOPHILA
agaaccggatttcagcgctagtcggcgaatcgcgagagcgtgcgagtatttgtgtgtgcgtgtgagcgtttgttttgggacaccgatacggatacgggtacggatagacggatatacggcagcggtacgcgattagcaatccgccaaccggttgcagcggtgctagtgcaccaccctacaaaaaagtgaataatagtatgcaaagtatctgaaagatagtcaagagcagagcaaagtatctgtgtttgtgtgtgccgtgcttttgtgcggagtcgccacccccgtggattagtggcaccctgctgcaaatagcccaccactctcacaagtgtgtgtgtgtgagtgttaacaattaatcgcatttaaaaaacaatttggccagccgcagtaacaataacgataattcggacgtgccaagggtgcttttcagtggatttttgcgtaaaatcgatagtcagatagacccgctctctactgccaacttcacacaacccgctcagcggaaacacggcatacgaaatgaatatgcccaacgaacgcctcaaatggctaatgctgttcgcagctgttgccctcattgcttgtggtagtcagaccctagctgccaatcccccagatgccgaccaaaaaggacccgtcttcctcaaggaacccaccaaccgcattgacttctccaactccacgggcgcagagatcgagtgcaaggccagcggcaatcccatgcccgagattatttggatcaggagcgacggtaccgccgtgggtgatgtgcccggattgcgtcagatctcatccgacggcaagctggtcttccctccattccgcgccgaggactaccgccaggaggtccatgcccaggtgtacgcctgcctggcccgcaaccagttcggatccattatctcccgggacgtccatgtgcgagccgtggttgcccagtactacgaggcggatgttaacaaggagcacgttataagaggcaattcggcggtcatcaagtgtctgattccatccttcgtggccgatttcgtcgaagtggtgtcctggcacaccgatgaggaggagaactactttccgggcgcggaatacgatggaaagtacctggtattgccctctggagagctgcacatccgtgaggttggacccgaggacggatacaagagctaccagtgccgaaccaaacatcgtctgaccggagaaacccgattaagtgccacaaaaggacgattggtcatcacagagccggtttccagcactgctcccaaggtgccacctctccaatctcgacctatgatagttcctggtcacaccgatctctcaatattgtgcccagctcaaggctatcctgcgccaagttttagatggtacaagttcatcgaaggaacaacccgtaaacaagctgtggtgctaaatgaccgtgtgaagcaggtctctggtactctcattattaaggacgcagtagtcgaggactccggaaaatacctgtgcgtggtgaacaattccgtgggaggcgaaagcgttgagactgtgcttaccgtcactgcccccctatccgctaagatcgatcctcccacacagacagttgacttcggacgccccgccgtattcacttgccagtacactggaaatcccatcaagaccgttagctggatgaaggacggcaaggctatcggacacagcgaacccgtgctgcgcatcgaatccgtgaagaaggaggacaagggcatgtaccagtgcttcgtaagaaacgaccaggaatcggcggaggcgagtgctgagctgaagctcggaggccgtttcgatccccccgtcatccgacaggccttccaggaagagaccatggaacccggaccaagtgtattcctcaagtgcgtcgccggcggaaaccccacgcccgaaatttcctgggaactcgacggcaagaaaatcgccaacaacgatcgctatcaggtcggacagtatgtgacggtcaacggagatgtggtttcctatctgaacataacctcggtccacgccaacgatggcggtctctacaagtgcatagccaagagcaaagtgggcgtggccgaacactcggccaagttgaatgtatatggactgccctacatccggcaaatggagaagaaggcaattgttgctggagaaaccctgattgtcacatgtcctgtagctggataccccatcgattcgattgtctgggagcgagataaccgtgccctgcccatcaaccgcaaacagaaggtcttccccaacggaacgctgattatcgagaatgtggaacggaactcagaccaagcgacctacacttgcgttgccaagaatcaggaaggatactctgctcgaggatctctggaagtgcaagtcatggtgccgccccaggttttgccctttagtttcggtgaatccgccgccgatgtcggcgatattgccagtgccaactgtgtggtgcccaagggagatctgcccctggagattcgctggtccctcaactctgctccaatcgtaaacggcgaaaatgggtttaccctggtgcgtctgaataagcgcacgagtctgttaaacattgattctctaaatgcttttcatcgcggtgtctacaagtgcatagccacaaatccggctgggaccagtgaatatgtagctgaattacaagttaatgtacctcccagatggatcctcgagcccaccgataaggccttcgcccagggatccgatgccaaggttgaatgcaaggctgatggcttccccaaaccccaagttacatggaagaaagcagttggcgacacccccggagagtacaaggatctaaagaagagcgacaacatccgcgtggaagagggcactctgcatgtcgacaacatccaaaagaccaacgagggctactatctgtgcgaggctatcaatggaataggctccggcctctcggctgtgattatgatcagcgttcaggcccctccagagttcacggagaagctgcgcaaccagaccgcccgacgaggagaacccgccgtactccagtgcgaggcgaagggcgagaagcccattggcatcttgtggaacatgaacaacatgcgactggacccaaagaacgacaatcggtacaccattcgtgaggagatcctttccaccggagttatgtccagtctgtcgatcaagcgcaccgagagatccgactccgccctattcacctgtgtcgccactaatgcctttggatccgatgacgccagcataaatatgattgtccaggaagttccggagatgccatatgctttgaaggtactcgacaaatccggacgttccgtgcagctgagctgggcgcaaccctacgatggcaactcccctctggacaggtacatcattgagtttaagcgttctcgtgcctcctggagcgaaattgatcgcgtcatcgtgcccggacacaccacagaagcccaagtgcagaagctcagccccgccaccacctacaacattcgcatcgtggccgaaaacgccatcggcacatcccaatcctctgaagcggtcactatcatcacagccgaagaagcaccctccggcaagccccagaacatcaaggtagaacccgtgaaccagaccaccatgcgcgtcacctggaagccaccaccacgcaccgagtggaacggagagatcctgggctactacgtcggctacaagctatccaacactaactcgtcctacgttttcgagaccatcaacttcatcaccgaggagggcaaggagcacaacctggaactgcagaacctgcgcgtgtacacccagtactccgtggtgatccaggccttcaacaagatcggagctggtccactgagcgaagaggagaaacaattcacggccgagggaacgcccagccagccacccagtgacaccgcctgcaccaccttaacttcgcagaccattcgcgtcggatgggtgagcccacccctggaatccgccaacggagtgatcaagacctataaggttgtctatgcccccagtgacgagtggtatgacgagaccaagcgacactataagaagacggcctcctccgacacagtcctccatggcttaaagaagtacaccaactacacaatgcaggtcctggccacaacagccggaggcgatggcgtccgcagcgttcccatccactgccaaaccgaacccgatgttcccgaagcacccactgatgtaaaggctcttgttatgggtaacgccgctatcctggtatcctggcgcccaccagcacagccaaacggcattatcacccagtacaccgtgtactccaaggccgaaggcgctgagactgagacaaagacccagaaggttccccactaccagatgagtttcgaggccaccgaactggagaagaacaagccctacgagttctgggtgacagctagcaccaccattggcgaaggccagcagtctaagagcatagtggccatgcccagcgaccaggtgcccgccaagatcgcctccttcgacgacaccttcactgccaccttcaaggaggacgccaagatgccctgcctggccgttggagccccccaacccgagatcacatggaagatcaagggcgtcgaattcagtgccaacgatcgcatgcgcgtcctccccgacggatcgctgctgatcaagtcggtaaatcgccaggatgccggagactactcctgccacgccgagaactcgattgctaaggactccatcacgcacaaactgattgttctggcaccaccacaatcgccccacgtcaccctctcggcaaccaccactgatgccctgactgtaaagttgaagccccatgagggagacactgctcctctgcatggatacaccctgcactacaagccagaattcggagaatgggaaacatcggaagtgtctgtcgactcacagaagcacaacatcgaaggtctcttgtgcggctcccgctatcaggtctatgccacaggattcaataacattggagctggcgaagcttctgacattttgaacacccggaccaagggacagaagcccaagctgcccgagaaacctcgcttcattgaagtgtcgtccaactcggtgtccctgcacttcaaggcctggaaagatggaggatgccccatgtcgcactttgtggtggagagcaagaagcgcgatcaaattgagtggaaccaaatttcgaacaacgtgaagcccgataacaactacgtggttttggacctggaacccgccacctggtacaacctccgcatcactgcccacaactcggctggcttcactgtggccgaatacgactttgccaccttaaccgttaccggaggcactatcgcaccctcgcgagatttacccgagttaagcgccgaggacacgatccgcattatcctctcgaacctaaacttagttgtgcccgtcgtggcggctctgctcgtcataatcatagcgataattgttatttgtatactgcgtagcaagggcaatcaccacaaagacgatgtagtttacaatcagacaatgggacccggcgccaccctggacaagcgtcgtccggacctgcgggatgagctcggatacatcgccccgcccaaccggaagctgccccccgttcccggatccaactataatacctgtgaccggattaagcgaggccgcggtggcctccggtccaaccactcgacctgggaccctcgacgcaatcccaacctgtacgaggagctgaaggccccgccagtgccgatgcacggcaaccattacggccacgcccacggcaatgccgagtgccactacaggcatccaggcatggaagatgaaatctgcccctatgccacgttccacctgctcggattccgcgaggaaatggaccctaccaaggccatgaacttccagaccttcccccaccagaacggacacgccggcccagttcccggacacgcgggcactatgcttccaccaggacatccaggacacgtgcactcccgctccggatcgcaatcgatgcctcgggccaatcgataccagcgaaagaacagccagggcggacagtcctcaatctacacgccagctcccgaatacgatgatcccgccaactgtgccgaagaggaccaatatcgtcgatacacccgcgtcaactcgcaaggcggtagcctgtactccggacccggacccgaatacgacgatcccgccaactgcgcacccgaagaggatcagtacggctcccagtacggaggaccctatggacagccctatgatcactacggttcccggggatccatgggacgtcgtagcatcggctctgctcgcaatcctggcaatggatcacccgagcctccaccaccaccaccacgcaaccacgacatgagcaactcctcattcaacgactccaaggagagtaatgagatctcagaggcagagtgcgatcgtgaccacggaccacgcggaaactacggagcagtgaagcgatctccacaaccgaaagatcagcgcaccaccgaagaaatgcgcaaactgatagaaagaaacgaaaccggcccaaaacaactccaactccaacaagcaaatggcgcaggattcacagcctacgatactatggcagtgtaatttgtaagcgccctctgcggcg

SEQ ID NO: 26064 - protein, 2016 aa, DROSOPHILA
MNMPNERLKWLMLFAAVALIACGSQTLAANPPDADQKGPVFLKEPTNRIDFSNSTGAEIECKASGNPMPEIIWIRSDGTAVGDVPGLRQISSDGKLVFPPFRAEDYRQEVHAQVYACLARNQFGSIISRDVHVRAVVAQYYEADVNKEHVIRGNSAVIKCLIPSFVADFVEVVSWHTDEEENYFPGAEYDGKYLVLPSGELHIREVGPEDGYKSYQCRTKHRLTGETRLSATKGRLVITEPVSSTAPKVPPLQSRPMIVPGHTDLSILCPAQGYPAPSFRWYKFIEGTTRKQAVVLNDRVKQVSGTLIIKDAVVEDSGKYLCVVNNSVGGESVETVLTVTAPLSAKIDPPTQTVDFGRPAVFTCQYTGNPIKTVSWMKDGKAIGHSEPVLRIESVKKEDKGMYQCFVRNDQESAEASAELKLGGRFDPPVIRQAFQEETMEPGPSVFLKCVAGGNPTPEISWELDGKKIANNDRYQVGQYVTVNGDVVSYLNITSVHANDGGLYKCIAKSKVGVAEHSAKLNVYGLPYIRQMEKKAIVAGETLIVTCPVAGYPIDSIVWERDNRALPINRKQKVFPNGTLIIENVERNSDQATYTCVAKNQEGYSARGSLEVQVMVPPQVLPFSFGESAADVGDIASANCVVPKGDLPLEIRWSLNSAPIVNGENGFTLVRLNKRTSLLNIDSLNAFHRGVYKCIATNPAGTSEYVAELQVNVPPRWILEPTDKAFAQGSDAKVECKADGFPKPQVTWKKAVGDTPGEYKDLKKSDNIRVEEGTLHVDNIQKTNEGYYLCEAINGIGSGLSAVIMISVQAPPEFTEKLRNQTARRGEPAVLQCEAKGEKPIGILWNMNNMRLDPKNDNRYTIREEILSTGVMSSLSIKRTERSDSALFTCVATNAFGSDDASINMIVQEVPEMPYALKVLDKSGRSVQLSWAQPYDGNSPLDRYIIEFKRSRASWSEIDRVIVPGHTTEAQVQKLSPATTYNIRIVAENAIGTSQSSEAVTIITAEEAPSGKPQNIKVEPVNQTTMRVTWKPPPRTEWNGEILGYYVGYKLSNTNSSYVFETINFITEEGKEHNLELQNLRVYTQYSVVIQAFNKIGAGPLSEEEKQFTAEGTPSQPPSDTACTTLTSQTIRVGWVSPPLESANGVIKTYKVVYAPSDEWYDETKRHYKKTASSDTVLHGLKKYTNYTMQVLATTAGGDGVRSVPIHCQTEPDVPEAPTDVKALVMGNAAILVSWRPPAQPNGIITQYTVYSKAEGAETETKTQKVPHYQMSFEATELEKNKPYEFWVTASTTIGEGQQSKSIVAMPSDQVPAKIASFDDTFTATFKEDAKMPCLAVGAPQPEITWKIKGVEFSANDRMRVLPDGSLLIKSVNRQDAGDYSCHAENSIAKDSITHKLIVLAPPQSPHVTLSATTTDALTVKLKPHEGDTAPLHGYTLHYKPEFGEWETSEVSVDSQKHNIEGLLCGSRYQVYATGFNNIGAGEASDILNTRTKGQKPKLPEKPRFIEVSSNSVSLHFKAWKDGGCPMSHFVVESKKRDQIEWNQISNNVKPDNNYVVLDLEPATWYNLRITAHNSAGFTVAEYDFATLTVTGGTIAPSRDLPELSAEDTIRIILSNLNLVVPVVAALLVIIIAIIVICILRSKGNHHKDDVVYNQTMGPGATLDKRRPDLRDELGYIAPPNRKLPPVPGSNYNTCDRIKRGRGGLRSNHSTWDPRRNPNLYEELKAPPVPMHGNHYGHAHGNAECHYRHPGMEDEICPYATFHLLGFREEMDPTKAMNFQTFPHQNGHAGPVPGHAGTMLPPGHPGHVHSRSGSQSMPRANRYQRKNSQGGQSSIYTPAPEYDDPANCAEEDQYRRYTRVNSQGGSLYSGPGPEYDDPANCAPEEDQYGSQYGGPYGQPYDHYGSRGSMGRRSIGSARNPGNGSPEPPPPPPRNHDMSNSSFNDSKESNEISEAECDRDHGPRGNYGAVKRSPQPKDQRTTEEMRKLIERNETGPKQLQLQQANGAGFTAYDTMAV

SEQ ID NO: 26065 - DNA, 3138 bp, DROSOPHILA
ggcatagatgagcagattaaaaagtacttccagtgcggcgttaagctactgaccacccagtgtgttattctggagtcggaatccctgggtgctcctctcactggagccacatccatcgtcaagcgattccatgtccacaaatgcggacacgaaggaaaaccagtccccgcttccgaatgcatcaaatcgatggtaaattgagagttacttgatttcaagtatgctatagccataaaatgattacttgcctttcagaccaaagacaatcgctatgtggttgcctcgcaagatcgtctgctgcaggagagtcttcgcaagattcccggacgttgtctgctctatctgcacaaagccactcccgtcttggaagcaccatctaaagcctccaagaagtgggtgcaacgacgggccaaaaacctaatgctgggcaaacaggtcgagaaaatcgactacatgaaggagaagcagggactgaagccagctgaaactgcagtcaaacccaagaagcacaaagggcccaagaaccccaatccattgtcctgcaagaagagcaaaaaggacaaggcgaagcaacagctcaaaggagttgagcagaccgcaataaccaaggcgaaacgaaaacgagtcaagatcccagcgcacgtcaaggcagcgctaggaaaagattagattagaatggttgatcaagtagataaatataagataatgcaaggtaatctgcagtcttgacaaatcattataatgtgggaggagctgctttaactagccacctgagtgtaatatgccctcttctataatggcaaaaaaatctatgcatctgaaccagatgatagattactaaattactggttaatgacttaagttaactagaatattttagaattcataaatcttaattgattattagcttaccacaatattgctcaccaattgaatgggaggaactgtagaatcccactgtgcctgtgaagattatcgcgattgaaacgcacactcaacttaatcttgtgcacatatttatatattttagtatatagttaagaattatacaacagtataaaagatgactgagagccgtttggagcaggaatagggaaggggcgaggcacaccggggttgttctcacagtttgccctcgcgaatcttgttcagcgtcttctcggtcatcaattgagccagaatcttgctcagcgtgggattccgggcgcagtaggccaagaggttgacgggaaagaggccgcaccaggtgagatccatcttattggccaaggcaacggcgaacagatcgccacatctctgggccgtcatccgtttctgattggccgtactcagacccacctttccgccctgcgagccagtgaaggcctcctgcaggaaatcggtggctatgggtcccggtgcgaagagcgacacatccagcttgcgcatctccactttcagggagagcaagtaggcgttaagggcgtgcttggcggcacagtaggtgggtgaaaatggcactggactgaagccggcgatgctggaggtggcagcgatgtgtcctctaccgccgttctgctccacgaaatagcgcaccaccaggcggctgaggtggaccaccgcaaagacatccagttcgaacagctcccggtccacctcgatctcgacttcggtccaactggctcgctgggatcggccagcattattgacaaggacatccagtcgatgaaagtgattgagcaccgtgttgagatgcgtcttatgctcgtcgagatcgagcatgtccatttgaatgaccagcacgtccttggtggccagcagtccgcgagctgcagctaggcattcctcttgcacttgctccaattgctccagtcgccgggcacttagcaccaatttcactccatgcctggccaagctgagcgccaaagcgcggccaattccgctcgaggcaccagttatccaaaccacctgtccgcgcatcgacgacagcgagactccgaaacgggacttgtaccacagggccacattgcagtcgagcaggatccagaggagcacgtacacgacatagtacagcacgagcaggagcagcagaaactccaggaagctcatctcgttggctctgtatggcacggctgggtcggagaaacctttgtcctctgccgcaacggaaggcactgaaacctgttcttggccacacagaaatcactgcgagcgggtctgatcgatcagctgttggtgggcaccagaggtgacgcagtgactgcggaaagtagtcaccttatctgacataaaacccttatacttggtttttgaatgatgctatattatttaaataccttttggtagctaggtaagggtagtactatctttcttgagagaacatgtagagcataatccaagatacgaaaaacgcttccatctgctcatctctgatagtttttttacgtaaacgaatcagggcttccaacacactgcctttgcgccaacattcacatcaaaattcaaccccatcagtttggctaaccatttctttttatataaaagtaagtaaactaagaactaatcctaggcctgcaggaagtctccgagattgccacatattttgtcgatttccgcacatcccgattgctccagcgctgaaatggcattggcgagggccacggtttctttcagggaatgggccttcaaccatatcctgccgttgactcccacagcgatctcgtagggcagttcccgggtaagagcggcgagaacagggcagttttcccgcagcagcatccttcccagattcaggctgcacttgaagaagaatccatcggtgaggacgcccagtttgccacttttgcccaccgagttgacgcagaccagctccggttcaatgtccgcgcttgcattcaggactctcgcgtaaatcagatcaccggggatcagatccgggcgattcttcttgctggccgcctcaaaggcgagatacgatatggaggctgtgtccgttgctccgatgtccacgcggtacagatcgcccgccttggctcgcacaatgcccagaatgagatccccgcgtgccgggatgtaccttctctggtagttgtccacccagaaggtgccgggttccttgtgtcgaagtgggcccgccttgctagccaccaccgtgtcatc

SEQ ID NO: 26066 - DNA, 1138 bp, DROSOPHILA
cagaggacaaaggtttctccgacccagccgtgccatacagagccaacgagatgagcttcctggagtttctgctgctcctgctcgtgctgtactatgtcgtgtacgtgctcctctggatcctgctcgactgcaatgtggccctgtggtacaagtcccgtttcggagtctcgctgtcgtcgatgcgcggacaggtggtttggataactggtgcctcgagcggaattggccgcgctttggcgctcagcttggccaggcatggagtgaaattggtgctaagtgcccggcgactggagcaattggagcaagtgcaagaggaatgcctagctgcagctcgcggactgctggccaccaaggacgtgctggtcattcaaatggacatgctcgatctcgacgagcataagacgcatctcaacacggtgctcaatcactttcatcgactggatgtccttgtcaataatgctggccgatcccagcgagccagttggaccgaagtcgagatcgaggtggaccgggagctgttcgaactggatgtctttgcggtggtccacctcagccgcctggtggtgcgctatttcgtggagcagaacggcggtagaggacacatcgctgccacctccagcatcgccggcttcagtccagtgccattttcacccacctactgtgccgccaagcacgcccttaacgcctacttgctctccctgaaagtggagatgcgcaagctggatgtgtcgctcttcgcaccgggacccatagccaccgatttcctgcaggaggccttcactggctcgcagggcggaaaggtgggtctgagtacggccaatcagaaacggatgacggcccagagatgtggcgatctgttcgccgttgccttggccaataagatggatctcacctggtgcggcctctttcccgtcaacctcttggcctactgcgcccggaatcccacgctgagcaagattctggctcaattgatgaccgagaagacgctgaacaagattcgcgagggcaaactgtgagaacaaccccggtgtgcctcgccccttccctattcctgctccaaacggctctcagtcatcttttatactgttgtataattcttaactatatactaaaatatataaatatgtgcacaagatta

SEQ ID NO: 26067 - protein, 321 aa, DROSOPHILA
MSFLEFLLLLLVLYYVVYVLLWILLDCNVALWYKSRFGVSLSSMRGQVVWITGASSGIGRALALSLARHGVKLVLSARRLEQLEQVQEECLAAARGLLATKDVLVIQMDMLDLDEHKTHLNTVLNHFHRLDVLVNNAGRSQRASWTEVEIEVDRELFELDVFAVVHLSRLVVRYFVEQNGGRGHIAATSSIAGFSPVPFSPTYCAAKHALNAYLLSLKVEMRKLDVSLFAPGPIATDFLQEAFTGSQGGKVGLSTANQKRMTAQRCGDLFAVALANKMDLTWCGLFPVNLLAYCARNPTLSKILAQLMTEKTLNKIREGKL

SEQ ID NO: 26068 - DNA, 3422 bp, DROSOPHILA
agctgcagaatcattttccgcatgccggctgctttgacagctgcaataccgcacatggctcaaagggtcgaaaagcgggccacatgtggtggtatatggtggaaaagggggaaaacggggcaacgggcaaaggatatggggagttggagaccgcactcgaaatggaagccaaaggactctggcttagttaattgagtggacagcaaggaggtctttaaactgagattggcacggataagaagataagcattatagactttgttggcctaatctcacaggttcatttgattctaagcagagaaaaaagaaagtattttttaaaaatagttttagaaacttctaggcttcgacggcgggttccatggacaaggacctgctgctcacactcccggcgggggtcatgatgtcctccagcatttggttgagcgactcggagcccagagcgtactcctgcttattggcacttcggttgtgcatggcgtccaagtagacgccactcgcattgcgctcgctgctcagaatgtgctgcatgacattgctgatctgttcggagcccaggatcttcggttgctcggtggccagtccatcgatgaccgcagtttccagctggcttgaaattttggccggcgactcctcctcgttggcagtttttagaaaacgaatcgcctgtgcagaggccaaggctccggccgtaaaagaggtcagcaactgagcaatcgaaatcatttgaaatttgatatttttaaatgattcgaaagcgaatttagatcatgctttgaaagttcgttacgattgctatgaattgagtttaaatatttcaaggctacataaattagtaattaactcaatagccaccactgatttggcttacaaactcttttgtttaatattatttttaaaagctttaaatattttaaatagatttagctagaaaatagctgacagacacatatcgatatatcgctgcgatagccacagctgttcacgcccgcagtttaagcgatgtggcagccctggtcggccaccaaaaaataaacattggaattttcccttaactttatagagttttatccaatttgagcgatgctgccgggcgttggagtgttcggaacgggagagatagccaatgtgctggtgccgctgctgcgggagaaaggattcgaggtgcgggccatttggggcaggaccctgaaagaggcgaaagagactgcgaccacgcagaatgtacaattccatacgaacgtaatcgacgatgtcctgctgcggaaggatgtggatctggtgttcatcgtgtgccagccctttctgcacgcggagatctcggtgaaggccttgggcatcgggaagcatgtggtgtgcgacaagccagcaggattgcaccagcaggacgcactcaaaatggttcgggcttctcagtactatcccactctgatttccctggtcaatcacccgctgaggttcctgcccgcctttacacatatgcgtcgttgtctgcaggaggagctaattggctctattggcgacgtggtactcatggatgtgcgcgtccagatgggaacgctctttcccgagaagtacaactggatgtgcgatgcgcaaatgggcggcggtgccctgaatctcgtgggatccgtggtggacttggtcacctttctgctgcaacagcaggcaataagagtgcatggagtcctacgatcctacacgaaaaccacaccggccatcaatggcattcgacaaattacggctccggatttctgcaacttccaaatggaactggccagtggaacgctggtcacagtggccctgcacagtcacactgtgccagcaaaagccttctcgcaggaagtgctcatctatggcagcaaaggacacctggtggtccgcggcggcgacctatttgtcctcaaggagggccaacccaaagaggaagctgtttacgtggatgtccaggatttgcacttcgccaccaacaactctttgctaccacgaccatatatcaaaggactctgcaagatggtgggcgctctgaaggaagccttcggcagcaaggagtcctcctgggttaaggctccagtttccacagcggccacctttgaggacggcctctacgttcaggctgtggttgaggccatccggaaatcgaacgagaccaggcagtggcaaagggttcagctgtccaccgacagccccctgaatcacgaccagataattcgatatgcacgcatgtccacaatgtgagggagtctgtattacataggtgcaatatatgaatgattccactatatattttttatataatgtacgtgtttagtctttaagcgttcaaaagattcaggctttccagccggcgtcatcttcatcaatgtatttaacttatttgtacggcatcagcattttgcaactaataaaattgatttgttagacatgagactttatatttatattagctagaaaacatttcatgatagttaatagcaaggaacgagaagaagtcatcaaatgtaccaaacgttttattttaaaaacaaaattgtctacacaaactaaacgaaatatgtcatatacaagtaattcgaacttagggctaaaactaaagctaatcactaaagagacgaaacaaattattgatcacaaaagtatctttgtagcggaccttatagaagtagatgaatattcaagacttggcatagctggagtcttcgcggagatccagctcagtggatgaagtattgtgtttacagggcaagatggaaacggggttatagagattgtgttgcagttgatcttcctttttggtatatcagcacttaaactggatttaagctaccctaaagccttcttgcgtacaatatttcagagaatatttaaataaatacctaagctaacatcgaatcggtcgatcaattgtaaaaacacaaaaagggtagtttcgaatttggaacttaaaacgaggagagatggaaagacacccgactatgtacaaaaggattgcagccatggaccaaacattggccatggtatcttatcgcttgttgagcttgtgccacagcgtgatgagggtcagcacatgcatgactccaatcacgatgcccatgaggatcaggcagtcggacatgtgcacatccgatatcatcatgtacttgagaaagaccttcgggctgcggaagtggcaatacatcgcagtctcggggcactccagaaagggtcgatccatgccgtaaatggcgttcaacgccccgtggaatccggcccggaagtaactcaggtgccacatccatcggaagaggggcgtgatgtcgatgtagcgcgtgcagaatccaaaaacggagaacatcaccgccagaatgggtcccagaaacacggcaagctgaggcggaaagattagttattaccaattcgattctcagttagctggtcgagtg

SEQ ID NO: 26069 - DNA, 1422 bp, DROSOPHILA
cgatgtggcagccctggtcggccaccaaaaaataaacattggaattttcccttaactttatagagttttatccaatttgagcgatgctgccgggcgttggagtgttcggaacgggagagatagccaatgtgctggtgccgctgctgcgggagaaaggattcgaggtgcgggccatttggggcaggaccctgaaagaggcgaaagagactgcgaccacgcagaatgtacaattccatacgaacgtaatcgacgatgtcctgctgcggaaggatgtggatctggtgttcatcgtgtgccagccctttctgcacgcggagatctcggtgaaggccttgggcatcgggaagcatgtggtgtgcgacaagccagcaggattgcaccagcaggacgcactcaaaatggttcgggcttctcagtactatcccactctgatttccctggtcaatcacccgctgaggttcctgcccgcctttacacatatgcgtcgttgtctgcaggaggagctaattggctctattggcgacgtggtactcatggatgtgcgcgtccagatgggaacgctctttcccgagaagtacaactggatgtgcgatgcgcaaatgggcggcggtgccctgaatctcgtgggatccgtggtggacttggtcacctttctgctgcaacagcaggcaataagagtgcatggagtcctacgatcctacacgaaaaccacaccggccatcaatggcattcgacaaattacggctccggatttctgcaacttccaaatggaactggccagtggaacgctggtcacagtggccctgcacagtcacactgtgccagcaaaagccttctcgcaggaagtgctcatctatggcagcaaaggacacctggtggtccgcggcggcgacctatttgtcctcaaggagggccaacccaaagaggaagctgtttacgtggatgtccaggatttgcacttcgccaccaacaactctttgctaccacgaccatatatcaaaggactctgcaagatggtgggcgctctgaaggaagccttcggcagcaaggagtcctcctgggttaaggctccagtttccacagcggccacctttgaggacggcctctacgttcaggctgtggttgaggccatccggaaatcgaacgagaccaggcagtggcaaagggttcagctgtccaccgacagccccctgaatcacgaccagataattcgatatgcacgcatgtccacaatgtgagggagtctgtattacataggtgcaatatatgaatgattccactatatattttttatataatgtacgtgtttagtctttaagcgttcaaaagattcaggctttccagccggcgtcatcttcatcaatgtatttaacttatttgtacggcatcagcattttgcaactaataaaattgatttgttag

SEQ ID NO: 26070 - protein, 384 aa, DROSOPHILA
MLPGVGVFGTGEIANVLVPLLREKGFEVRAIWGRTLKEAKETATTQNVQFHTNVIDDVLLRKDVDLVFIVCQPFLHAEISVKALGIGKHVVCDKPAGLHQQDALKMVRASQYYPTLISLVNHPLRFLPAFTHMRRCLQEELIGSIGDVVLMDVRVQMGTLFPEKYNWMCDAQMGGGALNLVGSVVDLVTFLLQQQAIRVHGVLRSYTKTTPAINGIRQITAPDFCNFQMELASGTLVTVALHSHTVPAKAFSQEVLIYGSKGHLVVRGGDLFVLKEGQPKEEAVYVDVQDLHFATNNSLLPRPYIKGLCKMVGALKEAFGSKESSWVKAPVSTAATFEDGLYVQAVVEAIRKSNETRQWQRVQLSTDSPLNHDQIIRYARMSTM

SEQ ID NO: 26071 - DNA, 2343 bp, DROSOPHILA
cgaataacaggatatgccaggcagaaatttattaggcgcattgcacacttttgtgcgttcacttgaaaaatgacaactttaatttagctacaaacacaaagccaacaggcagcccagttagagatgagtaacgcccagcaaacgagaaaagggctggagacaaaagcgccaaccagacaatgagaaatgcatgggagtggggcgaaagttgaacggtgaggaggggtcagaaaaaggggacgaagaaagggctcacagacaattcccggggctagatctgcttttgtcagctagccacagacattggctccgcattgccacacaaggagaaaaaatcatttttcctacatttttttacagaggtgctcaagagcatgcagtaaaaaacctcgcttttttggcatgcaactaaaggactgtatcatatatttttagacaccttttctgtagcattctatagctgcaatgaatatattaagtataagtttcgcattgaattgcatgagcatttgagctctcagtgtattcgatagctgccggctacagttgactttcggatcgcaaaatgtagaaacgggaacacagaatactctcggcttaagggagttttccacacccgagctccaccttcgactccgttgctcgtctcagatgaatattaattaccatttgaaagcttgtcatacacttgtgtaaatttatcaacaacaacagtagtgccagccagcagaaagacggtaactgcaatggcaggaggcgaaggcggaaaagccgaacctggatctgaatctgaaggagacaataagcagagttgtcaaagagcaacaaactgggggcacagagctaggcatgaaaatagctttgaatgtgcaggagattaggccaggatttgcatgcatagagaaaacatttccaaaaggatgttggggccgactccttgctcatacttttcaatcaatgcttctgggcacttgccctgcgaaaattcgtaaataaatgcatgagcccagaatgcattctacatggggcaaggcaatgatctgcccacgcccttctgcaaggaggcgagacttacctacgtcagcatgcacgaaagggttccaaggaccttctactttattgtttccacgccaggtggcgttgcggaggcgatcttcaacgtgaacttcaccaagcgccaccgacagctgtcgaactccatcgacgacgacgaggaggaggagctcaatcggccggagcagatccactttcccgtcttcaatggcagtcccgccgatgggcgtggctggtgggcggtagtcttagccttgcttttggtcgtggcaactacaaaccgccattagatttagttgggaccctgtgagagtgaaagttgaatgaatgatttcttagggagtgactgacgcgtttacaacaccgaatgttctatgtaatctaaccccctatggctaagcatatgtatggatttacccagttactcgacattaccacgtgaactatgctacacaactactactctatatagcaatacatatgtgtatctgtaaccgatttagccaagcatccaaattgccctagtctaagaccccaagcccatcagttacccgaaaaaaaaacacacacacacttttctagatcccccaaaaaggaagcgactctttaaccctaagctattcgaatatttttactgtaacccccctagctgtaactgtaactgtaactgtaactgtaatgttaactgtaactgtaaccctatcgctgtatgtcaatgtgtatgagtgtgcgcttaacttaaatgccaaagccagaaaacgtaagggaaaaaagtttacaattctttggataaaaacattgttataaagttgattattacgaatactttaagttccttttcgacgaagaagagatctcgagaaagcgactgattttgttaaatattttgaagatgtttagaactaaaagcacgatgaggagaacctatagtttaaaaatgtacatgaagaagtcagagacgacgaagtaatacttaccaggcacgaacaaattccttccatttgaaaagtttgccccgagcaaagaaactgtaagatattttgggaaatcaaattaagcgaatgatcaaaagagttttaacctaaacgaattgggttttattaggcattaaatcgcaccctatcatttcactatgagttttcaatcgtttgaaaggaccaaaaacgaatcgttttcatttactacgaatatttttgtaacacaaacataagcatatttatagccccaaaaacaaatgagagaccctccacataagcgatatttgtaaataagtgttcaagtagagaattg

SEQ ID NO: 26072 - DNA, 2274 bp, DROSOPHILA
atgagcccagaatgcattctacatggggcaaggcaatgtaccacctacacacaaccacaaaatatcaatgccaagtcagtgcagaagccaaagccctccgagcgtcgagaagtcatcagcacgagcagctccagcagtcacagttggccgagcatatcagccgagccggccgacgaggtagttgaccatcgcggcggcggtaagccggcaaaatgcgccaaaaactgccaaaaggccaaggccaagtgggccaagtggcggacacaactgaagccacatcaccaagcccaccgcgctgtgcagcacaaggaggccaggcaacggcagcgccgcgagacggaggaggatgagctggacgcggttctgcgagcacccagctccacgagcacctccaccgcagtggccaccacagtccaggccactagctccagctcctcggccaccaggagctcggtcatcaatgaaaccaaggcgaaaaggccgcgatccacgctccatttggcgccggaggatatgcagccgaagcccaaggagccggtgatcatcatcgacgacgtggaggagttcgatagtggcaccagcaccagtgacctaatcgcgcgcaagagccgcgaggaggcggaggaggaggaggacgaaggtccgctggagcccagagtactgcccctgcgaccagtgcctccaaatccctacgaggcggaggaaatgtccgtggtctatgcggagcagcactccgagatcaagctgatgtgcgaggtggatttggatattgccaccagcatgtggtacaagaatggccaggtggtccacgccatggaccgcaccgcccgcgtcaccgactatcgcttcatcaaggaggctaatggcgccctaaccatcaccaatgtcatgctcgaggacgacggcaagtggcagtgcgaggcggagaacacgaggcgctatacggagaacgcccgacccgtcaagctggtcgtcctggatcgacccaagccaccgtatttgctgatcgactcccgccgcctggatgccagcctcgacaaagatggctacaaaatcaatagcggtgcaaagagcgaagcccgattaccggcggtctatagggcgcatcataacgccaggatcctctgcgtcatggagcatcccacgctgaagatccgacagaatgcatccctccttctggatgtgcaatacacgccctccttcgccatatcccgcacacctggcttcggttatccgctccgcgagggcatcgaagttagcctcaagtgcgacgtcgactccaatcccccgagcacgccacgctggcagaaggacgatggtgacacgccggtgccgcaaacgggcgatggtttcctcaacttcacatcgataaggcgtgaacattccggctggtacaagtgcacgtcccggcacctcaactttcaatactcgtcgattggctattacctcagtgtgcgatttgattcggtggatgtgacctccgagccggatgatcaggatgtttccgtggcagctgcctcgcacaatcccaacaagggccagctggaagtgcagctgggcggagcggttaccctgcagtgccctcaaggctccctgggctgctggtcgcatttggaccccatttcggcccggttacgtggccttggctacggcagcagtcagcccaccggccagttctcgctcaaggacgtcatgtaccaggatgcgggcatgtacaagtgtgtgggccagtcgcccaccaacaagaagaagctggaggtcctccagagcgttacagtctccgtgaagggcgctcccacagtcatggccttaaatgccacgcccgttgcctatccgggatcaccgctgcaccttaacgtggagttctgtgccaatccgccggctcatgccgctcgatggctgcacggagatcgtgtctttacgcccggaaatcagtacggcaccacggtgctggcctatgcggtaaaggatctgcccacgcccttctgcaaggaggcgagacttacctacgtcagcatgcacgaaagggttccaaggaccttctactttattgtttccacgccaggtggcgttgcggaggcgatcttcaacgtgaacttcaccaagcgccaccgacagctgtcgaactccatcgacgacgacgaggaggaggagctcaatcggccggagcagatccactttcccgtcttcaatggcagtcccgccgatgggcgtggctggtgggcggtagtcttagccttgcttttggtcgtggcaactacaaaccgccattag

SEQ ID NO: 26073 - protein, 757 aa, DROSOPHILA
MSPECILHGARQCTTYTQPQNINAKSVQKPKPSERREVISTSSSSSHSWPSISAEPADEVVDHRGGGKPAKCAKNCQKAKAKWAKWRTQLKPHHQAHRAVQHKEARQRQRRETEEDELDAVLRAPSSTSTSTAVATTVQATSSSSSATRSSVINETKAKRPRSTLHLAPEDMQPKPKEPVIIIDDVEEFDSGTSTSDLIARKSREEAEEEEDEGPLEPRVLPLRPVPPNPYEAEEMSVVYAEQHSEIKLMCEVDLDIATSMWYKNGQVVHAMDRTARVTDYRFIKEANGALTITNVMLEDDGKWQCEAENTRRYTENARPVKLVVLDRPKPPYLLIDSRRLDASLDKDGYKINSGAKSEARLPAVYRAHHNARILCVMEHPTLKIRQNASLLLDVQYTPSFAISRTPGFGYPLREGIEVSLKCDVDSNPPSTPRWQKDDGDTPVPQTGDGFLNFTSIRREHSGWYKCTSRHLNFQYSSIGYYLSVRFDSVDVTSEPDDQDVSVAAASHNPNKGQLEVQLGGAVTLQCPQGSLGCWSHLDPISARLRGLGYGSSQPTGQFSLKDVMYQDAGMYKCVGQSPTNKKKLEVLQSVTVSVKGAPTVMALNATPVAYPGSPLHLNVEFCANPPAHAARWLHGDRVFTPGNQYGTTVLAYAVKDLPTPFCKEARLTYVSMHERVPRTFYFIVSTPGGVAEAIFNVNFTKRHRQLSNSIDDDEEEELNRPEQIHFPVFNGSPADGRGWWAVVLALLLVVATTNRH

SEQ ID NO: 26074 - DNA, 2694 bp, DROSOPHILA
attacaagagaactaactccaacatctcattagaactctaaagtcccaagtccatattcaaaaagctcgacaccgaggcttgaacgttagtcaagttgagttaaataatattatatttttttttacttatgaaaattgtaaacttgtaacggtcgcagtcggtagggtcaacaaggaaatccttttagtacggtactgatcaattatagaatttcctatacacctagcaattctgatcagtgaattaaaatcagtgatttcccataaaaatggttaaaaaaagaatgtatgtgaaagtaaatttatataactaaaaaaaatcccgtgaagtcggaaataatattttatgaaaaattttaattctgtgaactttaataaaagaagataacaaaataaaataatattaaacataccaaaacttacaacatggcagtcccacaactttctgagatgctttcaaatcaactatcgggcagataaaagaactacatgacacacgataaaaatatttttaaaacctattcagttaagcggcactgtatagagttaaaacttaagaaagtattgcacatgcattttgatgctcaggtaattggagtaatctgttataaatttattatgtaataaaaaaaaatattaaaaatttgtgaagaaaattaccgccgatgagcatatgttaacctcagatacttttggtacgttttttaagttgcctaacaaacatttgatacatattcaaattgttgaacgaaaaattcataaataatacaaaaaatttatccctttaaaacatgaaaagaaaatgttaaattatttccgatatccgttctcttgacaagctggaaaacattttctaatttttcgggatttcatcttttacattcaccttatctgctttttcatccataaaccataaaggacacattccaagcaaacagcctacagtgatcccgacaatccgtccctaaaataatagatatttctatgaaaaaaatcccttttatacgttctttgaggaacttacgtaacttgaagaccgcttgctagactttaattcaaattgcgctggagtcaaattgggctgctttagacccaatatctggcacccattctcaacgtaggtggccatagtgatgcctaaaatatcgcttatggtgtttcctagtcctgcggctgccattgtagacagcgttataaagtggcccaaataatattcaatgtattcaccctacaaattgcaatttctatagaagtttatattgttagctttatatcatacttaccgccatgatcattatgaaattgtcaaggaatccgaaagcgataaacggcactgcatttacaaagaaaactgcaaatatacgatgacttataagccaacaagttttgacatttacttactgctgtacaattgacctgccgtgggggatgctgccgtctcaactggaagcaaaataaaaatgaaagtatgataccttcattgcgacaagagatcgatgatggtccggctgctgtaatatttttactggcacagcttgtgttagtggctgatatcgttatttacccaatttttttcgcagccaatcatcgggcactgcgcaaaaagttcccgcaataacttggcccaattccgtcttattagaaagtcgtccgaagcgagtgcgccaactaccgaaagccagttgaccttaaaaccgatgtagattgaagtgttagccgggacggtgaagtgttttttgttccagtgtcaaatatgtgttattaagaaatcgttgttgggagtcgagaggaatatgaaaaaaaaaataaaatgtttgtcaagaaacataaaaatttaaataagtgtacagtgttaaccttttccgtttttatgtataagactataatgtttttaacgacatcaccagcgcacaaacatgatgtgtcttttgacaccacaattgattgaagacgtaaacggtatcgatgactttccaaactttatctatatcattcccaatccaattctcacaaaacacacacacagaatttaaaatctgtgtattactttgggtggcatgcagttaaaaatatcaaaattgttttgctgcgtttcgtacaaacaattttcgcttgtccaatatcctttaattgtcttacagcattagaaatagaaaaaaccattttccaattcatatgtcctccatacgaaaaattcccacctccgaataactacactgagcctataggaactgttaccttcccacccctaccaagtagataaatgcataaggcttcacacccactcacaacttaggaaatggaagggttctatgaacattacgcactattccctcccacaattttttaatagaagcaaatattaactatgtaaattatcgaaagacataatttaagacaaaaacacgtcaatctttaatctgtaagaaaacacaaaaaaaggcacaagagtaaagaagacagtgcaattaccatctgtaagctatattccatatttctactccccaattcaaattagttcattcgaaacatttaacacatcctcgatgcgcatgcgaaatgttataatgttacatcacccttgcaaaacaaaacaaaatccaaaacgatgcaatggttttttatcaactcttcctctaactaaaaaatatctacccaagaccttactttatttacattaaaagctagaggcag

SEQ ID NO: 26075 - DNA, 467 bp, DROSOPHILA
ttttaaggtcaactggctttcggtagttggcgcactcgcttcggacgactttctaataagacggaattgggccaagttattgcgggaactttttgcgcagtgcccgatgattggctgcgaaaaaaattggtgagacggcagcatcccccacggcaggtcaattgtacagcattttctttgtaaatgcagtgccgtttatcgctttcggattccttgacaatttcataatgatcatggcgggtgaatacattgaatattatttgggccactttataacgctgtctacaatggcagccgcaggactaggaaacaccataagcgatattttaggcatcactatggccacctacgttgagaatgggtgccagatattgggtctaaagcagcccaatttgactccagcgcaatttgaattaaagtctagcaagcggtcttcaagttacgtaagttcctcaaagaacgtataa

SEQ ID NO: 26076 - protein, 79 aa, DROSOPHILA
MIMAGEYIEYYLGHFITLSTMAAAGLGNTISDILGITMATYVENGCQILGLKQPNLTPAQFELKSSKRSSSYVSSSKNV

SEQ ID NO: 26077 - DNA, 2411 bp, DROSOPHILA
aatgtatgtgaaagtaaatttatataactaaaaaaaatcccgtgaagtcggaaataatattttatgaaaaattttaattctgtgaactttaataaaagaagataacaaaataaaataatattaaacataccaaaacttacaacatggcagtcccacaactttctgagatgctttcaaatcaactatcgggcagataaaagaactacatgacacacgataaaaatatttttaaaacctattcagttaagcggcactgtatagagttaaaacttaagaaagtattgcacatgcattttgatgctcaggtaattggagtaatctgttataaatttattatgtaataaaaaaaaatattaaaaatttgtgaagaaaattaccgccgatgagcatatgttaacctcagatacttttggtacgttttttaagttgcctaacaaacatttgatacatattcaaattgttgaacgaaaaattcataaataatacaaaaaatttatccctttaaaacatgaaaagaaaatgttaaattatttccgatatccgttctcttgacaagctggaaaacattttctaatttttcgggatttcatcttttacattcaccttatctgctttttcatccataaaccataaaggacacattccaagcaaacagcctacagtgatcccgacaatccgtccctaaaataatagatatttctatgaaaaaaatcccttttatacgttctttgaggaacttacgtaacttgaagaccgcttgctagactttaattcaaattgcgctggagtcaaattgggctgctttagacccaatatctggcacccattctcaacgtaggtggccatagtgatgcctaaaatatcgcttatggtgtttcctagtcctgcggctgccattgtagacagcgttataaagtggcccaaataatattcaatgtattcaccctacaaattgcaatttctatagaagtttatattgttagctttatatcatacttaccgccatgatcattatgaaattgtcaaggaatccgaaagcgataaacggcactgcatttacaaagaaaactgcaaatatacgatgacttataagccaacaagttttgacatttacttactgctgtacaattgacctgccgtgggggatgctgccgtctcaactggaagcaaaataaaaatgaaagtatgataccttcattgcgacaagagatcgatgatggtccggctgctgtaatatttttactggcacagcttgtgttagtggctgatatcgttatttacccaatttttttcgcagccaatcatcgggcactgcgcaaaaagttcccgcaataacttggcccaattccgtcttattagaaagtcgtccgaagcgagtgcgccaactaccgaaagccagttgaccttaaaaccgatgtagattgaagtgttagccgggacggtgaagtgttttttgttccagtgtcaaatatgtgttattaagaaatcgttgttgggagtcgagaggaatatgaaaaaaaaaataaaatgtttgtcaagaaacataaaaatttaaataagtgtacagtgttaaccttttccgtttttatgtataagactataatgtttttaacgacatcaccagcgcacaaacatgatgtgtcttttgacaccacaattgattgaagacgtaaacggtatcgatgactttccaaactttatctatatcattcccaatccaattctcacaaaacacacacacagaatttaaaatctgtgtattactttgggtggcatgcagttaaaaatatcaaaattgttttgctgcgtttcgtacaaacaattttcgcttgtccaatatcctttaattgtcttacagcattagaaatagaaaaaaccattttccaattcatatgtcctccatacgaaaaattcccacctccgaataactacactgagcctataggaactgttaccttcccacccctaccaagtagataaatgcataaggcttcacacccactcacaacttaggaaatggaagggttctatgaacattacgcactattccctcccacaattttttaatagaagcaaatattaactatgtaaattatcgaaagacataatttaagacaaaaacacgtcaatctttaatctgtaagaaaacacaaaaaaaggcacaagagtaaagaagacagtgcaattaccatctgtaagctatattccatatttctactccccaattcaaattagttcattcgaaacatttaacacatcctcgatgcgcatgcgaaatgttataatgttacatcacccttgcaaaacaaaacaaaatccaaaacgatgcaatggttttttatcaactcttcctctaactaaaaaatatctacccaagaccttactttatttacattaaaagctagaggcag

SEQ ID NO: 26078 - DNA, 361 bp, DROSOPHILA
ttttaaggtcaactggctttcggtagttggcgcactcgcttcggacgactttctaataagacggaattgggccaagttattgcgggaactttttgcgcagtgcccgatgattggctgcgaaaaaaattgggtaaataacgatatcagccactaacacaagctgtgccagtaaaaatattacagcagccggaccatcatcgatctcttgtcgcaatgaaggtatcatactttcatttttattttgcttccagttgagacggcagcatcccccacggcaggtcaattgtacagcattttctttgtaaatgcagtgccgtttatcgctttcggattccttgacaatttcataatgatcatggcg

SEQ ID NO: 26079 - protein, 14 aa, DROSOPHILA
MQCRLSLSDSLTIS

SEQ ID NO: 26080 - DNA, 3239 bp, DROSOPHILA
ttttttttttttaaatatatgtatatatatcgatgctagtgctgtttttttttggttttgcaacgatgctaaccagtcgggaaacgggggactcgcaggaggcgtgacactctgcaacaagtttcgatttgacggaaatgcattcattcgcacacgtgccgcgagtaccaaaaaacaaatacaaaacaaaacaaaaattttgtgaattagttgagttttgaggcaagtgaaaacaaaagcacgtttaaacgcaggcggaagagcaaaagaagttcagcagaatatcttgtttttacgattgtgtctctccgcacgcacttcacttcactttcttttaaggcgttcttcggttttctggctgctgttactgttgttgcttttcggttttcctttctctgccagcttcgctgcccgcgtgctgcctgcctgccttgcttttgctttccgctgcgaagtttttgctttgcgttgtcgctgctgctgctgctgctgctgctgcgattgttttgctttcgctcgattggggggaaaaaaaattttctagcacttacacaactcggaagcggaacacatccaattgtccaattgccccgtcggctaaaatcgcaatcgtggcccacagcttgtgtgttgaggattgattgttactgcacccaactttttctttattttcgtctgtcgatttagtaactagtggtggcaaacagctggtcctatcgatagacactgctgcggttcgtcaccgcggaccgaccgactgaccgatagattgcagacttatcgcaatgttaccgtgcgagttagcgcactcgctattcaaaatatataccaagtgcaaaagaatactgaatgtattttttggcagttcgccgcagtagttgactttaaaaaatacaaagctggaaagtctatgaaataataaaataatttatttaactgtaaacatgaatgctgctctgccttccattatcatcatttttatatcagtccatattatcggctaatcatcgaaaaaatcgatggaatcatcctcaatctccaccagctcaaaatcggaggtgctgccaaacatccaccagtggctgagaatgttccggatgagcataaatcgtgtggtgacaaactcaaagaagtggaagaaaagtgcactggaggtcagaagggcacaagaggcgacaaacacctcctggacggttaactgatcggtgctgccttgattcatattatccatgcactgcagcacctgtgatcaagattgtgaacttgatagaaaaccccatgaatccagtgccacattaaaatactcacctgctgcaagatgatatgggctagtggcattagcgaggcgctaaatagcagatgcttcacaatcaggccgcaacaacggccgcagcagaaggttcggatcatttgcttcagactggcccgctcctccgcgatattaaagaccgcattgcagatctcacagcgattatcccgcctgtgcatgatccagcgcttcaagcactttaggtggatgtagccctgcaaggatatgacctgaatgccgcaagcccaaagagacaatccgccatagcccaggggcgccagttcgaatggatgtcctttcggcccaataatgctatcaatgctggaaactggtggtcggcatacgggggaggagcattcccacgaactggcgcccttgtcagcggcagcagaagatccaaaggaaccacacttaccacgctgcccttgcagttgcagggacatttgatgatctccatgtcgttgcggttccagcggcagatgcggcacgagttgccgctctcgttcgccgaatggaggctctcctgtaggtgacttcgcagcatccgttgccgtgctgaggatatttccagtgctgccgtggatgcagtgggcgtgccatgtgccgatgctacgatttgcgacgagcagattgcttcagctgccgctgactgaggcggctgagcgccgagtggcattgtggcattgccggctgactccagaccgttaatcagacgaagggcagcggcctcggaaagaacgtgttgatgatgcgacatattgctcgggtacacagatgttgttgcgggtaagcaacggctattgtgtggtgcgcctgcactgcttgcaatgatattgacaactgcttggcggcggttggtggcgtttgtccacttgtgagcgttacaaaacaaattttgagaaaacaaatttttacaccgaatttctctgcaacatattacatacaacttgaacgttagacttttgcgatttgctgccaggaaacaaacagcatgctgtatagcatttttttttttttaatttcaaaaacctagaattatttgattcagccacatataaaacacacactttgcttgggtttcatttgtttgtttgttttttttttatttctttgcggccattttattttggcatcggttagtaaatgtttcgttctcgttacacgtacgtacatagaatatatgtgtattattacagtagttcatcaatgtgagcgacggcatcgggacgtatcttatatactaaatccattgtcgatgaccgccggacaggggttagtaactgctctgcatcttctttctccgcaattaaaattatgacaaaaaaaatatatataattcaacaattatttgcatagattctgcttcaagttcgataataacaaataataatgcgtaatcgtaatataatagtaaaaaaggggtaaaacaaacacaaaaaaacgtacaaagagtcggctgttcacgttcgacgagccatttgcgcttcagttgaagaatatacaatacatataatgccgattatacaattagatagatattcgcaggatgacggattcttgagtggcttccacataggcgtaggattattatagattattgtggattcaaatggtttatgctggattcatggggtgtgtctaaacacaaaatgccaaaggggatgtgtatataatgtgtatatggtgtgtgcttaaaatttaatgagtttctgctgttgccgttgagttgacttggatttggatctggatttggactgttctgctgctgctgctgctgctgcttccgctgccgctgatttcgatggttgctttaattctactcactgacaattccggaatcggcgatatatgctctgcacgtagacgaatacgcatttccagtcaggacgactcatctccaccatgtcctccacatccagcagtggtgcaa

SEQ ID NO: 26081 - DNA, 974 bp, DROSOPHILA
gcagagaaattcggtgtaaaaatttgttttctcaaaatttgttttgtaacgctcacaagtggacaaacgccaccaaccgccgccaagcagttgtcaatatcattgcaagcagtgcaggcgcaccacacaatagccgttgcttacccgcaacaacatctgtgtacccgagcaatatgtcgcatcatcaacacgttctttccgaggccgctgcccttcgtctgattaacggtctggagtcagccggcaatgccacaatgccactcggcgctcagccgcctcagtcagcggcagctgaagcaatctgctcgtcgcaaatcgtagcatcggcacatggcacgcccactgcatccacggcagcactggaaatatcctcagcacggcaacggatgctgcgaagtcacctacaggagagcctccattcggcgaacgagagcggcaactcgtgccgcatctgccgctggaaccgcaacgacatggagatcatcaaatgtccctgcaactgcaagggcagcgtgggctacatccacctaaagtgcttgaagcgctggatcatgcacaggcgggataatcgctgtgagatctgcaatgcggtctttaatatcgcggaggagcgggccagtctgaagcaaatgatccgaaccttctgctgcggccgttgttgcggcctgattgtgaagcatctgctatttagcgcctcgctaatgccactagcccatatcatcttgcagcaggtgctgcagtgcatggataatatgaatcaaggcagcaccgatcagttaaccgtccaggaggtgtttgtcgcctcttgtgcccttctgacctccagtgcacttttcttccacttctttgagtttgtcaccacacgatttatgctcatccggaacattctcagccactggtggatgtttggcagcacctccgattttgagctggtggagattgaggatgattccatcgattttttcgatgattag

SEQ ID NO: 26082 - protein, 266 aa, DROSOPHILA
MSHHQHVLSEAAALRLINGLESAGNATMPLGAQPPQSAAAEAICSSQIVASAHGTPTASTAALEISSARQRMLRSHLQESLHSANESGNSCRICRWNRNDMEIIKCPCNCKGSVGYIHLKCLKRWIMHRRDNRCEICNAVFNIAEERASLKQMIRTFCCGRCCGLIVKHLLFSASLMPLAHIILQQVLQCMDNMNQGSTDQLTVQEVFVASCALLTSSALFFHFFEFVTTRFMLIRNILSHWWMFGSTSDFELVEIEDDSIDFFDD

SEQ ID NO: 26083 - DNA, 10078 bp, DROSOPHILA
gggatcgctccttcggtagatctgccattatgtgttcatatcaactaggttttgatcgaacactgctgatgcccttattttagggcgttggagtggccgtggcaaaaagttttttgcaattcgataaaaatgtaccagactaataaaactatgaaaaaatattgaagtttctcaaaatgtgggcgggccgccgaccggttcggcggctttccgacgttagagcgggctaggcaaaataataatattataaataataccgacaagctttacataaatgttggcgtggcagctttgggcggttttagggcgttatagtggggcgtggcattattgagagtgctttttttgatgagatagttttggttaagtcagctgaataatccatctttactaaaacaattgtgaagttttgaaaataaatattttagaaaatattgttattccgcatggcaaaacaaactgcctattagttatcttatatcttgtgcgctaagtgccaacactatatgaccaccagagccattttgtgatgctgatttctaaaattgactgaattccccatccggattaaataacaatatttagaccacagtcttttagaaaatgttttggttctctactatacacacttcagaatttatgtgaccgtcatttaagcccgctgtgtagaccatctagacttgaggacttgccactaaaatacgattcttatctaaagcatacaagccgcatttaatttaagacactaataacgatcggattgatggactgtgctcaacaaaatgttttgcgttgttaacacattctgttgaattacacacacacatgacagagaataatatttgatataggaatctgtagattacagtattcaaaagtcaatacttgtgcttgccggaaatcacttccttcatctctgaaaattcaacataaagtttgtaattttttaaaataattccaatttattaatatcaatatcactcaatataatttaaggcatttaataagaatacttgaattccatacgaaacaaatattgaatattgacctgcgcaacatcatatactatatactcgttatataataacgatgactttaaatgttcgtcagtaatggtttctccgtaaggaatttcaaccccatcacttcttatatagctcttagtaggatctggcatggtgcgaccacgaccgaaacaactatgtttattatttgatagtttattaatgtatttcgctgaagtgcattccatcatatcgcccaaagcaacttcagatagaagcattaatccagtagagttttgttgacttgtgcaacaataatttgcggattttgaaaccatatccgcaaaataaatgccttttccgaacatataacctgttggtggcgcttctgggggagcaattcttaaaccatgcgataatataccaacaaaattagttaaacgtgatccgtgccataataattttctgttatgtagcttcttaaatggtttaaagcgccttgcttctccttggcgagatactttaaatacatcaacaatttttaaatcataagatttgtgggtagatgcatgagtgttttttacgtactggctaagaatcgaaaattcttcactatttttgtctaatgccaccaactgagttttaatctgtgcgtaatgattatctaaaggattacaagcatcagatacatcttcgcttttgattatactgtacgcaacctctatctcagctaatgaatcaagcatttgtcgcaaatcttcaatttgttgatgtgtttcaattaatgttggtaattgaactccaaaattatgaggaattaacgtataaaacctatttgttgcatcaataagttttgcagtattggaaccacattctagtacattataaatttccttcactactctgtaagcagattggatttgatgagcactgagcttgcccagcggcattttatccatgtcgatatggaattccatcaatgttttattcattgagtcaatatcaaaaatcagctttattaaattttgcacagaaatctctaatttggaagtaaagaaatggctttcgtgttttaccaacttttggtcatcatcatattgaatttcgattgggtacattcgacctgttcttttaacaaagttatctcgttgctcgtattcatttccagttttatctgcatatatttctttaaaatttctttttgcagactcgctcgtgtcgaactcttcaagttttgagtttccaatatttgttccaattcgaccccatgaacgaaaaatccaatatctgaaaaaaagcaagcgcaaaattattgtaaaaactaaacacgattatttattagtgaaaactataatgaatgcaagtcgactatcccgactagcgaaaatacgaatttcatcatgttcctgggtatcgatagaaattggtaaattaaatacgataaaatttaaaaattgaagtctaaaagttttttgttaaatcgttagaaatttacaggagtaataaaaataagaaaaaatatcaaaacattttgcaaaattgtggacgtggtagttttgcgcggtttatggacgttagagtgggctgacttgcgctgcctctatgtctctggaaactgtatactcaataacaaccctctagcttctgtagttcctgatccacttggctggcctgatcatgattatgtgaatacgttactatatatacatacgttatacatacatatatacgttactatatataaacaagccaacgaactagaaaggttggctcagtgcataaaacataaaatcgatgtgctgacccagcattgtgccggaaacccgtgcgcagccggcaaacatatcatatatttgcgtggccgcgcgagtttttgttagctttaagaatcacttgaagtttcaattgaatttatacttatcagaataatgagcggcagctcgtgaatttctacttcgactaaacgctgtaaaaacatatttttatcatttacttttccagaccacagggctggtagtcaaaagaggaaagttcctcaacataaaaaataatcttttcctgctccccggagcagccggcgaaggaagcccttcacctctggagagaagtctgacggatgacaacatcacaagacggtgcgaaacacctttaatgaattggcgctcaactagtgttaaaaacaacaacaaacagacaatcaacgcaaatgttacatcaaaaatattcttctcaacagaaattatttaaaacaaaaataaattattaatccagcaaattactaaaacacggtctcatatcaatgggaataaaagtaaaatttaataattattttttataacagcgcacacgttcgcttttcagttattattgttgttttatgtttccatttgatttaagtgcgacattcgacgctgcagcctttgtattcatttattgtttgtttgtctttggtcaactgctacccacacagacagcttttgtatacctaagcgaattgaaccagactctcacagtacaggaataataaaccgtacttcaccgatagcgaaaatccagattatcctctaaaacgtgtaaccgcgaatcccccgtaatggcgatagacccagaacagctcagagctgtaatacaggtaattgtgaacaacaacttagcggaagaggccgccaataaccaactcgcacaaaattaaatgcctcagacaattcaggaactggtcagccagttagcagcaacacatgtcgcgcccacctcagccgtggcccccataattagagcctacgaacccatagatataaataataattttccatgtagcgtgactaaagacgccgttaacaggaatcatacttttcttggcagcatatcgcatatttaaacatttcaacggcacctctcgcttttacgaagcggtgataaagttttattctcgtttggcaccgtactgaatttcgatgctattataaattggctcgatttcgctcacagtgacaagcgaccaatgcatgtcattgaacaagacattaacattttaagacagggaaatgagtattatgatgaattcaaaacaaacccaacttactcacaaacaagagtcatttgtctcacgagccgtcgacggaaaaaacattgtgcgaaaaattccaagatggatgcaacctcactgacgtgcttttcgcggcaaagccgaaagaaatgcagtcgggcgtggctttaacgtaagaaatggtacgtttatgcagccagttttgcaaaaagtcagagagacaaagattgcaaacctactgcaaaaacacagggtcgtcaagttgacaagtacgaccccatgtccaaataatgccaaaaatccgtatttccgcatagggctcaggcttacggcgacccgcacaatacgaaaaattacaaaaacagcggcacaccagagcctatggaggtcgatccttcattttctaagttgctgcagccgtcccaggcagctgcctaccggaacagaagacaaaccacctccgagcgcacaagcgccgtgaggaaacaacagaaaatcattacgcaaaatgcggaagaaaagacaggggcatatgccgcctccaaagcggaatctaaaatatgcgacgatgccatgccgagtatgattctgactacgtaaattttttagtggaaaatcccatcatcagacaaagagtagcagggataccactaaatttccttttagacaacggcgcgtcaaaaaatttcatccgacctcgcatatagctaaagggtatccgcccggtgatgttacctttcgaaatttaatcaattcatggtgccaccactgtgacaaaaaatgcttcgtctcgatctttaatttgaaagcgaaatttttcattgctttcccaagagaaccgttatattataatgatctccaggacgtaaaagaatagggaaatgaactacgccacaaatgaaccctaatgcgaaaattaagaggtggaagggacgcatcgaggaaactggtgcgaaggtagtctataaaccgggggaaaaaaatttggttgctgaagcaaaaaaaaaaagtgaatactgtttctccgataatttttgatttagcgttgtccttagtcaactggatgggttttcatccttaagaaggacaatgttatcaacaactagaccaggcttggcactgtgaccgcttctgcagtaaggtaaaatattttttccctcaagggaccaaaaaatttgctgccagcattcgaaagattgaagtttaaattcgtcgcagcaggtccaagttacaagttacacaagttacacaccagtggtcttaaacaaatgccatagtcgaatttccgaaaccagagaacatctccgaagtccgcaaatttctagaccttaacggctatttttgaaaatttgtccctagctattcgcggacgcggggttgaacttcatacagtcgctagttcgatcggcctctctagtgtcttgctgtagcgagataacgacaagctgttaccaatcgcatacttcagccggttaacaacagagctcgagaagaaaatgcacatctacgaactacgaactattgagtttctacttgattgctctttcaattttgaatcgtcaagatcgtaagtgtattcttagaaatttatcgacggctttcaggtttgtattttgcaagtaacattactaataatattcataaatattaaatttttatttaagtgtgcttttttattttccatttcgtttcattttccattatattttcctttccttcattatttttgttcaacagcattaaacaggtatatattatcatctttttatttaattatttcaattatattaagattgaaagtaactccgttggttacgcagaattgcatatacacaaacagttcaaatgtgcgcagccaataactgccgctaattattctttgcgctcatgttcccgctttaacagaaactcgagtcgctatttctgccgtttcgttgttgatactcttgctatgggaagctgacaattctggaaacgttaccgcagataatacaaggtggtatttttgaagcgcaaagcggctgtaatttataatcgagcggattctttgtaaagctctgagttaatttcgtttattgagttcgttattcaagtgaattttgagctgatcgatgggcttcaacaaacatttagaaaaattgtcaacgagctcgaagcacttgattttgaggaaatcgaaagtaacttggctgagaagtttgatgtcattctcgtaacgcttacatcctggattcgcgtgtggtctgaaagcgcgactcacaaatgcactcccactcaactatcgtggccaccaacagcgttcactaaagaatagggcaccctcttaagctaccctcttaagcatagccgttggaggctatgctaacttggttaacatgggcttacccaccagcacagtgccgcaataccaaatgcttcagggtagccaggtacagggaaagggtgccagtggcggaccagaaagctgtggactggatgaaatatcacaagaccacggaacatgcttctgaggaccacgccagaagaacaggatgcccggcaagacgacccagaagcaggagcaatcgcaacaacaaggaagagcttacggtagcgttccatcttcaggattgccacaagaagggcccagaggaattatttaaccaccttacgccatgcaaccttcacagggtgggaatcaacaaatgggccaagggccatttaacagcatgatgttcaaaaagcttccgccgatcccgggacaggcaatgcagcaacagtgcttgcagcagcaggctcccccgcatcaacaaccacatcgccaaagagatctatatgcaccagatgccgcccaactaaattgccaccggtggatacgtatctcgtggggaaggatctgatcatttcgcatgacagcgtggaatccactacgcgtgtattttaccgaagaaagctgcctacaaaggcgcacgtatgcccggtgaatccactgcgcctctttatggccctgcgatctggtctgccgacttggtaatattgttagatcctgttctttggcaggtcaatcctgttggctttgttgctggaccactttctcgccgagatgttcgacaaaggaaacaagagagaatgctatagtcgagtttccctactatcagatacccgttactcagctagtgtgaaagcgaacgcgaaaattcatcatttttctcggatatagatagatattgtggaataaaatgagcaaaaattaaaaattgttcaaaagtgagggcgtgaccggttcggcggatttagggcgttatagtcggcgtggcaacatggatcaacaaacttgtactgcgtctttgtctctagaatctgtatgcagaatctcaactttctagctctcatagttcctgagattttttctaattttattagtcgtttaaatttctatctattcgacaaacaactttttgccacgcccactcttgatataaagccgccaaacatttcacacccacagtttggaacaattttgttcattttattccccaatatctatcgatatcccagaaaaattatacattttgcgttcgcattaccactagctgagtaacgggtattcgatagtcggggagctcgactatagcaatatctcttgttttgtatgttctctatctatgcgaaaacataaaaaacctgaaaacgcatatccaattgctgtctatgcttttcagacaaacttgttttacagcaaataaaaaaaccatcccaaaatatatttttattcgcggtttgtctgattttttgaaatcgagtctatcgactttgattaaagataaatgttgtaatgaaataagtaaatttaagatgtttcattttctgagtataaattattttttcgtcacaaaagttgataatacctttgtttcttaatggtgcgccactaattttaacatcgttaagaggcgtttgataattgaaccttgcaaaactactaaaaactgatctctaccggacagctaatttcggtctggatagcggacaaatcattaaaataatttatgatcttgacctctcctggaatgatggtcctgtctgcatattgtataaatacctgggcagaaagttctgccaccgctgtcaaatattaatgctgccgcttccactttaagcacaaactcctttaaaaaaggtaccacaattcaaaaaattctgattctttttaattttattatttgtgtgaccaatttttattgatatgccaaaaacgtgttggttatgcataaaccgtcgaactggtacctcctcacttttactgaatgttttcaaggaaatactatacagatcttaaattgtttcatttgtatttacaaaatgtattactttttaaatgtggaaaataaaaccctctgaaatctcaacttctttgtggacaaacgcacaatttacactagtgtttttgaaaaagtgtacgagttaaaatacttacttctcctttttatccgcttttaaaagctgaactttgtagtaggagttcttatttctctgaatgtcagttaagccaagaacaacactgtatttattgttactgtccacgtaaacatgggcgatgtcctcgagcccactgtccggatcaacagctaggccatcttttactttaaatgtccgtgatactggcatggattttgtatatatactgttcgaatttaaactttttgttgtttcctttggaattctggattttggatctgttccccaactacaaatacatgtgctatttatatatttaatagctccttctgtatcggcttcaacaaaatctaaaaattcaatgggcacaatatgaattccgagctcttctgcaaacttcatacgggtggattttttttgtatttctaattctgttgatattattgctatcgtgttttccgatattttaacttcaaatttaccgcccaaattttctattcgctttcttagctctttatgctggttctttaagcctataattgaaaactttaaattgtataatggcggacttatacgaggtattgttggcctgaaataaaaaggtagaaaaataactattaaataaaaaacaagactttaaataatggagtgcacttaataatgaccgtgggcgatacaaaaacgaatgttttgtcttaagtttttatgtaacaaagcccaaaggcccttttccccttgtaggcgttccgaaaaactaaagagttccaataccgcagcatttttattcatgttagagtaaaagggtatactagattcgttgataagtatgtaacaaacaggcaggagttgccgaccatataatgtgcgggtgtggcagcataatttccttttttttcggaactcaatgaaaactattgtagtcatcggaaaatatttatttatttttataatgtagttacatgtctaaaggtttaatatatatttttttgaagattaaatctgataggtgacgtcccccattctccatacattgcgtaaaccgatttctgaattttgtcctgactcttgttagcatagcaggtgttatgttggccatttcttcttggatgttgattttcaaatcttgcagggttcttggacggttcacatgaacacgagatttcaaaaaaccccatagaaaatggtcttcatcactacaaaaaaaaaaacaatagcaccctcgggaatgacatcaagaagaatctcacacgtgtttatgacagaacgatcggatagtcaaagggaagctgcgtgtttgcgcgcagaacaccgtggagatcgcaatattgacgctcccactgcgtcaatgttctcaggtgatctaacgggtcgagggagtccagttcttcgttttgtcgcacttgcagtttgcctgaatgcagtgacctatgtaacaaatgatttgcggtctgggacgggagccaacagggctaaattaatgcgattccaaaatgcaggctgtgtgtaataaacgaacatcctcttcaaaagtaggcctcaacggcaaaggaaccctcctcaccctccctccatacaacgcatgatggcgaca

SEQ ID NO: 26084 - DNA, 1863 bp, DROSOPHILA
aggccaacaatacctcgtataagtccgccattatacaatttaaagttttcaattataggcttaaagaaccagcataaagagctaagaaagcgaatagaaaatttgggcggtaaatttgaagttaaaatatcggaaaacacgatagcaataatatcaacagaattagaaatacaaaaaaaatccacccgtatgaagtttgcagaagagctcggaattcatattgtgcccattgaatttttagattttgttgaagccgatacagaaggagctattaaatatataaatagcacatgtatttgtagttggggaacagatccaaaatccagaattccaaaggaaacaacaaaaagtttaaattcgaacagtatatatacaaaatccatgccagtatcacggacatttaaagtaaaagatggcctagctgttgatccggacagtgggctcgaggacatcgcccatgtttacgtggacagtaacaataaatacagtgttgttcttggcttaactgacattcagagaaataagaactcctactacaaagttcagcttttaaaagcggataaaaaggagaaatattggatttttcgttcatggggtcgaattggaacaaatattggaaactcaaaacttgaagagttcgacacgagcgagtctgcaaaaagaaattttaaagaaatatatgcagataaaactggaaatgaatacgagcaacgagataactttgttaaaagaacaggtcgaatgtacccaatcgaaattcaatatgatgatgaccaaaagttggtaaaacacgaaagccatttctttacttccaaattagagatttctgtgcaaaatttaataaagctgatttttgatattgactcaatgaataaaacattgatggaattccatatcgacatggataaaatgccgctgggcaagctcagtgctcatcaaatccaatctgcttacagagtagtgaaggaaatttataatgtactagaatgtggttccaatactgcaaaacttattgatgcaacaaataggttttatacgttaattcctcataattttggagttcaattaccaacattaattgaaacacatcaacaaattgaagatttgcgacaaatgcttgattcattagctgagatagaggttgcgtacagtataatcaaaagcgaagatgtatctgatgcttgtaatcctttagataatcattacgcacagattaaaactcagttggtggcattagacaaaaatagtgaagaattttcgattcttagccagtacgtaaaaaacactcatgcatctacccacaaatcttatgatttaaaaattgttgatgtatttaaagtatctcgccaaggagaagcaaggcgctttaaaccatttaagaagctacataacagaaaattattatggcacggatcacgtttaactaattttgttggtatattatcgcatggtttaagaattgctcccccagaagcgccaccaacaggttatatgttcggaaaaggcatttattttgcggatatggtttcaaaatccgcaaattattgttgcacaagtcaacaaaactctactggattaatgcttctatctgaagttgctttgggcgatatgatggaatgcacttcagcgaaatacattaataaactatcaaataataaacatagttgtttcggtcgtggtcgcaccatgccagatcctactaagagctatataagaagtgatggggttgaaattccttacggagaaaccattactgacgaacatttaaagtcatcgttattatataacgagtatatagtatatgatgttgcgcaggtcaatattcaatatttgtttcgtatggaattcaagtattcttattaa

SEQ ID NO: 26085 - protein, 557 aa, DROSOPHILA
MKFAEELGIHIVPIEFLDFVEADTEGAIKYINSTCICSWGTDPKSRIPKETTKSLNSNSIYTKSMPVSRTFKVKDGLAVDPDSGLEDIAHVYVDSNNKYSVVLGLTDIQRNKNSYYKVQLLKADKKEKYWIFRSWGRIGTNIGNSKLEEFDTSESAKRNFKEIYADKTGNEYEQRDNFVKRTGRMYPIEIQYDDDQKLVKHESHFFTSKLEISVQNLIKLIFDIDSMNKTLMEFHIDMDKMPLGKLSAHQIQSAYRVVKEIYNVLECGSNTAKLIDATNRFYTLIPHNFGVQLPTLIETHQQIEDLRQMLDSLAEIEVAYSIIKSEDVSDACNPLDNHYAQIKTQLVALDKNSEEFSILSQYVKNTHASTHKSYDLKIVDVFKVSRQGEARRFKPFKKLHNRKLLWHGSRLTNFVGILSHGLRIAPPEAPPTGYMFGKGIYFADMVSKSANYCCTSQQNSTGLMLLSEVALGDMMECTSAKYINKLSNNKHSCFGRGRTMPDPTKSYIRSDGVEIPYGETITDEHLKSSLLYNEYIVYDVAQVNIQYLFRMEFKYSY

SEQ ID NO: 26086 - DNA, 2323 bp, DROSOPHILA
acgattaacatttttttcatttaacgattaatttttcttcattaaccatttaattttccgcaggtgaccactataattaactcacctcctaaaagtatgctataattttgaagaacatttttctacttattctttaactaagtcctcacatgattagtgagaggtttggttttatcttttatatgttaattgcgctgttatgttactgttattgcattgtattgattcatcgcttctaaataaataaataaataaaaaaaaaaacttattctttaatgtgtaaaatattaatgcataccacattatcgtcataactatgattattaaatatatatacttctgttagtgttgctgactaacaaacttttctgtttttttttttaatatttaacaggaaacatccgccaccctattgttgattagaaatccagccatatcaatcattcacaatcttacacgtagtctttcgaatgagtaactttttcccgaaaatatattagtaataaaatataaaatatattaattaatatgatagctgaggtggaaaattaccaatatacattttttgttagataaagtataaactaaaactttgaagattgtgcaaggttttattttttatgaatgggactgtcatattataacttttttgccatatttgtacagccttgagttactcatatcgatcagacttaaggcaaagatattatattgataaaatgaattgtagaagaatcagctaaatgtgatatgggtaatattatttcaatcatcgtatgcttgtcaaacgaaaataaaaaatagttaagtacaatttgcaatgcgatacagcctaatcacattcagataagcatgttgtgaaagaatgctggttgcgttcagtttaaatgcatacgtgtttggtttattataaaattacaataaatacagaattacaacaattatccaacttaagcatcgttagatgatcaagggaatgggtcttgcactaggatagcacttattcgtactggggagcgtacttcttgtagacctcgatgtagtaggccttggcatcatcggcggtcagaccggccttgctcttccaggcgttgtagcgggccttcttctcctcatcttccggctcctcgatgttgcagtcgccgacggtggcctgcttgtagtagccgtagaactcgaggaactcctccttgctaggcaggttcttgaagttcttggccttctcgacgatctcctcaaactgtaagttggcccaagaaatggttggttacacaaacgatttatcggatgattatttggcggggtaagacttacggtgggcatgttggttagttggctagttggcttcgacaaacaaaaacaatctgtgtgcggatttgggggtgaacaccgtttatatattggcaaacatggctcacacctttcgctaatcttatcaggcccccactgcaattgtagttcccacttgggcttatcataaaaatgcgggaaatcatggaaagtgagagtacctctttggagcagtgaaatatataattagtcagacggcagcttatcagttgtgctcttgcacttgcaaacaaaaaaaaagtgaagtgagccatatgcagaaagctatatacccactatctaattgattgattgggccgagccccaacaacaaatctaaatacagaaatctggatagccaaatggccaatactttaattaatggctagcctatattttccatagtcatggactctgatttacacataattcacgtgagtcaggtgctattatttgttatcatggtgaattcgcacgatctgttactaagaatagttcttcggacttttgtggtaggtagatagtagtatctactcgcaaggttccccaaaaaatattaattaaaccattttagcggcattatggataccaagttggccaattcacctgttcgtattcaaactaattaaatttctcaatatcaattgaaatggcctatataagagcacgattggtagagtggactaacttagtatcttttacaaacttatgacaaaatggtcagttttgaggaagccgccgaactcgccaagaacttctccaagaagcccaccgactccgagttcctggagttctacggtctcttcaagcaggctaccgttggtgatgtgaacatcgacaagcccggcattctggatctcaagaagaaggccatgtacgaggcctggaacgcccacaagggtctctccaaggatgccgccaaggaggcctacgtgaaggtgtacgagaagtatgcccccaagtacgcctaaggccagactattctccagactgt

SEQ ID NO: 26087 - DNA, 249 bp, DROSOPHILA
atgcccacctttgaggagatcgtcgagaaggccaagaacttcaagaacctgcctagcaaggaggagttcctcgagttctacggctactacaagcaggccaccgtcggcgactgcaacatcgaggagccggaagatgaggagaagaaggcccgctacaacgcctggaagagcaaggccggtctgaccgccgatgatgccaaggcctactacatcgaggtctacaagaagtacgctccccagtacgaataa

SEQ ID NO: 26088 - protein, 82 aa, DROSOPHILA
MPTFEEIVEKAKNFKNLPSKEEFLEFYGYYKQATVGDCNIEEPEDEEKKARYNAWKSKAGLTADDAKAYYIEVYKKYAPQYE

SEQ ID NO: 26089 - DNA, 2814 bp, DROSOPHILA
acaatgataatgagaaggcgaaggacgcagaagatgcgactcagaatgagaagaatcaggaggaacaagtacaagtacaaacagaggaggtggagcactgtcaagagcagctccataacatgtccatcatctcgaagggagtaagtgcccgtgtccccaagcgtacgaagcgcaactccaagtcctggttctgtgaccagtgcggcggcgtcttcaagtcctctacctacctcaaactgcacctgcagcgacacagcggtcacaaaccgttcgcgtgcgacatctgccaggccaagtactacacggataacgagatgcggcgccacagaatccttcacacggacgccagaccgtacgcttgtcggttctgtagcaagacctaccgaggatgcagcagtaaagtggtccacgagcggacccacaccaacgagcgtccctttcagtgccagcattgcgacaaggccttcacctccacgtcgacgcgtcaaaaacatgagatgctgcacactaatcagcggaagtaccagtaagtaggagcactagctgtcctccgtaaaatatgtgcaaactgactgtattttccagctgcgagatctgtgaccagtggttcctgcgctcatcccatttgaccctacatcaaagcactaaattacaccagcgaagagctgaaagtgctaggattgtctagaattcatgtggactgctgaaagtacaagtttattataagattcctaaattgaacaaattgattctatttttgatttgatggttctaaaagaagaaataatcaaaatgtacacctgtgacatcaaaggttttcgacttttcgctctgcagatacaatggtttatttcttgaaaaaaacttgtaacaacaaattgagattttgaaaatcggcggaatggccgcgttgctgggcgaatgtcaattcgaaatcgactatgcgtggggctgagaaatgcgaatgccgcttttcttgttcttccgtccaaacaaaccgaaaaagatacacttccaatcgatcggggtgctgcgttatctcattacacaagccatgaggtacatttgcaggacctgttctcgtatggctgatcctgcggtagccaagaatctcttcgatccatcgagttcttccgttttgcgtcaaatagagactctaactaacttgcaggtgagtgcgttagcgttttgcgaaaataaaaaccgaataaatgccgcgatctgtaatcactttgcagctaaaagaggacggcaagttgcccaggttcatgtgccaggactgccagcacgacctgcagattgccatcgatttccgccgcgtttgcatcgaggcccaggagctccttgaacttcagctaaggcaggtggaaaaggaggaggaggcgttcgagagcctggcggagcaatggctggatgattgtccggatgagttgtccaacttgtcgccagtgctacagctgaatgatcgcatggattttatcttcgatcccgagccacaggataagaatacggatgagttggcttccataaagaccacgacaacaacagagtatatgaatgcataccagtcagtggccagtccgcaatcttctccagaactttcaacagatagccagttgtcgaatgagcactttgacatgggcctctctcccgaatcagaacccgaaagtgaagctatcgataatcgggacacttcctccagccacacgtgcagcaagtgtggcctcgaattcgaaaacgtggacgaactgaagctgcacaaataccatctgcacgacatcccgccagataccaagtaaataatcatattttagaggcatgcttgcatgattttcccatattattcgttcgaaacttgtagaaatcctaaaagatctgaagacgttccgtcagggcacaaaatatgtttagtttacattgctaaattggctattagctagctctcacattcattccgtattaattgtcttttgttttaatttttatttaattttagaacgattttccattttatacgtgctgctctgattggaattaaggaatcctttaaaccctatcactgaatgactagaacaacttattcacagtatgagagaacctaccaatcaattgccacaattaacactttaattatccttgtagattcgtctgtgaccactgtgacgagggcttccgatcagcagccgcacttacgcggcactgcaacatgattaatcttccattgacggtaatgattccatctaaaatgttcaatacctttcataaaggattgtattttgaaacattttttttgcagcactcctgcaccaagtgcaagagccaattccacaatcacattctgctggagactcacaaacagcggtgtctcaggccgccggcgtcccagcatgtgtgccacatatgtggcaagcatctgaccacggcctttaatctgaagaatcacctggttcgccacgcgggcacacgacgccacaaatgcgaccagtgcagcgcatccttttatacagccgccgaactctgttcccatcagaaaacccacacaaccgagcgtccctacatctgtcgctacaactgtggcaaaacctttcgcttttgcagcgcccgcagcatgcatgaaaggtagaatttcagacgaatctccaccgtcacttagcccaccatccccacttacgtgacccttccaatatattccgcagggttcacatggacgccagcaagcgtatctaccagtgcgagtactgccccaagtcgtatgtaacacccagcgagtgcaggacacatcaaaagtatcacaacttgactcgcgatcacggg

SEQ ID NO: 26090 - DNA, 747 bp, DROSOPHILA
aaaaagatacacttccaatcgatcggggtgctgcgttatctcattacacaagccatgaggtacatttgcaggacctgttctcgtatggctgatcctgcggtagccaagaatctcttcgatccatcgagttcttccgttttgcgtcaaatagagactctaactaacttgcagctaaaagaggacggcaagttgcccaggttcatgtgccaggactgccagcacgacctgcagattgccatcgatttccgccgcgtttgcatcgaggcccaggagctccttgaacttcagctaaggcaggtggaaaaggaggaggaggcgttcgagagcctggcggagcaatggctggatgattgtccggatgagttgtccaacttgtcgccagtgctacagctgaatgatcgcatggattttatcttcgatcccgagccacaggataagaatacggatgagttggcttccataaagaccacgacaacaacagagtatatgaatgcataccagtcagtggccagtccgcaatcttctccagaactttcaacagatagccagttgtcgaatgagcactttgacatgggcctctctcccgaatcagaacccgaaagtgaagctatcgataatcgggacacttcctccagccacacgtgcagcaagtgtggcctcgaattcgaaaacgtggacgaactgaagctgcacaaataccatctgcacgacatcccgccagataccaagtaaataatcatattttag

SEQ ID NO: 26091 - protein, 225 aa, DROSOPHILA
MRYICRTCSRMADPAVAKNLFDPSSSSVLRQIETLTNLQLKEDGKLPRFMCQDCQHDLQIAIDFRRVCIEAQELLELQLRQVEKEEEAFESLAEQWLDDCPDELSNLSPVLQLNDRMDFIFDPEPQDKNTDELASIKTTTTTEYMNAYQSVASPQSSPELSTDSQLSNEHFDMGLSPESEPESEAIDNRDTSSSHTCSKCGLEFENVDELKLHKYHLHDIPPDTK

SEQ ID NO: 26092 - DNA, 2684 bp, DROSOPHILA
cgtggggctcaggatgccgttaccggatggtggactactgggcgacatgggtgtggtgggtgctgcacgaaaagatcgatgctgagtcagttggtcgctaaatcgaggactcgtaaatagttcacctgaatggtttcttagtggcaggctgctgggggcgccaaaggggccgccgacaccaactccaacgttgccgccaccacctcctccgccggcgatgctgtggctgctggcgcttccaaggatcccgctgccgccttcggtgcccgtgtgcaccgctccgcagctgtcgttcagcgagggcgcatccttcagcatttcgtgaatgctgcgctcgcggtccgtcatagctatggccgtcgttaagttaaccgcccgtctcaccgagtaattgccagcggaaaatcctcctgtctgcccgttttgtgtgggggtgtgcccgattaggtgtctgtgtgtgtgtttctcgggcaacggcgctggaggtttcacttcgatttccacgccgaaatcgatggcgcacgctgggcgagtcgagactttagtaacccctgcctggactcgtcaaaattctcaaatccctaaaattccgcataaagttcatcaaactgtgttcacgaactgaaaatcggtgtgactgtgcgcgagtaggtggttaaatgccacacttggactgcttggataccggctgtgcgacacggtattttaaaggcggaacggtggagtttggaacacggggaagtcctgtcctgcaggtcaagtcggtgggacgtggtttggcgggacagtgactgctgcgaggactctcctctgcggcaccagcattaatttttaattcattttcatatatattcttgatcatgatcaataggccagttgatgtggccaagcaattctatttggattttcagtgccgaccagttgcggtcccactaaagtggaaatttgatttaatttttggggatttcatggaaaatctctacttatttctatttccacgttacttaggccaatagccagcggaaaatggtctacgtgaatctaataataggcttgggcctggtgtccgttgccgctttcgcctatttcaattggcataacgaccgcagttcgccttactccaggtgggtgctattaaatgagcgtcgaatcgtgggcaggttggtgccttgcgattcaaagctaaaatgttggcttaaatcccttgtttcattgcaggtcgccgaatggcaggtgcaccttttgccagtatgaactgagtgatgacgaccggcgccgcatgaggtgtggacatgccatgcacaatctctgctacttggtgtttcgctattcccatagaaagtgcctcgagtgcgataaggtggttaatgtcaatatagccggtgacttgtgcacgatttgtttagatcccctaagtgtttacaccatggtgtatctgcgctgcagccacgccttgcatgagaagtgcctccaccagtaccaggctaatggtggccgccactgtccggtctgcagaatgggaattaaggagtaggtatcacctagtgatcatgcagccaggcaaagccatatatcagcataagcgtgcacttaatgcaaggctcaacgaattttatatataacattaagtcgagagcaaagaagtctgattaagattttagttctgaaacgaataaaagttagatttcttaaaagatgccgatttcaaccaaattgttgtttaaaatgaaagaaaagtattggatgcgtctatgctttttcaaaaaaaaaaaaaataatacaattttatatttttgttttgaattgttcaaatatcgtttagccagtgtgtacacaccacgcacatgcacttagtaaacagacaacagctgatgtgcatcttcattatctcgcttgccattcacttgaatgtaatgcatcacaataatgttgagttttaaaaaacctttttaaatatcgtttggtttgctcaaaatgtctgagttgcgatcgatttgccgaacttgtggcaaaaatgtgaccaatttgcagggtcgggctaccaaactgttcaacaaaagcaactatcactttattagtatactggaaaatatcaccgatatgtatgtatgtaagtgaataaaactaaagtatgctgtctatttaattgatttaaatgattgtttagctcgaatttgacaccactctgccacatctaatttgccaatgttgcaaagtgcagctggacaggatcttaacatttcgcaataagtgcttggaggtccacaagtcttttatggccgctaacaggaaacttttgcgaaaaaaggcgatagttgatgaggaactcgataaaccggatgttgagaagctacagcaggatttgtgggaccacacggatcaggaaatgtgtgtagcaatggcagatacagctgggcttctgcgggaagatcacaatgataatgagaaggcgaaggacgcagaagatgcgactcagaatgagaagaatcaggaggaacaagtacaagtacaaacagaggaggtggagcactgtcaagagcagctccataacatgtccatcatctcgaagggagtaagtgcccgtgtccccaagcgtacgaagcgcaactccaagtcctggttctgtgaccagtgcggcggcgtcttcaagtcctctacctacctcaaactgcacctgcagcgac

SEQ ID NO: 26093 - DNA, 590 bp, DROSOPHILA
ttacttaggccaatagccagcggaaaatggtctacgtgaatctaataataggcttgggcctggtgtccgttgccgctttcgcctatttcaattggcataacgaccgcagttcgccttactccaggtcgccgaatggcaggtgcaccttttgccagtatgaactgagtgatgacgaccggcgccgcatgaggtgtggacatgccatgcacaatctctgctacttggtgtttcgctattcccatagaaagtgcctcgagtgcgataaggtggttaatgtcaatatagccggtgacttgtgcacgatttgtttagatcccctaagtgtttacaccatggtgtatctgcgctgcagccacgccttgcatgagaagtgcctccaccagtaccaggctaatggtggccgccactgtccggtctgcagaatgggaattaaggagtaggtatcacctagtgatcatgcagccaggcaaagccatatatcagcataagcgtgcacttaatgcaaggctcaacgaattttatatataacattaagtcgagagcaaagaagtctgattaagattttagttctgaaacgaataaaagttaga

SEQ ID NO: 26094 - protein, 137 aa, DROSOPHILA
MVYVNLIIGLGLVSVAAFAYFNWHNDRSSPYSRSPNGRCTFCQYELSDDDRRRMRCGHAMHNLCYLVFRYSHRKCLECDKVVNVNIAGDLCTICLDPLSVYTMVYLRCSHALHEKCLHQYQANGGRHCPVCRMGIKE

SEQ ID NO: 26095 - DNA, 11658 bp, DROSOPHILA
atgtggagctcgtactaactcccttccattcacagtgactaatttactaaatttggtttcttttatttacactttattcactttattttctcttcaagttccaattgcctgttatcacgtagggaacatttacccattcgcctaatcttatcactcactacttcacgcacacggggaattcagcaaaggtaaaataggtaaaagtcttattgactttttgacgaaaaatggaaataagtcttgagttaaactaaatgctgaaacgtgctcaatataattccgctgatttctgaattgattatgggggtagtcactttggaattaccgattttatgatggctttgtttctttgtacacctgtttcctcggccggtaaacgcgctactaacgaaatccccaatgatcgtggtcagtgatgccgctttagccatgaatattatcttcaaaaaagattttaaagttggatgtttctactaacaactcacttttgccctgaaaatatatatattctttttttttgccaaaatattttattttttagataatttccttataaaggcacgacatcactagtaagtcatttacctttcccatccaatacacaaaccaactttgagcttgagtgccatcgagctttttgttggttaaaaggggttaaacgcagttgttggtagttttgcgttaaacaaagagtttaagctacattatattgaaatgtaacgcctaaaaaaatagatttattgtaaagtagcccttcacaaaaatatttcgtattaaaagtgacaaaatgtatcaaaagcctgccagttttttatttcaattacattactggctcctattttggtttctactacatttactagttttcaaacttatttttgaaagaccgcttgtaacggtcgatagtcattattgttaacccgatagagctgcacaaatattatcgatatattattggtattttccaactgcccggatggattttcgatgactgtggctgcagtcacactgagtcgggaaaataattatttattaaaaattcgtggacccgcgctgtacatctgtgtctgtgctgttcgctccgctccaagtgcggcaaaaagcaaccaagaaggcaggcagcccaatcggtaatttacggcggagtagtgaggcgatatacggaaatcgcgaccagtgcacgtgcaattgtgaatcgttctcgattttcccgacccgcaccctttcttctctttcgaccattgtgactgtgcacaattaacttgcatacatacgtgtatgtatgtacacactctgtttgtatgtatgcgtgccacccccaattgaggcggaaaaaggagaagcaaaggaatttctgcaaaatccaagatgcccatgctattttcactattttattttgccaacttttcagtcgacactttgctcttgcagcaacaaagccaacaacggcgaaaattggaagttattttcttttctttctccactctttttatcgcaaaacaacagcaacactgcccgtgcaccgctctccccgctcccacttgcgtccttgttaatacagtgaatatcggctagccacaaacaggggaaatacaaagaatcttaatttgcatttgtatggttgataaaaagtcaacttatcaacttatctaaatcgtcaaaccaaagtgacttatacatttgtaaacatttttaagcgttttccctgttttaattgcgaaaatagtaaagatatcgtgttttatttttatcaacagtgcagcgaaagttttataaagtatacatatattcagtcaaataattattaaagtcctatactctccgtatacactggatttggttttttattaattttcaattatgtgtattttgaatttagcctcttcaattggagcttaggaaccttaacaaccaaagaaccgatttccagacttaaagctaaggtaagttaaatacacctattattcttagcctcattatcaatttttaatgaaacttcaaaaaatagattgtaagagtgttatatctcttttcttagttaaacataatctcggaaatgatatccattatcttacgtaggggatttgcctgcaggagacctgcatcagcatgtctgttattgttgcacgtgggtcaccgaactgggcgggtgtgggcgtggtcaggtagtagctgagcatatctgcatttcaacaatcgatcttaatctgcgcttgcttttgagttcctttcgtctaggacttgttatacttgatttatggccccttcccgcgatttcccatcctcgaaaaccggttgttttgacttaatcatcggttctcgctggttatttgatatgaaattctttctgactcacagcagttgtttaaattctggcgtggaaatcccgatctttttccttatcaagccaaataaatatgaaggctaatttgctatgtttgaattattttatttaaattacttttgaaaaacaaataggcagtacagctattaaatagcaggtttttatttgttaaagcgtaatatctttcagattttatagattctaaatcttcccatataggtttatttttcctcattaagtcttgcaaattatgttcgattttctttctgtatcggttctgagatattgtatgttgcagcgattttcactgttgcataaaactcttgtattccgggcctaattaaatcactttaaatgcctgctcggtgtggctgaaataattcgatttaaaggtcaggcactcacccaagtgactttccaactctttttgttctcggctcccagtcagtcatcagcgaaaattgagtgagatcgaggaggaggggaaaatcaatatgtgctaatataattttgtggcaaacaaattaaagcacacagaacagctcgtcgtcgctgctctgatttgtttagctatacgaatatgtaccatatttattcagttgatttggttcagtttcagtggtgaatatttgagcagcagcatttaatatttgatactggccaatttgatttgtgggtaagcacattgactaccgcccaaaactgaaatgcagccgaaaatggggccaaaagtgggttatgtttgctccgaccaccatgcaagctggctttgatttacgactgcaactaaagtaggttaacctaggtccagataactactacattctgcttctccaacgataccatattctaatctcaaagttgcctgagctgctggctttccaagagtagaatcatgtacatgtgaccttgacacggttttcacttgctatgcaggaaaaagggtttcccgcatccaccgtaccgtatccattgaaatttgattttgttatttgtttatcgacgccacttcatgcaaattggagaaattcaggtggatatatttttagctgacacatccatgcaatgtttgcaaatgcatatatagtattcacctttctgccagcctgatgaaattcttttgtatatttttcactctgttctccgttctcgtggaactcaaccaggttggaccacccaacgcccagctccgtctcttactttgcctttctctgcgccgccctttttccagagcacctccgtccgccttccgttcccggaggtcgggaaaaagaaccgggttaatcgtcgccacgttgtcgccgtggagaacaaatgactcttttcgtttgtgggtcaactgcaatttttgccattaatataattaattgattgccattttggttttaaatgtcgtaactttatgtgagtgaaacgcacctattaaatgggaatactcacataataaaattcaaaagcgttcacatcgcaaaatctataagaatgctaaaattgttttcagtgctgcacttcacacttacgtagcaaaaagatttacccaatcttaaaattactttaattcctgcttaataaatctttctacaaattgccgatcaataaatcaacagtgcgtctaatttggcttatcgaaatgcccactttcgagtactttgtacaacattctgtgcataagcgatcgatttgcgcttatcacccgaatttgttcttatcgctgggccaaattaaactatgctggccgcccagccgtctttgtttcaaagcaaccatagccaaactggcttagtaacccacataaacaccaccgaatccgagtcccagttgtccgggggcaattgggcggagaatacccgttcagtgcaactggagctggagaggccaattaaagcacctgacctagaatatttgtagcccagtttcgcccgccgagagtgaatatgttttacatgccaccgcactcacatttggatgctcagatccaaccaactcgtactttgaatcagtcaactgcgagctgcatgttaaatggtttgaattaattgcgtaggccacgcatgtcacgtgcgcctcacataggactatatctaactatatgtgcatatagtatgatatattccacccccctttccacccacaagtccttgagcaaagccaagccggaaatttaaagtaaacattccagatatccctgtttgtatatcgaagtttaatgttgttgtagagcacagcacgtactcacggagccaaggccaaaatgcaaggccttaatgtcgggttacgtttaatttcaattgcattaaaagagacttacttaaggtagctaaaaacaatgattgtcgttaaatgaaattgacgacgagacagcaagctctaagtatgtgttataaattacttgatattatgtccgtttttcatgacacctagttatgaaaaacatctcaataatctgagtgaggattagaaataaaatatataaactactactgtagtagaactccacaaacttcaccatatcattaggttttcaaccaagtgctttaaaacaaacgtacaagccacgttttaagttttaaacgttttcttgatggcctgtggcaacacacgccgccgccgtagatggccaaatatttggtcagccaacagccgcgaaagagactccgatatttcatcaatggcttgtccacagtctggtggtattcggctttgggaacctgtccgtccgtccgtctgtcccatttatgcggagcacgttcgcctatcgcgggctgcctggctgggattaagagctctccggggcgatggtagctatcgcatcgttggttattggctggtatccactatcagctgcaagtgacacattttaagccgcgccagttgaccaccacgttggccgggccaacagtgcctatctgcgatttggtacctgtattcaacaaatgccgctggaaacgggtaaaggccaggtagggccatttggcacaggcatttgggcagtgactattcgtgtgtgaacggacgaggtttcccgcacgctcctccgctatatatacatataaatatatatatatatttgccattattaagattttcttcggaacgcattcgccacatgtaagttgagattcagctcatttcctttcattcctctttgttgatttaagattaattcgcttggtgcgcactgcacttgttcaattgtatcgtttgcttgcagttcgttggcaagcgtttattgtatatctataatgcactcggaaaatgatcaaattcaattgaaagtattggcattttcgtttgaccattatgtttactcaatccgttggaacccaaactattattgtgctgcatcctattctaacgatctaaataaccatgttgatattgtattgagttcgtgtatctatagtacaaactagtgtagtgtacatctagtgttcttgaaaagtttgtgttccgattgagctattaatgtatatttttccaagcagaaccgtctagaccgtgaaggatacctgataatattgtgtttctaatgcaattcaatagtgcaattaagccacgaactttgtccaagtatcaagttgagtgcacctgagggaaacccgtaataatctcgaaatatttgcctttatccctcatccaaatatttggctggctcacaaagtaggcgcattgtaagcagcgatgactcctcgtctcgggtgctgctcatcccttcgatccggacccactcccactgcccatccggctctcagttcatccgataagcggcggattgtttgctttttgcgcacaggctgccaaataaaaccgcccgccgccggcttatcggcccagtttatctagttcgctcatatacatatagctaaggctatatctatagcatttcgcatatggagaagatgtaaaaaacgtggcccccgaagatcgggctgtgtgagtacgtgaatgggctacccatttattggcattactgcgcacggtaccatgcgatagaatcgcttgtggcgtagataaaaatcaaaatgcaaaagcgcttttgtttttggcgtctcgtgtgccgagtattctaaaagttgtcgtgtggttagaagggggggggggtacgtttcgagataacagcaacacgaggagattgtgtaatcgctttggcgattgctgggcgggaatatgctggtcgcgatgcggtttcccatacaatgagttctgtccaatcgcagagtgtagtgcatcataggttcagggagaaggtcaacaagatacacttaaaatatgtggcttcttttaaagatccccatcgtataagcatacttatctttattattttatataatttattttgtcataaatgtaagctatattcaaagtgaatgactaaatagtgatgaattttttttaagcagtgaatcacactgctaagaagcatctggaatggggaaatactatccatagtatagtatggcattgtttcaagtggatgtcagtttcccattttggttgcttggcaatatttgttgggcttttggccgaaaatgcaaattgttttctttggcgtcaccgtcgccacagtagctgtattggagaatgcgcaacgtcacccttttgtttttaccaccccgtagacccaggcattaccatatattcctcgatttcacctggcaaccggggacttctcgaccgatgccgatacactttcattcgctgtcgattcagttgaaacaatttctgttattgtttacacaacgcgctcgatggctggcaagtcgttctcgatctgaaatagagccagccatataagttacttcaacgccggaggagccagtcagtcctgcagagtcttccaagccgaaatgcagttttttgcgtgagtccgatatggaaatcccagatctagtcaaccgagacaccatttaaacgtcgccaagcccccttttcagaccctataaaccgggcacatattcttcttatagccggtttcaattaaatgcctacccgatggggtactaaaacttttccctaaacaaagggctaaatgaaactaaatggaaaactgttcgagcagcaacaatggaaaacaattgaaaaactcaatttgttggtaatttgtttgggcgtgcgtgtctcagtatcttttttttttgtgcaataacaatttcagagcttggcaggctatttgttgactgcataaaaaaagcagttgaatgaactgagaacgagctttgattgatatttcgaaagccatattgatggaaaatgtataagatgggggcataacatcacagccaaacttctccaagtccaataatggctttctttggtaaataaattgggggaagtctgtttcgccgactactgtttccatgactccaatttttgtattgtaagaaaatcaaatggttctagagatcaagagattcaattaattgttaatccgtgcaccttcttccctcttgcagtttctccaaaatggccaagtactcgggcaaaaaatgccggctgctctcgatgatgtggcttacggcgttcttcttcttcgtggagatcatagtgggctatgtgaccaattcgatggctctggtggcggatagtttccacatgctgggcgacattgcggccctggtcatatcattcctgtctgtgaaggtaagttactggcttttaccgaaaaatacaacgtgtatcactcagctaactccttatctcgacagatgtcaccgaaaaagtggtcaaagaacacttttggctgggccagggcagaagtcttgggtgctttggtcaacgccgttttcctggtggccttgtgcttcagcatcaccatcgaggcttgcaaaaggtgagtgcgttgtgatcaatcaaataacattgtttgcagaatgtacactactaagataagctgcaatagaatcaattttgaaacatctgctcgccaagcgaaaatctctactcatttatatgagtcattacatgcttaaataacaagcaaagtaccaatcgaatgattaagcggcttggagattggttttgtttatattcctgagaaaaaaaaaaccaaaaaatatgttacaatggtgtcagcatactattaaattctgtataaattcgattaaagttttataacgaggcttttaaaactcattgcttattaaacgtggctctgaaactaattaacttggattactactcgcttactctttactccttggccgcaacgcaaatggttttaatatttcgactcattacggatcgttgatccgcacccaaaaaccacttatttaatgatctgacaattgtaagccaagccgtattatgagcaaaaggcttgccttggcatcgacatgtgctaacgtgatttgtttaaattttcttgacttactccgtctgtgagttaatttgttgtgatacattcacgttatatcgtcacatttcggtttgtatttgtgcattgggttgtgtgaattatacgctttgttcatttacattccggtcacattgtgtgcatatttatcgaacgctttgcgaggtgattattctgccaatagctacagattccctgcagaagccagctacactgtcgaaaataataaactaacataggatttgatgagtgctttcgttatgttatcttaatacagtttaaataaaacaatacatttccatttatcacagattcattgaggaggagccgattcacgagcctgaactgcttgtcatcgtgggagccttgggtcttctggtgaatgttattggactttgtctgctttacggtaagaccaagtaatacagataagagtaggccgttctttaacttcatctgcattgcagagcacggcggtcaccatggacactcacatggcggcggactcacccgtaaccacagccgcctcactgagttggccaacatggacgagggcgaggatgagcaaaacgactttgcctacgagaagcagaaggaaaaggcaccggtcaagaaatccagccatggacacagccatgatcccggccagatgaatatgcgcggcgccttcttgcacgttttgagcgatgcccttggcagcatcattgtcgtaatcagtgctgtggtggtgtggaagacggagtggaagtaccggtactacatggatcccgctctgtccatcgttttggttgttttgatcctgcactccgtgtggccgctgctgcgcgagtccgctttaattctgctccaaacggtgcccacccacatccaggtggatgccattcagaagaggcttctggagaaagttgatggcgtgctggctgtgcacgagttccatgtgtggcaactggccggcgaccgcatcatcgcctctgcccatattaggtgagatttacttgttaaaagagtaactgcctgtttaaaaagaaaaattaattctataaccatttataaatcaaattaatgcaatctaatccatctctcgtaaaccttgtaggtgccgtaacctttcggagtacatgaagattgccgaaaaggtgaaggagttcttccacaacgagggtatccactctaccaccattcagccagagttcagcgagatcgaaggctgcaacatgtccgatggcacctccagcatcaacatcagcggctccgactgctgcgcgttggattgtcctaccacggaagaaggatgtgtcaaggccacgtgctgccaaaacaacaacaaattggtgagttcatctagtctaatgggaacatgtagaattgtataatgaagtataaaccttaattacagaaccaactgccctcacccaccaactcgccgtatctgtgccgccagcggaatgccgcccgacaggccggcgatgtggaggcgggttccctgctggaggccacgtccagtggcaaccagggagccactggtggggccagcacaggagcgcccgtggctgcgataggggccacgtcaacgccgaagagcgatttggtttgacgacagccacatcaggcgcaacaacatgtacactttgccacgaccaaaacggaaaccgcaaccgcaacaacaaaggccgccacaacagcagcagcaacatcaatacgtgatataatgtacgagccacgcgccaacaacctagtggtctccagcgcacaggtggacgtcaatctcggcctgacggtgaccgcccagcggcgacgggagcttcagttgcaggccgaacagcagtatcaggagcaggtgtcaccactgagtaccaggaatggcgacgaggtggcactctaattaggagcctagtttaacgttaattgtgcaaaccgctgcaatggagactggtctgccatggtgcagctttcgtgtttttttgtatcattatttgttcttagtggaatttaggcgtaaatgagagtgggacaagttcggtcgattgaccattgagctagtttaattaaagtgaaatcaaaaatgaaaatgaaaatgaagaacacgattatctattagtgcgggagacacaaagtttaaaggaacatgctgttcaggatgtcattcatatactatatagtatgttaaacctattcgattgtagttaattgcattagtttagatcgataagtgagcccaaacagcagagaatacatatgtactacgttttttacattttgagaaagtttatacatacgtgaaataaattattgtattcaatagttacccacggattagcaaatgactaaagacagtttacaaaatacataggtatacacgcatttgtgtttgtgtatggttagacatagtccctaaatcttagtagttgtaatgctatatgtaaatgtttttaccacaaccgagaacctagtttctatttaattttaatcgtatcgaactttataatgactatacatttaatgcaaacatcatgtattattttatgatctgcattaattttcagatgtatatgtttgtaaataaacgccaaacataattagaccaagcgaactaactgtatacaatttgataaaatgcctctttggagtcgaaattttcgatacaatcaggggtcactggtacttcctgattccctgattcattttatcgattgcagcaatgggcaagattgcgagctctgcctcgagtttcttggaagcttatcgaattcagataggagcacatgtgtgacatcaaagttgaggcacctagccactgagcaaatgcatcacaaaagattttgaaacgtgctaaaaaagattattggaaatgcatggaggtggtgtagtcctatataagcgtccccacaagctgtcgataccaaacgtcttcgagaactcaagtaaagtaccagactcgttcggaacatcagttgcaatggtg

SEQ ID NO: 26096 - DNA, 1922 bp, DROSOPHILA
cagtcacactgagtcgggaaaataattatttattaaaaattcgtggacccgcgctgtacatctgtgtctgtgctgttcgctccgctccaagtgcggcaaaaagcaaccaagaaggcaggcagcccaatcgcctcttcaattggagcttaggaaccttaacaaccaaagaaccgatttccagacttaaagctaagtttctccaaaatggccaagtactcgggcaaaaaatgccggctgctctcgatgatgtggcttacggcgttcttcttcttcgtggagatcatagtgggctatgtgaccaattcgatggctctggtggcggatagtttccacatgctgggcgacattgcggccctggtcatatcattcctgtctgtgaagatgtcaccgaaaaagtggtcaaagaacacttttggctgggccagggcagaagtcttgggtgctttggtcaacgccgttttcctggtggccttgtgcttcagcatcaccatcgaggcttgcaaaagattcattgaggaggagccgattcacgagcctgaactgcttgtcatcgtgggagccttgggtcttctggtgaatgttattggactttgtctgctttacgagcacggcggtcaccatggacactcacatggcggcggactcacccgtaaccacagccgcctcactgagttggccaacatggacgagggcgaggatgagcaaaacgactttgcctacgagaagcagaaggaaaaggcaccggtcaagaaatccagccatggacacagccatgatcccggccagatgaatatgcgcggcgccttcttgcacgttttgagcgatgcccttggcagcatcattgtcgtaatcagtgctgtggtggtgtggaagacggagtggaagtaccggtactacatggatcccgctctgtccatcgttttggttgttttgatcctgcactccgtgtggccgctgctgcgcgagtccgctttaattctgctccaaacggtgcccacccacatccaggtggatgccattcagaagaggcttctggagaaagttgatggcgtgctggctgtgcacgagttccatgtgtggcaactggccggcgaccgcatcatcgcctctgcccatattaggtgccgtaacctttcggagtacatgaagattgccgaaaaggtgaaggagttcttccacaacgagggtatccactctaccaccattcagccagagttcagcgagatcgaaggctgcaacatgtccgatggcacctccagcatcaacatcagcggctccgactgctgcgcgttggattgtcctaccacggaagaaggatgtgtcaaggccacgtgctgccaaaacaacaacaaattgaaccaactgccctcacccaccaactcgccgtatctgtgccgccagcggaatgccgcccgacaggccggcgatgtggaggcgggttccctgctggaggccacgtccagtggcaaccagggagccactggtggggccagcacaggagcgcccgtggctgcgataggggccacgtcaacgccgaagagcgatttggtttgacgacagccacatcaggcgcaacaacatgtacactttgccacgaccaaaacggaaaccgcaaccgcaacaacaaaggccgccacaacagcagcagcaacatcaatacgtgatataatgtacgagccacgcgccaacaacctagtggtctccagcgcacaggtggacgtcaatctcggcctgacggtgaccgcccagcggcgacgggagcttcagttgcaggccgaacagcagtatcaggagcaggtgtcaccactgagtaccaggaatggcgacgaggtggcactctaattaggagcctagtttaacgttaattgtgcaaaccgctgcaatggagactggtctgccatggtgcagctttcgtgtttttt

SEQ ID NO: 26097 - protein, 449 aa, DROSOPHILA; identical to SEQ ID NO: 258

SEQ ID NO: 26098 - DNA, 3933 bp, DROSOPHILA
aagactcaacaccgagttcgcaatgaatacgatagctaaacgaatcgagtttaaaagtgaataccacccaatcataatccccaaacgaaagcaacgcaaatggaagacattttcaatgtttgcccagatcaacggacaagcatataaataaataatccaccaaactaacttagcgaagcatttgtgtacttacatccgacacatcacatactcataatagtcggttgcttgaggagatctcgtctcgtctcgccttattcattgattcattcactattccatcgtcacttgttgtgtgtgcgtgtgtgcaagagcagcaacgagcaaataccaaaaaaatcgaaagaaacaagcaaataatgatctctccatgaaacataaaaaataaattaaacatataaaaaaatattggacaattagtgaaaggtatgtgtacttttgtttattcgccttattttctcgttgcccctttttgttttgcataacacgtttctgtttttgttactaaaccatgttcccttgggttaactgcatcctaacacccggaaaaatgggaagcccactgctcagatacttttgtgtacaaaaggggtgtaagtatctgagatggcattctactgaccacactgaacactacccactgactgtccgagagcaacactctctgatccatccacacatccacattcgatccatttaagctatcagtcataagagcccttatcatttactaaccaaaattgactttgatttaagcatatctaacaactaaattaaataaaaggagtcgaaacgatcgaaactaacaccaattgaaatgacaaatcagcaaatatgctaatcaaattgtttttattttttctttttcacccgacaacattttacgttcgtctgttgtttgtgttcttgtgttattccctatgatttgcacacaaaaattcataatcatgcaacacaacaaccacatcaacatcatcatcaacaacaacaacaacaacaggttcttctaaacacgacaaccaccagaaacaaatgttcaagaggccatacaacaccacaccaagcaacaacaacagaacccagaacaccatcaccaatccaagtccgaactcgaattcgaatccgaatcagaatcagaatcggattcagagtcagatcaataacaccacacaagatgattcgcaacgccggcaagtggaagcgtatcgcatttactacgaagaaatcgtcgtcaagcaggctaatgcccgtgctcgtcttggcgacagcagcacacgttgcagcaacagcatcaccagccgcaataccagcagcagtggccgcggcagcagtttcgtcgacaagttcgctgactttgtgacccactcgagccgaacttctcccatgcccaatccccctgcccagtcccatgtgccgccaaccacaagaaatgcgactaatgcaatccttcctcccaaaacaaacagcagcagcagcagcagcggcggcaacagcagcagcagcggagccactagcaacaatgcatccaccgtggtgagcagcagtgcgagcaatggcctcaagccggcggccaagaagacaccagtcattctgctggccgctcgtggtgccgccaagcagccgcagctcagcattcttaatggcaacaccaaggccggaaccggaaatgcaagcggaggcggcggcggtgttacattggtgcgcgtcaatgcaaccaatcgcaatcagcgccaagttatcgtcgctccggaggcaacacctgtggaacaccagcagccagtggtcgaggaggagatgttggccgaggacgatgagctcgacgaggacatggatgaggatgcagttgccctgtccgggctctcctcctcgactgcccagatcctgcgaaagttccgcatacccaaggggacggccgtgacggccaagtcgggggagaactacctggccatgccgacaccaacaccctcgccgccgggtgtcgtcaatttggttagctccggcgttgaggcttccggctacatagagaacgacgacgacatcatcgaggagctcaacgaggacgacctggtcgaggagatcatcgacgaggagcccagtcaggagcagccggagttgcaagagacgacgaccgccaatggcctagatctgagcagcacgaacaatgcgactgccacaacgactggcaccgccatgctgctggccccacaaccgcctccgcttcagctgcagactgtggcctccaacggcaccgtgacctgcttcaacctgccggccaacaccatcctgctgcagtcgcccgatggcagcataatcgccgccacccaggtgccgcatcccagcaaggcgggtcagcagcagctgattgcgttgccgggcaacgtggccctggccaccgaacaggcgtcgcagtctcaagccacatcggctccacaggccacgcagaccctgatcctgaccgccgacggcacggccattcccatcctggccacaaatccccaacagcagcagcagcagcagcagcaacagcagcagcagcaacaacagcaacaggctgccgctgctgctgctgctcagttgttcgccgcgtagggtctaatgggtggccaaatgggtcgatttttgaacagtgccaccataatgccgaccacatacttcttttagaaatctcaaaaatgttccgcgcagattcggttgcccatggcgcaaagctgggaacgcagctctgtgccgtcggcaacgtttaaatgtttttagggttttagaatacttcaaaaatcgtcacatttggccaccaaaatgcggggagaaatgcaacaggagcgtttgctgtaaagaaacgaatgaaatggaaggaatattaactcaaacttaagccaagctaactcattgatattaccacactgttggatgtgcatacgaaatttatttttttactcaaaaaccaaatgcctacaagaatataaatcaaatgttgttcaacacacagaaacaaacacacacacgcgaatggatttgaggcggaatcaaatgcattcggttcacggcaaacttaagagcatcgtaaattaaaataatttttacgcctaagataaattttaaatgtttaagtgcaaaacacgagacacacaccccaaaccagatgtaacaatttcacctgcctacagtgcgggcagaatatgtttagcgtaatttagttttgcaagaacgattccgtttcgatgaaaaggatagctcacttttgtaactaccgggagcgttctcaagaaatatacttataaatataatttgttccttgcataatgagagatagacagctagagcgactatgcaacgtatttcatgtagtatttattcgataagttctcgatctatttatttatttttgttaactatttccattcgtgtgacccgccgccacctttgtcattacactttcttttgccatgttgtatattctttacgtatatatatatatatatctatattttatatattttatttgcaatcttgttatgccattcgtacacaaataggaattcaagcatagcaccgacccatactttagactaaattatttttttaacccgttcttgtgaaaccaacggcccaagaatacagagataccacacacacattaggctaagcgaaaccaggttaagatactttaagatgagttactttaaccgatggaagacaatgatttaaaatagcttgtagtacgtactctaagacaaataagcaaaactgagttgcacttctgtaagatatactgtaactaataacgaagcgaaaaagctacaaataaagcaactcgagtagcctacataatgtataatacaaattctaaagctaatatttacgtacacatatatatatttattataaacaataaaaatacaattttaaaaatttaaagcaataaatcattacgta

SEQ ID NO: 26099 - DNA, 1933 bp, DROSOPHILA
gttcttctaaacacgacaaccaccagaaacaaatgttcaagaggccatacaacaccacaccaagcaacaacaacagaacccagaacaccatcaccaatccaagtccgaactcgaattcgaatccgaatcagaatcagaatcggattcagagtcagatcaataacaccacacaagatgattcgcaacgccggcaagtggaagcgtatcgcatttactacgaagaaatcgtcgtcaagcaggctaatgcccgtgctcgtcttggcgacagcagcacacgttgcagcaacagcatcaccagccgcaataccagcagcagtggccgcggcagcagtttcgtcgacaagttcgctgactttgtgacccactcgagccgaacttctcccatgcccaatccccctgcccagtcccatgtgccgccaaccacaagaaatgcgactaatgcaatccttcctcccaaaacaaacagcagcagcagcagcagcggcggcaacagcagcagcagcggagccactagcaacaatgcatccaccgtggtgagcagcagtgcgagcaatggcctcaagccggcggccaagaagacaccagtcattctgctggccgctcgtggtgccgccaagcagccgcagctcagcattcttaatggcaacaccaaggccggaaccggaaatgcaagcggaggcggcggcggtgttacattggtgcgcgtcaatgcaaccaatcgcaatcagcgccaagttatcgtcgctccggaggcaacacctgtggaacaccagcagccagtggtcgaggaggagatgttggccgaggacgatgagctcgacgaggacatggatgaggatgcagttgccctgtccgggctctcctcctcgactgcccagatcctgcgaaagttccgcatacccaaggggacggccgtgacggccaagtcgggggagaactacctggccatgccgacaccaacaccctcgccgccgggtgtcgtcaatttggttagctccggcgttgaggcttccggctacatagagaacgacgacgacatcatcgaggagctcaacgaggacgacctggtcgaggagatcatcgacgaggagcccagtcaggagcagccggagttgcaagagacgacgaccgccaatggcctagatctgagcagcacgaacaatgcgactgccacaacgactggcaccgccatgctgctggccccacaaccgcctccgcttcagctgcagactgtggcctccaacggcaccgtgacctgcttcaacctgccggccaacaccatcctgctgcagtcgcccgatggcagcataatcgccgccacccaggtgccgcatcccagcaaggcgggtcagcagcagctgattgcgttgccgggcaacgtggccctggccaccgaacaggcgtcgcagtctcaagccacatcggctccacaggccacgcagaccctgatcctgaccgccgacggcacggccattcccatcctggccacaaatccccaacagcagcagcagcagcagcagcaacagcagcagcagcaacaacagcaacaggctgccgctgctgctgctgctcagttgttcgccgcgtagggtctaatgggtggccaaatgggtcgatttttgaacagtgccaccataatgccgaccacatacttcttttagaaatctcaaaaatgttccgcgcagattcggttgcccatggcgcaaagctgggaacgcagctctgtgccgtcggcaacgtttaaatgtttttagggttttagaatacttcaaaaatcgtcacatttggccaccaaaatgcggggagaaatgcaacaggagcgtttgctgtaaagaaacgaatgaaatggaaggaatattaactcaaacttaagccaagctaactcattgatattaccacactgttggatgtgcatacgaaatttattttttta

SEQ ID NO: 26100 - protein, 518 aa, DROSOPHILA
MFKRPYNTTPSNNNRTQNTITNPSPNSNSNPNQNQNRIQSQINNTTQDDSQRRQVEAYRIYYEEIVVKQANARARLGDSSTRCSNSITSRNTSSSGRGSSFVDKFADFVTHSSRTSPMPNPPAQSHVPPTTRNATNAILPPKTNSSSSSSGGNSSSSGATSNNASTVVSSSASNGLKPAAKKTPVILLAARGAAKQPQLSILNGNTKAGTGNASGGGGGVTLVRVNATNRNQRQVIVAPEATPVEHQQPVVEEEMLAEDDELDEDMDEDAVALSGLSSSTAQILRKFRIPKGTAVTAKSGENYLAMPTPTPSPPGVVNLVSSGVEASGYIENDDDIIEELNEDDLVEEIIDEEPSQEQPELQETTTANGLDLSSTNNATATTTGTAMLLAPQPPPLQLQTVASNGTVTCFNLPANTILLQSPDGSIIAATQVPHPSKAGQQQLIALPGNVALATEQASQSQATSAPQATQTLILTADGTAIPILATNPQQQQQQQQQQQQQQQQQQAAAAAAAQLFAA

SEQ ID NO: 26101 - DNA, 3371 bp, DROSOPHILA
tggctggaggcaaaatagaaggactacccaaggctgttcgcatggccaagatgtcctggtgcgaggagctctcccatctggccttgctgaacgtaaagacctgtgagtccctgccagataaatgtcgcagcaccgagagattcgcctacgccggccagaacaacgccgtgttccagtacagcggagccgagacggagtacaccgatgcggaaataataaaggagcagatcgagaactggtttgctgagcgctcgaatgcatctcccgagatcctcgccagcttcccggaggagcttcccaacaaggcggtgaccaagttcaccatcgcggtggccgagaagaacacccatgtgggatgtgccgcggtgcgcttctcccgggacttttacaaccacttcgtactcacctgcaacttcgccacatcgaacattgtgggtcagcctgtctacactccgggagagaaggcaaccaccgggtgcaagaaccgttatggagctgcctacgactaccccaacctgtgctacgccaaggagatctacgacaacgagaaggtcatcgagaacacacagacgatgtaggcatggaatggacttcgattgatgggacaatggaatttgattaatatgtaacattttagtttaagagtgctaaaagaataaattttaattatttatgtttgctgtaagtaacggatttgtgctatccaaacagctgtttgcccagcaagtgggcagccccctttatacaccctgtaactgtggataaagtattccaatttattggtgataattaaaaaaatatacctttaagaatacagttcttaaattcaattatatttgtctacaatgaatttaaaattatctgtgtgctagaaacccttttaataaaacatctagcgttttatataatcatttgaaattaaatgcagggtatccagtggtcactacctaatcagaaaacatttcatttatttttgtagcaactttttcgccggcccaaaatgttacgcgaggctcttaggatcggcaacaggcgctggtacagctacaagtccgtccgtcgtccgaatctgggcgccacaggtactccaaagatggagccgccaaaggaacagccggaggcgtcctccaaagcggagagcggacatggcagcctggccaagcaactgagggccaagattctgtccaccggacccattcctgtggccgagtacatgcgcgaagtgctgactaatccccaagctggctactatatgaaccgggatgtgttcggcagagagggcgacttcataacctccccggaaatatcacagatcttcggagaggtgagataagcacattgatcagaacctgtcatcataacatcatatccctttgcacagctcgtgggaatttggctggtgagcgagtggcgcaaaatgggcagtccctcgccctttcaacttgtggagctcggtccgggtcgcggcacactggccagggacgtgctgaaggtgctcaccaagttcaagcaggacgccgaattctcaatgcacatggtggaggtcagtccgtttctgagcaaggcacaggcacagcgcttctgctactcccaccaaaccctgccggaggacgcacagttgccccattaccaggagggcacaacggccagtggaacgaaggcattctggcaccgtcggctagaggatgtgccccagggattctccctagttctcgcccacgagttcttcgacgccctgcctgtgcacaagctccaactcgtagatggcaagtggcaggaggtgctcatcgatgtggcatcctctgatggcgcacaagaagctagcttccgatatgtgctctcacgtagccaaacacccgtttcgagtctttatcgaccgctgcccggcgagacacgatcctgtttggagcactccctggagacggaacgacaggtgggactgctcgccgagcgcatcgaacgggatggcggcatcgctctaatcatggattatggccattttggcgagaaaaccgacactttccgggccttcaagcagcacaagctgcacgatccgctggtggagccgggcagtgctgatctcacggccgatgtggacttcaagctagtgcggcacattgccgagacacgcggaaatgtccactgctgcggtcccgtggagcagggactgttcctgcagcgaatgcagggtgaggctcgactggagcaactgttggcacatgcgctgcccgaaaaccaggagatcattcgctccggctacgagatgctcacggatccagcccagatgggcactcgctttaagttcctggccatgtttcccggcgtgctagctgcccacctagacaaatacccagtcgtcggatttagttagttatctatttaggatctgtttgtagggttttaaatatgttgcacatgattgttgaacaaaagtacgaatgttatttcttctggaatgatgcattgatcgcctgcatctctgcggcggtgaactggagcaccgccgagatggcgttcagcatgtgacgcttgccgtccgcgtcccgggtaacaatgtagctgataataacgttcttcaggtactccagattggcaccctcgcgcgtcttgcaacgttcgagtctagaatgggagtagagatcgtggcatgactttctaagacaacaacgataacaacgacaacgacgcacctgtccacctgctccttgaggcactcgatcttctcgtgcatttcctgctgagatgtcaccttgtcctggatcgcctttcgcagcgtcgactcggcggcgtatttggctttccgcagtgtcgtgatttcgatgtccttgcgcgccaactcgttggcatagtgcagcatgtggcagttctcgcccatcgacattttcttggagcgcacctttagctttctttcccgctgctccccctccacgctgtcggtgtcggaggaatagtgaaaggaatcggcagctgcttcaagtgtgggtgtggccagtgtgctgcccacaccgctggccgagtgaaagacctcgaaggaggtctgcagtgtcttaatctcctgctccttctcatccagcagctgcagtgacctctggcgctgcttctgcagtagctgttccagctcgttcagtttgcagcgcgtctcgttctccagttcagccttggcttcctgccacttggttcgttcgttcttcaatgccaggcgcagcttttcgccctgctgctttagttcgacttccgcctcgtcgatgttgcgattgagcacctgcaccttctcctgcagcgtttggatgtgcgagtgctgcagctgcaccttctgttcgagtagctgtcgctgctgcttggatgcctcgagcatttgctgcacaccctga

SEQ ID NO: 26102 - DNA, 1314 bp, DROSOPHILA
atgttacgcgaggctcttaggatcggcaacaggcgctggtacagctacaagtccgtccgtcgtccgaatctgggcgccacaggtactccaaagatggagccgccaaaggaacagccggaggcgtcctccaaagcggagagcggacatggcagcctggccaagcaactgagggccaagattctgtccaccggacccattcctgtggccgagtacatgcgcgaagtgctgactaatccccaagctggctactatatgaaccgggatgtgttcggcagagagggcgacttcataacctccccggaaatatcacagatcttcggagagctcgtgggaatttggctggtgagcgagtggcgcaaaatgggcagtccctcgccctttcaacttgtggagctcggtccgggtcgcggcacactggccagggacgtgctgaaggtgctcaccaagttcaagcaggacgccgaattctcaatgcacatggtggaggtcagtccgtttctgagcaaggcacaggcacagcgcttctgctactcccaccaaaccctgccggaggacgcacagttgccccattaccaggagggcacaacggccagtggaacgaaggcattctggcaccgtcggctagaggatgtgccccagggattctccctagttctcgcccacgagttcttcgacgccctgcctgtgcacaagctccaactcgtagatggcaagtggcaggaggtgctcatcgatgtggcatcctctgatggcgcacaagaagctagcttccgatatgtgctctcacgtagccaaacacccgtttcgagtctttatcgaccgctgcccggcgagacacgatcctgtttggagcactccctggagacggaacgacaggtgggactgctcgccgagcgcatcgaacgggatggcggcatcgctctaatcatggattatggccattttggcgagaaaaccgacactttccgggccttcaagcagcacaagctgcacgatccgctggtggagccgggcagtgctgatctcacggccgatgtggacttcaagctagtgcggcacattgccgagacacgcggaaatgtccactgctgcggtcccgtggagcagggactgttcctgcagcgaatgcagggtgaggctcgactggagcaactgttggcacatgcgctgcccgaaaaccaggagatcattcgctccggctacgagatgctcacggatccagcccagatgggcactcgctttaagttcctggccatgtttcccggcgtgctagctgcccacctagacaaatacccagtcgtcggatttagttag

SEQ ID NO: 26103 - protein, 437 aa, DROSOPHILA
MLREALRIGNRRWYSYKSVRRPNLGATGTPKMEPPKEQPEASSKAESGHGSLAKQLRAKILSTGPIPVAEYMREVLTNPQAGYYMNRDVFGREGDFITSPEISQIFGELVGIWLVSEWRKMGSPSPFQLVELGPGRGTLARDVLKVLTKFKQDAEFSMHMVEVSPFLSKAQAQRFCYSHQTLPEDAQLPHYQEGTTASGTKAFWHRRLEDVPQGFSLVLAHEFFDALPVHKLQLVDGKWQEVLIDVASSDGAQEASFRYVLSRSQTPVSSLYRPLPGETRSCLEHSLETERQVGLLAERIERDGGIALIMDYGHFGEKTDTFRAFKQHKLHDPLVEPGSADLTADVDFKLVRHIAETRGNVHCCGPVEQGLFLQRMQGEARLEQLLAHALPENQEIIRSGYEMLTDPAQMGTRFKFLAMFPGVLAAHLDKYPVVGFS

SEQ ID NO: 26104 - DNA, 4507 bp, DROSOPHILA
ccagcgatgccgcagatcttttgcctggcaccacccagttcccatggtggcttaaatcagcccgtttacttgtgcagcctgattccagttccgccatcgtggaacctggtgccgctggcccaaccgcagcacttgacgcatcagcagctgctgacgaatcccgcacaggactcgcagctgccgttgcagcaattggtgcagtacgacctgtccttcaatcgcctgctggccgaattgcgcaaggaacgggagaggtcctgttgtgacctgcagatcccccagcctctggctttccagctgtatgcgcccacggttaggtttctagatcagccagattccagttcggcgaagagagagcctcattgcccgccggcagctccttgtgctcctccagctgcaccaccacaaccaccatcctcgtcatcatccccaacagccacatctgcctccgccgccgggctgccaagagctcgttcggccagcccgaagcgcagtcgttcgtgtctccggaacaaggatctctgggacagtggcggatccgtaccaggtccatccccctgctcctcgcccacccaacatgcgaccggaaatgtgtgcatgaagtgcggaaactgctggcattgtccgcgctgcaactgctccaactgcttctggcatcccggcttggtgcgagctcctccaagagatggtcgctagggaaggggactaagagccactcctacactgtaaaagaagaaagtgtaataaaattccaagacttttaagcaagcagcttgccactatttcttaattgaattcaataataagaatatttattcttgcaatatgaagagagagtcacttttaaggtttttttttcgtttattagtttgtaatatttaaaccctatttataaatattttatgatacataaaaaatgaattctttcacaatttctacagcagctaggacttatatcacaagtaatgttcgttaaacaatgaactgtaattaaaagtaattatcgatcagcctgcatgttcataaagctagccacgtagttggacatgaccgagtttattccgaaatggtcgtttctgggctcaaggggttgggattgcaaattccggtggccgggcaagatcagcgaagctggcggcaagggagttcttatttggcaaggatacggatccgttcccagctcagaaatccttgtgcgacaacgcctcactttccgggcagagggactaacttgggtgcaggtcctgctgctggattggcaatacggaggtggcggaaggagaaatctttgctgcagctcaactgccgtggtatgcgactcgggtgcttggtagttctgctgctcatggtaggcttggatgcgttgttgatacgccactgattcctggtaggcagttgagtatatgtaggatggatcgtacaggaaggcctgttgctgcattatataagtctccgtgttcatatgggcatctggatgcacaaagtgctgttgctgctgctgctgcggcgattgtgcttctggttgctgttgtatcagcaactggtgccgctgcaaatgctgctgctgctgttggagttgctgctgctggtgccaggaccaggccagagccttctcctccagctggcgctgctggttagccatcttcagctcgagagttttcatatcggatctcagttggtgctgcagttgctccctgtccaacttgaacttctcctccactttcttgaattgctccattttgagctggaacaatcgcttctcctccgcatgctgtcgctcgcagatcagacgctcatccaagaccttcttcatggacttgctcaggtgatgcagttgattcctctcacggttcttgatccgctgatacaagactctcaactgctgcagattatccttccccgcttgctgctgttgctggaaaatcgcttcgtgttgctgctgactggctggcaatttgaaatgatgttgcaggtatggttgattctggatgtgcagctgctgcttgtggaatagctgattttgattcgtgtagttatcagcattttggggattccattggaaggatacctcgtgggcgacagacgcctcaatagtcggatgtggcccgagattttgattcattcgatcggaggcgttattgttgcacgtgatggattggtggtatgcatcctcgttgcagacattcggttgcacaatgtggtgaattaactgctgacacagtgccgtttgtccgaaatcttcaggggatcctgatcttacgggagccaggtcttgcacaggaacctggctttgtgtggaagagtaaaggaagccgatggcctgtggttgctcaggtgactcaagctcctcatctggttgtggatcaacctgttcaggactccctaattcctgggtatgtcgcacttcctcctcctctaccttcttcatcatcacctcctcgtccacctcctcgcccacttcctccttcactatcgtcatgcactccacgtcacagcagcccacttcgatttccggctcccctttcgaatcaccacactctccctctggattgtgccacgaaaagtagggatagtgctggcgtttggagttgctagttcttatcacactttcacgctggctctgcaggattttgcggtttatcttttccgattccgagacaaactcgacttccttcttcacaaagtcgtacagcataatgttcatttcatcattatcgcatagttgactctgctctccaatttctgtttccagatcgggcatgctaaggggtaactcccttggattttggaacacttcgtttggctcatcaatgcattcttcttgcttaatgtccgtagtttcgggatcatggttggcttcattggattttggataacatgcctccttcattttcttagccacgtatcgaggacgacccgaaccgatcggaaatttcagcattcggagatggtactcacgattcttggcgtatctagtcagtgtccttgtgcgctgctgaagttcgctgcgtgcgagttctttgggtatgaaaagtagttcgttggagaaagcaatctctctgcgcttcttggtttcagcactgaaatttattaaaattaccattaaaactaatcgatttatataccatattcgatggggcttacagggatagcgagtgcctttcttcgaggacaagaggtcgggttatatcgtcctttgctggactgttaaaatctccgtgtttatgctttagatccttgggttctgcattatctgaactaccgacatctttttggttggtatcttctggaatattaacttcgctttcagtttcctcttcatcagcaagagtactaagtaggttttctatatttctgagtatatatatatatatataaggtatattagtgataatagcgatgatagtttagttattaaccttacccgtcgtcaatagcctggcgctcactcataggttgaggctcggactcagacagaaacttggattctgattcggacacgaccatgtcgtgctgagaactgccagcaagcacctttccctttcctttaatataattgaaaattgtatacaaaagcgtagttattgtttgcctgcggtataggatggctgcttgggactttccgattgcgcggagttggctttaatcgacgttcgacaaaacttgttcactgtaaatagaatattgaggagtaacattagtaggcacattaggtggggctatgcattgttgggctcaaaatggtaaaacaaaaaagtttaacgcagtttaaattaacaattaaataaatacattatatgaaaatatatcaaactttagatacaaatattgtgtattgtacaaaaatgatcacttaattgattattattattaaagtaaactattaaattgatatatgtaaaactttatatatattttcaagttattattatggctcgttaatataagcctaaaacgagaaaatttcttgccgtgctcgcttactctttcactttcatgtgtttaaaagtgaatcaaatttcccgataccacagcccatcataatttagatccatttgtaaacaggaaccgagctaatcaacaaacaaataaatctccatttgtggctgaccctcctccgcaggatttcgagctgatatcgagtttcgtgcttggggctcctcgatgtcgcgacgaaatccaatccaatcgaatccaattcaatgccggaggatatccgaaccgcgcgaatgttgcgttgcacatccgaaatgtgaatgaatgcaaatgaaatttgctaataataatacgacaattacatggcccgcgggcgataaaaaaaaagccagacccacaagctcccgagcggcaattatggggcatacaccgccggcttgcccaatagatttcactgggcagatatggccactggccacctatgccaccaatccacctaacaacccatccacctatccacctgaacggaacccaccccgtttgcggcgctggccggcataacctgggtcaa

SEQ ID NO: 26105 - DNA, 2163 bp, DROSOPHILA
atggtcgtgtccgaatcagaatccaagtttctgtctgagtccgagcctcaacctatgagtgagcgccaggctattgacgacggtgctgaaaccaagaagcgcagagagattgctttctccaacgaactacttttcatacccaaagaactcgcacgcagcgaacttcagcagcgcacaaggacactgactagatacgccaagaatcgtgagtaccatctccgaatgctgaaatttccgatcggttcgggtcgtcctcgatacgtggctaagaaaatgaaggaggcatgttatccaaaatccaatgaagccaaccatgatcccgaaactacggacattaagcaagaagaatgcattgatgagccaaacgaagtgttccaaaatccaagggagttaccccttagcatgcccgatctggaaacagaaattggagagcagagtcaactatgcgataatgatgaaatgaacattatgctgtacgactttgtgaagaaggaagtcgagtttgtctcggaatcggaaaagataaaccgcaaaatcctgcagagccagcgtgaaagtgtgataagaactagcaactccaaacgccagcactatccctacttttcgtggcacaatccagagggagagtgtggtgattcgaaaggggagccggaaatcgaagtgggctgctgtgacgtggagtgcatgacgatagtgaaggaggaagtgggcgaggaggtggacgaggaggtgatgatgaagaaggtagaggaggaggaagtgcgacatacccaggaattagggagtcctgaacaggttgatccacaaccagatgaggagcttgagtcacctgagcaaccacaggccatcggcttcctttactcttccacacaaagccaggttcctgtgcaagacctggctcccgtaagatcaggatcccctgaagatttcggacaaacggcactgtgtcagcagttaattcaccacattgtgcaaccgaatgtctgcaacgaggatgcataccaccaatccatcacgtgcaacaataacgcctccgatcgaatgaatcaaaatctcgggccacatccgactattgaggcgtctgtcgcccacgaggtatccttccaatggaatccccaaaatgctgataactacacgaatcaaaatcagctattccacaagcagcagctgcacatccagaatcaaccatacctgcaacatcatttcaaattgccagccagtcagcagcaacacgaagcgattttccagcaacagcagcaagcggggaaggataatctgcagcagttgagagtcttgtatcagcggatcaagaaccgtgagaggaatcaactgcatcacctgagcaagtccatgaagaaggtcttggatgagcgtctgatctgcgagcgacagcatgcggaggagaagcgattgttccagctcaaaatggagcaattcaagaaagtggaggagaagttcaagttggacagggagcaactgcagcaccaactgagatccgatatgaaaactctcgagctgaagatggctaaccagcagcgccagctggaggagaaggctctggcctggtcctggcaccagcagcagcaactccaacagcagcagcagcatttgcagcggcaccagttgctgatacaacagcaaccagaagcacaatcgccgcagcagcagcagcaacagcactttgtgcatccagatgcccatatgaacacggagacttatataatgcagcaacaggccttcctgtacgatccatcctacatatactcaactgcctaccaggaatcagtggcgtatcaacaacgcatccaagcctaccatgagcagcagaactaccaagcacccgagtcgcataccacggcagttgagctgcagcaaagatttctccttccgccacctccgtattgccaatccagcagcaggacctgcacccaagttagtccctctgcccggaaagtgaggcgttgtcgcacaaggatttctgagctgggaacggatccgtatccttgccaaataagaactcccttgccgccagcttcgctgatcttgcccggccaccggaatttgcaatcccaaccccttgagcccagaaacgaccatttcggaataaactcggtcatgtccaactacgtggctagctttatgaacatgcaggctgatcgataa

SEQ ID NO: 26106 - protein, 720 aa, DROSOPHILA
MVVSESESKFLSESEPQPMSERQAIDDGAETKKRREIAFSNELLFIPKELARSELQQRTRTLTRYAKNREYHLRMLKFPIGSGRPRYVAKKMKEACYPKSNEANHDPETTDIKQEECIDEPNEVFQNPRELPLSMPDLETEIGEQSQLCDNDEMNIMLYDFVKKEVEFVSESEKINRKILQSQRESVIRTSNSKRQHYPYFSWHNPEGECGDSKGEPEIEVGCCDVECMTIVKEEVGEEVDEEVMMKKVEEEEVRHTQELGSPEQVDPQPDEELESPEQPQAIGFLYSSTQSQVPVQDLAPVRSGSPEDFGQTALCQQLIHHIVQPNVCNEDAYHQSITCNNNASDRMNQNLGPHPTIEASVAHEVSFQWNPQNADNYTNQNQLFHKQQLHIQNQPYLQHHFKLPASQQQHEAIFQQQQQAGKDNLQQLRVLYQRIKNRERNQLHHLSKSMKKVLDERLICERQHAEEKRLFQLKMEQFKKVEEKFKLDREQLQHQLRSDMKTLELKMANQQRQLEEKALAWSWHQQQQLQQQQQHLQRHQLLIQQQPEAQSPQQQQQQHFVHPDAHMNTETYIMQQQAFLYDPSYIYSTAYQESVAYQQRIQAYHEQQNYQAPESHTTAVELQQRFLLPPPPYCQSSSRTCTQVSPSARKVRRCRTRISELGTDPYPCQIRTPLPPASLILPGHRNLQSQPLEPRNDHFGINSVMSNYVASFMNMQADR

SEQ ID NO: 26107 - DNA, 3915 bp, DROSOPHILA
cgccacgatttttctttttatttaaatttcgacctcaaccagaagcacagcgcaatgataaaactgaaaccggccacttttcttattttactagtttttcttttcgaaaccgggtgcacggaaaattggttagtgtagtgcagatttatgagtacttttatttattggattttatttcagtctgagcaacgatattcatgcattaattttggccaggggaggcagcaaaggcatcaagctgaaaaacctggctgaaattggtggctcatcgcttttggcccgcacaattatgaccatcaaaaattcgacttgctttcgacatatttgggtttccacagatgacaaacgaattgccattgaggcacaaaagtgtgagcattaaatattattatagtgaatatatcttttaaactcttgagcactttagatggtgccataatacatcatcggcctgagaaattcgccagagacgacactccttcacttcatgccatttcggagttcctagatgttcatagaagtattcatgactttgctctattccaatgcacatctgtattcctgaaaaccaagtatattcaagaggctgttcgaaagtttgagtcccatgactgtgtttttgccgctaagaggtacactatgctctaagaaaaatgtagatgtttaaaaatctatgatctatttcagatcacattatctgcgatggaaggtggtcgatggtgaattgatgccagcggaattcgatttgagtgccaggccaagacgccaagattggcagggtgatattgtagagacaggaatgttttacttctcgaggaggaaactggtggacagtgggctactgcaaaacaataggtgctccgttgtggaaatcgatgccaaggatagtctggaaattgactctagccacgatctgactctagccaaatacatcttaagtagtgaaacaaaaaccgagttatagaaatagatatgctattcatcaaagaaagtgtaaagttcattgatcttgaatgttggtttgattttgtagtttaggcttcacactttttgttggccaggctatcacggaagtgtagcgactgattcgcttggtcaggaggcgtggaatgagggcgttgctggtgggtctcaggaccaagcaagtcctgccaaaccgagcgacacacagggaggttgggctggatggattggtcctcgcaaatgatgcaccacccatggatcggggtaatggcgacttcttgctgccggcttgatcgtcttgggtggccttggcatccttgacatcctggggtttctcctgaacctgggccttcttgttaaatatgggctttataccatcctgattgtgggatctttcgctggactttagtgacttttccttggatgggtagaagctgctgcgtcgctggcttggtttcaaggggcagcagacactttgggcttgttgctgctgctgctgtgattggaacacctgttggttgttgaagggtcccaggcagtggcaacaaggatgggggtgcgtcctgcactgggaacactggttgcacaaggattggcacgagcaacagggataaaatcctccagaaatcggaatattcggctgctgctgcagcgcacaagtggaggttccgagaactgggtgcatcatgtgctggctgatctgaccacctaatcccatagaaggatgtgattccatgctcgacaaaggacagcaggatgtaccaccgttgtagcagccgtttgcaaaactctccggcttcaacatgcagcagttgcttccgttggctggacattgatactgattgcccatctgcattgggcagacttgactcgtcctcgacggacagcaattgctgcacgtgcagcaggagcagctggacatgctgctcggcgtggcgcacaggaactgctggccaggatacatgacaggacaacccgatgttgccgtccccggctgattcatgtgcataaaactgatggtcacatatggcgagttgttggtcggttgaactcgcacgttcgggtgttgctgcagcgtcaaatgctgctgcatatgttgctgctgctgctgcagcacattctgctgcatgttctgatgttgcagcaaggacatttgctgttgatgctgctcattcagcgacggttgtcgctgttgttgctgttgctcccgatttaattttaaaagtttttgtcggacctgggctgcagtttgaagggataacttccgagcggcttgtacagtgttacctggggaataaagagggaggaaggaacataaatatagaagcaatctaaaatgaataatataacctttctggttgctattgctggtggttggatactgcggaaaggctttgtccgtctgggatcctgcattagaaatggcgtaggaacgcgaggtctgctgcgtctgacacttgccggtttggtcttccttcgactgttctatgtcctgttgaatccgattcctagccaaagcatcctcgagaaccacgaacgaaggtctattcgccagatccttgttgcagatcttaacgaaaggcggcaaagtttcggttttcttgatctcctctatggacttgtcattcttgctcttctccagcttttcagttgagtcatcatcgatgtcatttgaattccctttgagcacagctatgcactctttcttggtttccttagtgccattcgtcagtggggagttactactgtctgctccgctttggggattcttgcattcctgattaagtgagctaatttcgatgagaccatcagtgcccacggtaatcatgaaacagcatttggccaccgtttcgtcatttgatttggccaattgccctgatgattcattctcgcctggggcctccattttcctgaattttgatgtgttttccgggtgttgtgagttgatgtttcctaacgcatatcaaaaagtatatcaggcgacaaatgtactgtcaactttgaaatgctcatcgaaactggatttcccttactgtgtaagtagtgaccaaaacgttcttggtgtttaagattttagaaccatattaatattaataagataaaattatttaaaaacttgaaacagtatttatttcttaaaataattcaaattatatactagagaagcaagtctggtatcaatcagtatgtctcagctttatgatgtcaaacatttctacaccttttgtgctttaacatgtacacaaaattgtcatatccgtgagttggcctctccgggtggtgaagagttgaagatgttctgcacggagagctgtgagcacggatgcaatgcaacctcgtcgggcaagctgatcgccaatggaaacggtggcggcctgcagtcgcagggaaattcacagcatcagttcaccatgtcctacgctccactgtcgaccaacgatgtgccctccaagtccgaggtggaaccaccgcgactgggcatgtgcctggtcaccgagtgtccagagggtctgaggtaatttatacatgaatttccatgaaaagtgattcgatttctactcccttcctctccagcattgactgcaatgtgccactgccgaattctttcaatttggatgaatacaaaaatcacatgatctgctcgagctgtacccagttcaatggtggcttggacagatttggccagccaggtacagccggtccaagtgccagtcctagtgccaatccatatccaactccgatgcccaatcccatccaggcctctccttgcagctttcatggccagtgttgttcagccggtggaccatgcgctggatatgattcgcagccaaatccatcaagatgctatcgacaggaatcatcgttggctcaaggagccccagcgatgccgcagatcttttgcctggcaccacccagttcccatggtggcttaaatcagcccgtttacttgtg

SEQ ID NO: 26108 - DNA, 1789 bp, DROSOPHILA
aaacatcaactcacaacacccggaaaacacatcaaaattcaggaaaatggaggccccaggcgagaatgaatcatcagggcaattggccaaatcaaatgacgaaacggtggccaaatgctgtttcatgattaccgtgggcactgatggtctcatcgaaattagctcacttaatcaggaatgcaagaatccccaaagcggagcagacagtagtaactccccactgacgaatggcactaaggaaaccaagaaagagtgcatagctgtgctcaaagggaattcaaatgacatcgatgatgactcaactgaaaagctggagaagagcaagaatgacaagtccatagaggagatcaagaaaaccgaaactttgccgcctttcgttaagatctgcaacaaggatctggcgaatagaccttcgttcgtggttctcgaggatgctttggctaggaatcggattcaacaggacatagaacagtcgaaggaagaccaaaccggcaagtgtcagacgcagcagacctcgcgttcctacgccatttctaatgcaggatcccagacggacaaagcctttccgcagtatccaaccaccagcaatagcaaccagaaaggtaacactgtacaagccgctcggaagttatcccttcaaactgcagcccaggtccgacaaaaacttttaaaattaaatcgggagcaacagcaacaacagcgacaaccgtcgctgaatgagcagcatcaacagcaaatgtccttgctgcaacatcagaacatgcagcagaatgtgctgcagcagcagcagcaacatatgcagcagcatttgacgctgcagcaacacccgaacccggggacggcaacatcgggttgtcctgtcatgtatcctggccagcagttcctgtgcgccacgccgagcagcatgtccagctgctcctgctgcacgtgcagcaattgctgtccgtcgaggacgagtcaagtctgcccaatgcagatgggcaatcagtatcaatgtccagccaacggaagcaactgctgcatgttgaagccggagagttttgcaaacggctgctacaacggtggtacatcctgctgtcctttgtcgagcatggaatcacatccttctatgggattaggtggtcagatcagccagcacatgatgcacccagttctcggaacctccacttgtgcgctgcagcagcagccgaatattccgatttctggaggattttatccctgttgctcgtgccaatccttgtgcaaccagtgttcccagtgcaggacgcacccccatccttgttgccactgcctgggacccttcaacaaccaacaggtgttccaatcacagcagcagcagcaacaagcccaaagtgtctgctgccccttgaaaccaagccagcgacgcagcagcttctacccatccaaggaaaagtcactaaagtccagcgaaagatcccacaatcaggatggtataaagcccatatttaacaagaaggcccaggttcaggagaaaccccaggatgtcaaggatgccaaggccacccaagacgatcaagccggcagcaagaagtcgccattaccccgatccatgggtggtgcatcatttgcgaggaccaatccatccagcccaacctccctgtgtgtcgctcggtttggcaggacttgcttggtcctgagacccaccagcaacgccctcattccacgcctcctgaccaagcgaatcagtcgctacacttccgtgatagcctggccaacaaaaagtgtgaagcctaaactacaaaatcaaaccaacattcaagatcaatga

SEQ ID NO: 26109 - protein, 580 aa, DROSOPHILA
MEAPGENESSGQLAKSNDETVAKCCFMITVGTDGLIEISSLNQECKNPQSGADSSNSPLTNGTKETKKECIAVLKGNSNDIDDDSTEKLEKSKNDKSIEEIKKTETLPPFVKICNKDLANRPSFVVLEDALARNRIQQDIEQSKEDQTGKCQTQQTSRSYAISNAGSQTDKAFPQYPTTSNSNQKGNTVQAARKLSLQTAAQVRQKLLKLNREQQQQQRQPSLNEQHQQQMSLLQHQNMQQNVLQQQQQHMQQHLTLQQHPNPGTATSGCPVMYPGQQFLCATPSSMSSCSCCTCSNCCPSRTSQVCPMQMGNQYQCPANGSNCCMLKPESFANGCYNGGTSCCPLSSMESHPSMGLGGQISQHMMHPVLGTSTCALQQQPNIPISGGFYPCCSCQSLCNQCSQCRTHPHPCCHCLGPFNNQQVFQSQQQQQQAQSVCCPLKPSQRRSSFYPSKEKSLKSSERSHNQDGIKPIFNKKAQVQEKPQDVKDAKATQDDQAGSKKSPLPRSMGGASFARTNPSSPTSLCVARFGRTCLVLRPTSNALIPRLLTKRISRYTSVIAWPTKSVKPKLQNQTNIQDQ

SEQ ID NO: 26110 - DNA, 10451 bp, DROSOPHILA
cacctggatgcgacctttgccccgctcggcacactccttcagcacgtccacatcgtaggcggtgactccgatgaatcgagcctttcccgcctggacgtactcctcgaggacgggtatggtctcattcagcaccatgtccagactaggtgccgcatccacgtcatgaacctgtcacaaggtgttagtttatagacaaatctatatattggtataccaaacacacctgtagtacgtccaccctgtccaactggagcagctccagactacgcttcacactctcccgagccttggcagccgtatagtcgaacatattgtttggatccaactcgtaacgtgcaactttagttgctatataataggcctcccggggcacatccttgagcgcctggccaagcagctcttccgatttgccttggccataaaagggagccgtgtctatgtagttgataccggatctaatggcttcctgcaccgtgaggatgccctcctcgcgatcgaagtcatcggagaagagcttggagagagtggcaccacccaaagcaattttggatactcgcagacccgtggatccgagttggcggtactccatacgacgcaccttctcctcatcgtggaaacccttgacgaaagtagctggcagtgatcccgacatccttttcgcttcaattaacaagcttgaatgaatagaactcctagaaaaatggcactttataagtgcataaagtgattttaacatatgtaggtatgagtgagttccaaaatagatttgcctcccttagcaagcttctcttcgtgataagctgtggaagagaaggttcgctcttagttctttatatatattactatgtaatttcgcattattaatgtagctctctgtaagaatgattctaaaaattgtgatatcatataccaaccacattttttaaagagaaaaccaattcccaattaaggtaattccttttaataccttgcatgtgaacaataagcataactccgatcatgtttgttttaatactatttattttatttatcagaggagattctgagctttttgcggcttccaatcagttgacaaatcgttaagagtaaatataaatatctgctttatatatcaatatgcatgagatggggacgagcaccgctcagaagaagacatcgaaatcgccctgtggctgatagccagctccgggcgggatcagctggggtcgctgctgttgctggcgctgtgggcgtggcacgatgatgtcgttgatctcatggagaattccattggtggccaccacatcgcacttggtgacgccggcgttctcgatcttgggacgacgatcgcgggtgatacgcagatgctggccagagatggactcgatggagcggacaaatggccagttggttgggataatgccggcacagcagacaacatcctcaacgatatgggttttgaccaaggccatgggatcggcgggctttgaaccctcaccggactcgttcagctcctcgaagatatcgttctttggcaccagcagggtgagactcctcgaatcgttggacagcagctgtgtaagattagccttacgaaccagctccaggaacttgctgtagttgggattagcctccagcagcttaagcatgttctgtggaatatttacaaataagcataagctttaaattccgtgataacctcgtagaactcacattcttgggaggcgccaaggcacgatccacctggtggagaacggatccgcagctctcgtcatcgaagtgcaccaaacgggcacagtttaccgttgcccggttcatcacgtccgagaagagagcatgggtggagtacaggttcagacgcacactagatccagcaaccgtgggcagggacttctccgacaggtcacaggtcttgatcatgggcttgaccacatggtagttaaggaactccagcagatccaagttatgattcagcagctccggctgttccttgagcatgcgagcccattccgtattctgcagagccttgtcagttggtgcaaagatggtcacgttgtccagatcgtcgaactgatcatcgtagccggaggcctccagcaatcgctggaagatggtcaggttcttttgcgacatcagcgaggtcatgggcagagccgattcggtgggcaggatggtgtcgattacgtgcagcacaccattggtgcccatgatatcggcatcaatgattttggccaagttattgatgtagatgggagtcggtccagtctgattcgcagcgcggtgggttcggttgaggagcaggggttctcccagtagattgtaggccgtcgtcttggcacccggaacagtggccagcgagcagaaggtgaggtccagcaaatggttcttcaggatgtctaccggataaatgggaatcatattatattagttagttagctgcttgtggataagtttccagaccaactcactggaggcacaaccgcgaccttccttgagggctcgacgcagatgaggttccaacttgtcgaaggcggcatcggtgggcacaaagatggtcactggcttgtcatcctctagcatggcgctcaggttggtcttctccagaacggtgcgcataatggacatatccgcacgctccctgatgatatccataaggttcttggtcagcggcttcaggactccgcccagagtgtggacaagggcctgctccgagagcttgtcgtgcttctcgatgggcacacagttggcggcaaagcggtagggttccaggcccaaagccgcaggcagctggtagctgttgatgcggatcttctggtcaggcagctccgtctgcagaagcttctcattgggcacatcctccagctgaacttcgccgagaacagcgtgcagtttgtagatggatggcttggaagcctcggccttggcatcttccacattctgttgtacgcaaagaattctcatttatttacatgaattttagtaaccaaaggcatgctcacattctcctgctgatgatgaccacggtactccatgaaggcggcgtcgttgggcacgaagagggtcaccttcttgccactgcctgctccgagcatatcggccagctcaccggcggtgcgtgcactctccaggaactgcttggcacccatgtcactggccgtggcctccacgtccttgatgtcgatcttctcgcagggcgttgtgaagtcagcgtttctggggcgtccatatccatagcagcactggcgggtcagcgtcagcgttttcttcttgccattttgattcacgctgcaggggataaagtgttcaatcaattggatgagattaggtaatcctactgtaatctgcttacatcttggtgcagacgtgcttgttgggcttctcggcgcaggagttaacgctgaactggaactggccaaagagtggggatcgcaccacgttggtaacgccatcacgttcctggccaaaggtgtccacggtttcttctgcctccgtttcactggccacagtctcgtcttcctccttttcggtgcacacattgggtctgaataaagcgaaaaattggttattggttaacaatgtgatgtagtaatagtttggcgaaatgaacaaatataattcaaggcaatcgtttttcgagactcaaatacataagctttaaaaatagtgtatttcaggcatatattcaaatcattagttttataagttatcttcaatgagcaattactaataacttgttgctatatttaatctatgatgatcattctccctttacgttctctacaaattatagccaaacctgctaatgaattggtcatataacagacatgcaaatcgaaatgtcaatgcactatatagcactatataccactatacatatatgtatataattttgattcaaccctaaattcctatatatccacaactccgaatccaatccaacttagtcggttgatcggcactcgctaaccgattgtttgcccaatggatttgcacaatgagtccggcacatagaaagcatagttatattatacaaactgacttttatataaatgcgtatgtgtgttggcttaacagctttgccagtccatcaattcaattatggcagcgatgagaggagtctactgaatgcgaactcattgtgtgcgtagattttagaaatttctcactgaaccatagatacacagtcgcatacatacatacatacatatgtttgtaatgcagctaatttatcaatttgccacatctgtgactttcattttactatgcccgcgcagtaacgagttcatcgcacagtgcaaaaaagacgacaagtggatttcacaatttataaaagtgcaagctcggctgtagaaaccgtgcagttgtgcacttatccaatatagacactatatatctatatattcattcacttttccctatatacaatgccatatctggttgggcaattaaaaaaaaaaacagcaatcgagccctggaaaattattaagcagcctcagctgcgaataatcttggatggaaaattatttaagtaggtatttaccatttaattgatatgctcgattgcctctatgatggcgataacccatccaactttacacaattatagaatatatataccatacaatcatatagttaatgggtcgtatgaacttgacattgtgctctcttaattgccaaatgccaagaacggcgaagttggccacagaatcactcgagtgcggcgattaggaaagacgccaaattagtgaccataactgggggacttttttttttttttttagcattcaagtgggggcaaatgcccttaatggatggcacttaccccttccaccagggctcctgggcagctccaaagccaaagcctccgaacgaattgaagaactcattgccaaagaaggggaacgattgctggaagaagatggccggatttggggaattcacatccgtggtgatggtgtccacatctgcgaagtaaggaaacgcaattaaaaccatactataaaatttaacaattgcttaagacacttaaaatattctttagtaacaattcaaattacgctgagattaagcttgcacataatattcttcaagatactaattttgcgagtgcaatttttatggcattgttaaatcactataattaagcgatcagcatagttgatcaagaatggctacctcttgctgttttgcaaagtagtttataaattggtcgtttctaagattcaatttcagatttaaattcagattttattccagatttggactagaaaccaattgcaacagaaataattaaaagagttttgggatttctattttaataaattttaaacgaatatctaaatatatgtatattatagagatatagagcacttactgaacggcttctgctccacaccgctgggggtttgagcgggaacggtggccgccgtctcctggcgtccctgcggctgctgctggtgctccagtggcacgaactcggtgtcgtatccgctgctgaagaggggcaacaggtgagatgagtggagttgcggcgccaacggggcgggtccgttccagacgctcgccatccgctgcgaggcctgggcatgcagtggatcttggggctcgagcggtgcgagtggtgcgaagggcaggggcgcgaacagattgcgatgcgccggcaatgggtgggttaaatgtggcataaagctgcagaacggtgggagtgggcgtaggagtggacgtggtgtagagtgatgtggttagtgtatacagtattagctggctactgtgtgcccatatgtgtgtgtgtgtgtgtgtgtctgtgtgtgttcccttcatgcaaattccattggtgagcggaacgaatcgaaacggaaccgggacccaataattcatatgcctccattgttacctcgcataaaaagaagctcaactctatcctcaccaaactaaatatatgtatctatctgtatgtagtatatatgctgatcgtgctcattgtttaggttttttgcgcagcatttacctgagccgcatactaagcgcctgtcagtggaactctttttagaatcaaatgaaaataactttttaagtgccgaaacaatcgctgaaaaaggcgaacaaaacttgagaaatgttcctgcacttgtcatccatcaactgagatttatgtcaacggattttggttttttctgcgtctcccaatgcattcgaaatctgtaaactgactcagatactttctatgaagacatacatacgcgttagccaacttcaaatctttttttcttcgctgcggctcattaaaattcgcttcgcgggagctaattaaaaaaagctcataataagtgctaaatgaaaaaaatatacgaaacgaaactagctggaaataaataataaaacaatactgcccgaaaaggcgaaacgtaaacaatttgttgggttgctgactttgaggtacttctgtgtatccgattcacttctggttggagatctgcctccgtccaagatgactcatccaggcgggacgtgatcgacagggctcgaagcggctttggctgagctacagatacaggcggtttaagccgacattacaatacatagaggcttggccagtttgatttttttttttctctttctaccttgtcagattctctggaaatcacttctataatattgctagagcgagtgaatgcacctcagtttaaatcaattgtgtgtccatcaatcaaaaaaccatcaaaatatttgataaaaaggaacacttaatttattcacaatttattcgcaagaatatttactcaaaacgttatcataaatattttatattacttggaaataagtcaaaaattttatttctttttcattattttaactactgtacgtcgattattgaatgcaaataatatttcaaaatgtatacattcatatgaacagatttgaataaagaaataaaaaatcttacaatagagcgaatgacttttgaaatcttagaataattactcttcatcttaaaaattgtgcaaaaatataatatcaactgtatgttgtttgataagatattaaatatatccatttagcagtaattcaatgactaagtactttgtgaaagattaatgaatgtgtgaagtatttgttttgtgatcatggtattcaagactacttggaatatttgtagactgcgtatccaatctgtgaatcgaatataatttgcaaacaaactaaattctgttcgcttgaagccagagcgaaagtcattggccacagaaatttccagggaaatgtttacgtcgagggcagagatggatccaaccaaatggctgcctgatttaatttaagcgcagccgtgacaggcagaataaaaaaaaacattctgtgagcgttaaagggggaaccaaattgtgggcgacccaattcgagggcagattatagagtttgcggagacattcttttgccggcgcattacccattacccacaatatgccacttaatgccgtgtcaaatgtcaattgctctcagggccaaaactgttcgagatttgtgtgccaaagatgagccctgcggcggcttgaacccaaaggtggcaaagtcagccaagtgtggagcgaacggagaagatcggtggaagaagatgtggatcttggttgcccaagtcccgcggtgttgccccactttggttgcacattgttctcttgcgatgcagtatctttcgcaaaaaagggggaaaaaaataataaaagccaaagactcagatcgtggcctttgcacatttccaatggcggcaaagaacccagttcgatgcggatttattggcagacaatctctgcgactcaacaatttcagtttaaggtttatcaattgaggtcaatactcggcgggcttttggactttctttccgggggaacttttcgctctttcagcgccttcgctaccataaacatttcggtcaactttatttgcagtttcgtttagcgggcgaaaagtttctccaagaacaaacagggctcggtgcctcgttgggcttgaaaatgtcataaaaaacactgaacccggtattagccaacttttatgtggtgtcagtgggcccagcggaacccgtgagtgaaaaaaatattgaaactgtttaagcatttttaagttgtttaacatgtaaacctcgtcggtatgtttgctttgttaagtagttgtaaatgagcaaatctactgggaaatgttggggactcaacagctgggctaactacgtttacttatagttcacctggagttatctgaggactcgtgtgtggaatccgaggagtcatcgaattcggcaacctcttcagaacttgaactggaattcaacatttcgtttattgggacagatttaaaaggtcgggcggatgggaaaaatctactagggttagttctatgggacttaagcacttaatattaacgattatttggaaactttaccaattggtcttcaaaaatatatttgaaagcgttattgtaaaacttcaataatggcaaaatacttgttttttaactcgtggcttacattaatattgttataaacattgttatggatggtatcaaacgtttcaatttagatctaattttgtatttctttcaaagtgtttttttttttttaatttttttccgtttttagttatttgggatgcgcttgttaggtaaaattttgttccaatgattctatgaaattgtatatgtttaattagagaagtatttcaattttgtgggtcccaggcattcctggcatttcaattgtgttccgataacataaaacatttagttcatgccttatcagaagatgtcgatgtacatatgttaaccatttagcccgcaacgcaaacaactcaaactacgtgaaatgtgcatgaaacgaacgctactacacagcacgaaaaacttgtcggattgatactcactcgccgtagaatggaaccgcctggatctggattgatcccaggaggagcaggcaggcccacagccgtagcatgtttggtatcacaattttaatctggagcctcggttgggagctaagtaaatgaacgagacaagctgaaagttgctgtaatcaagggaatggctgaagctggctgaatggctggttggattcgagaaatttcaccgcgatggatggaaaaacagctgagaaaccgaagaaatacaggttttccacgcagcgctgcactcgcgtatgtaggtgactgattttgggagtgagagcgacggtcgacgaagaaaattttccactgtcttcacgcattaattgtaaatatgctacggatagacgacatataccgcctgtcactcacttgtaattattgtcaattgtcttgtttttacaaaaattggcacacactcaattatcaaatgtctctggctccttttactgcagttaatcgtaaaaaaggggcacttgtggcactcacgaaagttgttatatgttgcttgatccgacgatgttgccgcttcaagtcgcagtttaaaactaactgcccaagaacgtcgagcatctggtatttataagctgctctgccgcagtcgccgtcgattcctctgccgcgatatcaacgcatgtagtgatcatgggagctttgggagaacagagagaacttttggggacgctgtgaaatcggtaatagctctatatatgtatgtatgtgtgtatttacatatgtatatgcaaatagtgcgggtggcaggaggttcgtacaaattgtgaaagtgccagctattaacacttcatagagaagcgagcgaaacgaagcacttttattaatcatagtacatttcactcaaaatactgtagaatttgggatacaaaacccaaactaaaacggtgtagaatctgaagaatatatcctataatataggactcatatcatttcagactttggcttggcgagcatttcaaactacttattcatttcgagtattttcaatttcctagaatcattttctgtttaaactgcacctagagcgtttctggcaatgtcctacctgtatttgctagccaggtgtagtgcgcacttggaatttccgatattcccgtaacctctaacacccatcaatcactgtggtgtctggtcggttccgccttattaggagtctcctcatattttgaaactgttccgatcggtttttattgttttgtataaacaagatgtcagcttgtagctacatgtgtagatgaaattgaatttcttggaactgttagaagactttataatgtgttcttatatttgattgctcattgttttgattttagtcaatattagatgcccgttttttacttattaccaaagtcaagcaaagtatgttgttattgaaaaaccatgaaaaatcgtaatcatccgtttctgaaataaatatttattcattatttacaatatttatttgtgctattaatgtaggtgtatatatattttgtatacgtagatgtaccacaactgaaatgtatctttaagtatattcgttttaaatatatt

SEQ ID NO: 26111 - DNA, 2692 bp, DROSOPHILA
ttttaaactgcgacttgaagcggcaacatcgtcggatcaagcaacatataacaactttcctcccaaccgaggctccagattaaaattgtgataccaaacatgctacggctgtgggcctgcctgctcctcctgggatcaatccagatccaggcggttccattctacggcgacagcggatacgacaccgagttcgtgccactggagcaccagcagcagccgcagggacgccaggagacggcggccaccgttcccgctcaaacccccagcggtgtggagcagaagccgttcaatgtggacaccatcaccacggatgtgaattccccaaatccggccatcttcttccagcaatcgttccccttctttggcaatgagttcttcaattcgttcggaggctttggctttggagctgcccaggagccctggtggaagggacccaatgtgtgcaccgaaaaggaggaagacgagactgtggccagtgaaacggaggcagaagaaaccgtggacacctttggccaggaacgtgatggcgttaccaacgtggtgcgatccccactctttggccagttccagttcagcgttaactcctgcgccgagaagcccaacaagcacgtctgcaccaagatcgtgaatcaaaatggcaagaagaaaacgctgacgctgacccgccagtgctgctatggatatggacgccccagaaacgctgacttcacaacgccctgcgagaagatcgacatcaaggacgtggaggccacggccagtgacatgggtgccaagcagttcctggagagtgcacgcaccgccggtgagctggccgatatgctcggagcaggcagtggcaagaaggtgaccctcttcgtgcccaacgacgccgccttcatggagtaccgtggtcatcatcagcaggagaataatgtggaagatgccaaggccgaggcttccaagccatccatctacaaactgcacgctgttctcggcgaagttcagctggaggatgtgcccaatgagaagcttctgcagacggagctgcctgaccagaagatccgcatcaacagctaccagctgcctgcggctttgggcctggaaccctaccgctttgccgccaactgtgtgcccatcgagaagcacgacaagctctcggagcaggcccttgtccacactctgggcggagtcctgaagccgctgaccaagaaccttatggatatcatcagggagcgtgcggatatgtccattatgcgcaccgttctggagaagaccaacctgagcgccatgctagaggatgacaagccagtgaccatctttgtgcccaccgatgccgccttcgacaagttggaacctcatctgcgtcgagccctcaaggaaggtcgcggttgtgcctccaacatcctgaagaaccatttgctggacctcaccttctgctcgctggccactgttccgggtgccaagacgacggcctacaatctactgggagaacccctgctcctcaaccgaacccaccgcgctgcgaatcagactggaccgactcccatctacatcaataacttggccaaaatcattgatgccgatatcatgggcaccaatggtgtgctgcacgtaatcgacaccatcctgcccaccgaatcggctctgcccatgacctcgctgatgtcgcaaaagaacctgaccatcttccagcgattgctggaggcctccggctacgatgatcagttcgacgatctggacaacgtgaccatctttgcaccaactgacaaggctctgcagaatacggaatgggctcgcatgctcaaggaacagccggagctgctgaatcataacttggatctgctggagttccttaactaccatgtggtcaagcccatgatcaagacctgtgacctgtcggagaagtccctgcccacggttgctggatctagtgtgcgtctgaacctgtactccacccatgctctcttctcggacgtgatgaaccgggcaacggtaaactgtgcccgtttggtgcacttcgatgacgagagctgcggatccgttctccaccaggtggatcgtgccttggcgcctcccaagaataacatgcttaagctgctggaggctaatcccaactacagcaagttcctggagctggttcgtaaggctaatcttacacagctgctgtccaacgattcgaggagtctcaccctgctggtgccaaagaacgatatcttcgaggagctgaacgagtccggtgagggttcaaagcccgccgatcccatggccttggtcaaaacccatatcgttgaggatgttgtctgctgtgccggcattatcccaaccaactggccatttgtccgctccatcgagtccatctctggccagcatctgcgtatcacccgcgatcgtcgtcccaagatcgagaacgccggcgtcaccaagtgcgatgtggtggccaccaatggaattctccatgagatcaacgacatcatcgtgccacgcccacagcgccagcaacagcagcgaccccagctgatcccgcccggagctggctatcagccacagggcgatttcgatgtcttcttctgagcggtgctcgtccccatctcatgcatattgatatataaagcagatatttatatttactcttaacgatttgtcaactgattggaagccgcaaaaagctcagaatctcctctgataaataaaataaatagtattaaaacaaaca

SEQ ID NO: 26112 - protein, 816 aa, DROSOPHILA
MLRLWACLLLLGSIQIQAVPFYGDSGYDTEFVPLEHQQQPQGRQETAATVPAQTPSGVEQKPFNVDTITTDVNSPNPAIFFQQSFPFFGNEFFNSFGGFGFGAAQEPWWKGPNVCTEKEEDETVASETEAEETVDTFGQERDGVTNVVRSPLFGQFQFSVNSCAEKPNKHVCTKIVNQNGKKKTLTLTRQCCYGYGRPRNADFTTPCEKIDIKDVEATASDMGAKQFLESARTAGELADMLGAGSGKKVTLFVPNDAAFMEYRGHHQQENNVEDAKAEASKPSIYKLHAVLGEVQLEDVPNEKLLQTELPDQKIRINSYQLPAALGLEPYRFAANCVPIEKHDKLSEQALVHTLGGVLKPLTKNLMDIIRERADMSIMRTVLEKTNLSAMLEDDKPVTIFVPTDAAFDKLEPHLRRALKEGRGCASNILKNHLLDLTFCSLATVPGAKTTAYNLLGEPLLLNRTHRAANQTGPTPIYINNLAKIIDADIMGTNGVLHVIDTILPTESALPMTSLMSQKNLTIFQRLLEASGYDDQFDDLDNVTIFAPTDKALQNTEWARMLKEQPELLNHNLDLLEFLNYHVVKPMIKTCDLSEKSLPTVAGSSVRLNLYSTHALFSDVMNRATVNCARLVHFDDESCGSVLHQVDRALAPPKNNMLKLLEANPNYSKFLELVRKANLTQLLSNDSRSLTLLVPKNDIFEELNESGEGSKPADPMALVKTHIVEDVVCCAGIIPTNWPFVRSIESISGQHLRITRDRRPKIENAGVTKCDVVATNGILHEINDIIVPRPQRQQQQRPQLIPPGAGYQPQGDFDVFF

SEQ ID NO: 26113 - DNA, 5698 bp, DROSOPHILA
agccatcgtccagaaaccacacatcacgatgttgaaccacaccagccttaatcagtacacaaccgctgtccggattacgtggtgctatccaggataccgcgatatagatcttggcattcgtatttgtgttctccaccatgttctcacaactggtactgaatcgggtgtctccgactcccagcagttcaaagtgaccggtcatatcctgaccaccgaaggcagccgacggatcctcagcctcgaccaccaaggtgaagctcacgaatttcatgtttattggacaggataacgaaacttatgatgataataatgttgaagtaaaagcttcaggacaactcgagactctcaccattgtactgatgttctggcacataggtctctggattgccatcgataaggatcttaaagttatcatccacaggcgatcgagggccactggcaccttggggtatccgattgcagactcctctgacttcggaagacagcagaatgaggagcacgatatggcgaagcatctcttctcaatcttagcgatccgtactgggtcgaggctcaacggcgactgaccaaaactgatggctagccatctccattaattgatgagcatttccaatttatcaattatcccttaaatggcgctctcggcgttgacagcttatggcatcttgattgagttgtcttcaattaggaatggtttgtttttatggcaagcttttcaattgatgaattgtgcccgggttctttgaacttgcaacccggcgaaaaatcactcgtaaactggccactgtttgcttaatggaactgggtcaaggttaaactcaatcggaattggaattaccacgcgaacacaattctgttttattgtttttaatacatatttaatctgttgcgagaagagctagtgtaggtagtctggaatttttcatatatttaacgatatccattggtaatgattacatagttggattagaactaatacttgtagcagttaatggtatgttcaccaccgctctggatcatcgttgctggtcagctggcaaggcatcatcacgcacttttccatgcggacgcgatccttgcacttgtagctcagatcggtgttcattagggttcgggttcgttggcgaacggcattatcgccacacgtggcggtgcatggtgtccaggcggaccactccgagtagcgacactcgtcctgcggttccggttgcggagctcttaccacatgccttcgctctccaaatccccgtccactgattgagtacatgtcatcgcaccgctggtagcagcgatccaaacgtaccaggtgcttgggacatggcttgcctccatacttcggagtacggagcacccgacgcgttcgcaattggaagccatcgccgcaggaggcgttgcaactgtgggaaacccagtcagagacgagacaatcaatggctggaatgccatcgtgctgcagttcctgtttgtggcgcggcaggcgacatgtctcctcgcactcctccttcgacttgaatttgttgcgatttgtatcacaacgatccgaccaatagatggcacactggtcactcacatggtcgtagtaccagaagttggccacatcgttatcccgacacggactgtcggtcagctcgtcgtagcagaagccgggaacaatggtatcgcagctaggattggtgcagttcacctcctcgtgcagcttgatgtgtcgacagggatcctggccgtcatcattgggatccgttactccgtacacctggttgttattccacaccttgcgaatacgttgccgctttccatgtccaccgcatggccccatgcacggcgagaaatccgaccatggagtgaccccgcaaaccggtggtatgtaatcctcccgatgctgactgtaactctcgaagttgcggaatatggagcgtttctcagcggatccacctccgtcgccaccggcctgttcctcctccggttccccagcaccaccttcgttctcgatgtccccaccgcattccattgcctcgcaaatcttggtctcatgcagacgcgccctgcttgccttctggcacttcttcttggccttcttgtttagatagtgtcgggatcgggtcatttcgccggttccacaagtcacggtgcacgaagaccactccgaccagtcagacagaccgcactggggatcgtcgctgctacctggtgatggcgccacctccggctcgccgccttcagctgtctcctcattgaagccagcgcacttgtgtcccacgcagttcttctcctcacgcagggcattgttgcaacgatgacgctaaggtaggtgtcaaaatgtatatatagtatgggatccaaattatatatgtcgtcttaattaccgaagccaatgcagggttcttgaactctcggattctgtattgcttgccgggaccgcactttgtggtgcattcatcccatctggaccacgagtttgtggcgcactccggcggtacctgttccgctacaggattaaagtatatagtatgtatattcacaacatcaatatatggttgcatttaacttacaatcggaggactcgcagttcttttcgtagagtcgtcttcgattgatgtgcagggtggccaatggcttcatctgggcaccagtgggatcataaaagggcgaacggggatcgttggggaaatttgatttgatgcggcgcacaacatctggaggcacctgtggctggtcagcggactgaaaagtattcgtgattgactctactgaagactaaatcatggaaatcgtcttaccatatatgatggaccactatcggtgcccgcatcccagggatataggttgtgcaccttgttctccacccaggaacagttgggcagacatagctcgaggccggatacaccaacgatccagtctggagagggatccaccattgatacgagggagatcaaatggtggttggagtcgacgcgaaaaacggcaaatgttttgcccgtaacattcggataggcaatgccccttgccttgatgatcgtgcgaatgtgttcgctctgatccttcagctcactctccaaggtccttgtggagccatgctccgccacctcacgcagcccctcgctggccagctctccatactgccagaatctgtagtccagtgtgtgcgaggcaccaatgatatcgctgaatctggtgcgccagctattcgctggaaagtccttgggatgtgtgtgacgcgaccacttgccttcgaaggtaagctgaagtaaggaggtgttaataccatttcaataatgagttaaaagagtcccacctcatatttggcctcgtcacaggcacagcacggatccacgatgctgggctgggtgtcaatgtcgtccacctcctcctcgcacatacgcttggtaaggaagccatcatccatgaaccacacatctcgatgctgcatcaccgtagccctcagcaggatgcagccctgtcccggactcgatggagccacccagaacacatccacgcgtgtcttcacgttcgtgttggtattctcgacaagatttgggcagcgcggactgaaacgggtctcggcgagatcggcgatctcccaggtgcccagggcattggcgtcaccatcgccgtcaccactctccaaatccagggccagcataaagctaatgaaggacaagccagaaaatgcactgaggctaactgaaaacgagcagcgaaagattagagaattgaaagaaaaatctagaaatttgtaaatttaatttaatttaatgcttaatttaatgcactcaccattatacctttgaccgggcacataactctgcgtatttccgtttacggacagcacatagttatcatccaccggtgacttggctgctgtgactcccggtgggaccctaatgcagccctcgatccggggaataacacccactaatgcgagaagaatagtgaaaccttccagagctttcatttcaaagagctgcaatgcaaaattgagtgggaatacaaatttacaatcatttgatgcagccacgtggttgtgggggaaaaaactatttctggccagcacttaattgtcttaattatccgcattggtatcgaatgtcaatggcaaccaatggagcctacttccagtttcaaactgaacttgaattcgtagaaatagccttcaattgaatgactttgcgtgatgtcacacatagtgcatattgctattttcgcagacactttccatttcctttgagatccaaattatgccagctcaattgccatgcggaacttgaactaggcgggttgttggttgtttaccccttgaaaatcggatcgcattgcgtatatacaatatatagtctgtactatatagaccgtctacgtcactgattaaattcaattgaaaaacgcgccgactgtctacagcgaattcgaatacaagggggtgacaaacgtccatttcccatggatctaaatcattaaagtcacttttagggcttcttcacctcagtactgcacttatattgtagcacccactttcactagcacatcatgtatgttaatccagttgattaagttattttgagaaaataaactaatagcaaggtggtacagattgttttttcatactcttgttactcagtattgatggatcgtaaatgaaacaatctcgaaatatatgcttttagagggaaatccgaactaagaacttactcggtggacgcacgaacagcaactgaatgcaaatttcgccgagtcgattattggatggacgatgtgcatcattcgggaccgacgaatggattacatggagaacctcagagagggaaaaactgctctctacttttccctcccatttagcttagtttccgcttcttttgcagattcgcatttgttgatagaaaccattagttttcatacgctcattctaaacaaacagaccccaaaaacaccgggtacattggaactgaacaagtgtgctctgagtttgaattcatgttacttccacgaaccacctcgtttggattggtcagaaagcatttttgtaccatttacactagacgtagttcaactggaaatatttagaaacaaattttctatactattttttcctcattttgaacacaaaaatcgtttacaaaaaagcgttgatttccgaaactttagatatgaattcttccagcgtgacgccgcgttcagttcgtagtaagtacatgtaccttgaacgctatacgaatgtgtgcttcaaatgctcgttatccttgttaggtaacaaagcattcttgctgaggacagctggaaaggcggaaaagcaagcctcagacaaagctacatgggtgagtgagatagaagaaaagggtttagttttttcaaatgctttacatccccgtcccagtctcgcacttcttcttgtggtggcgtcttctctactcctcccacccagaatggcgacggaagcccaaacaaaggtaggctcagtcacattccaaataggcgtggagcgagtcggtcgtctatccattcgcgaaaaacttctctggaacgggttacttcttcgacgaaagcgcgcccgtgtgtcagtacgtattcgttgcccaatcgacgggtcgagcccgagcataaagtagttgagcccgatcggaaaactgatatcgatgagttgaatccccccaagcggaacgtggttcccataaagacgcatgcccagtcagcacaattggttaag

SEQ ID NO: 26114 - DNA, 2646 bp, DROSOPHILA
tgcgtccaccgacagctctttgaaatgaaagctctggaaggtttcactattcttctcgcattagtgggtgttattccccggatcgagggctgcattagggtcccaccgggagtcacagcagccaagtcaccggtggatgataactatgtgctgtccgtaaacggaaatacgcagagttatgtgcccggtcaaaggtataatgttagcctcagtgcattttctggcttgtccttcattagctttatgctggccctggatttggagagtggtgacggcgatggtgacgccaatgccctgggcacctgggagatcgccgatctcgccgagacccgtttcagtccgcgctgcccaaatcttgtcgagaataccaacacgaacgtgaagacacgcgtggatgtgttctgggtggctccatcgagtccgggacagggctgcatcctgctgagggctacggtgatgcagcatcgagatgtgtggttcatggatgatggcttccttaccaagcgtatgtgcgaggaggaggtggacgacattgacacccagcccagcatcgtggatccgtgctgtgcctgtgacgaggccaaatatgagcttaccttcgaaggcaagtggtcgcgtcacacacatcccaaggactttccagcgaatagctggcgcaccagattcagcgatatcattggtgcctcgcacacactggactacagattctggcagtatggagagctggccagcgaggggctgcgtgaggtggcggagcatggctccacaaggaccttggagagtgagctgaaggatcagagcgaacacattcgcacgatcatcaaggcaaggggcattgcctatccgaatgttacgggcaaaacatttgccgtttttcgcgtcgactccaaccaccatttgatctccctcgtatcaatggtggatccctctccagactggatcgttggtgtatccggcctcgagctatgtctgcccaactgttcctgggtggagaacaaggtgcacaacctatatccctgggatgcgggcaccgatagtggtccatcatatatgtccgctgaccagccacaggtgcctccagatgttgtgcgccgcatcaaatcaaatttccccaacgatccccgttcgcccttttatgatcccactggtgcccagatgaagccattggccaccctgcacatcaatcgaagacgactctacgaaaagaactgcgagtcctccgattcggaacaggtaccgccggagtgcgccacaaactcgtggtccagatgggatgaatgcaccacaaagtgcggtcccggcaagcaatacagaatccgagagttcaagaaccctgcattggcttcgcgtcatcgttgcaacaatgccctgcgtgaggagaagaactgcgtgggacacaagtgcgctggcttcaatgaggagacagctgaaggcggcgagccggaggtggcgccatcaccaggtagcagcgacgatccccagtgcggtctgtctgactggtcggagtggtcttcgtgcaccgtgacttgtggaaccggcgaaatgacccgatcccgacactatctaaacaagaaggccaagaagaagtgccagaaggcaagcagggcgcgtctgcatgagaccaagatttgcgaggcaatggaatgcggtggggacatcgagaacgaaggtggtgctggggaaccggaggaggaacaggccggtggcgacggaggtggatccgctgagaaacgctccatattccgcaacttcgagagttacagtcagcatcgggaggattacataccaccggtttgcggggtcactccatggtcggatttctcgccgtgcatggggccatgcggtggacatggaaagcggcaacgtattcgcaaggtgtggaataacaaccaggtgtacggagtaacggatcccaatgatgacggccaggatccctgtcgacacatcaagctgcacgaggaggtgaactgcaccaatcctagctgcgataccattgttcccggcttctgctacgacgagctgaccgacagtccgtgtcgggataacgatgtggccaacttctggtactacgaccatgtgagtgaccagtgtgccatctattggtcggatcgttgtgatacaaatcgcaacaaattcaagtcgaaggaggagtgcgaggagacatgtcgcctgccgcgccacaaacaggaactgcagcacgatggcattccagccattgattgtctcgtctctgactgggtttcccacagttgcaacgcctcctgcggcgatggcttccaattgcgaacgcgtcgggtgctccgtactccgaagtatggaggcaagccatgtcccaagcacctggtacgtttggatcgctgctaccagcggtgcgatgacatgtactcaatcagtggacggggatttggagagcgaaggcatgtggtaagagctccgcaaccggaaccgcaggacgagtgtcgctactcggagtggtccgcctggacaccatgcaccgccacgtgtggcgataatgccgttcgccaacgaacccgaaccctaatgaacaccgatctgagctacaagtgcaaggatcgcgtccgcatggaaaagtgcgtgatgatgccttgccagctgaccagcaacgatgatccagagcggtggtga

SEQ ID NO: 26115 - protein, 873 aa, DROSOPHILA
MKALEGFTILLALVGVIPRIEGCIRVPPGVTAAKSPVDDNYVLSVNGNTQSYVPGQRYNVSLSAFSGLSFISFMLALDLESGDGDGDANALGTWEIADLAETRFSPRCPNLVENTNTNVKTRVDVFWVAPSSPGQGCILLRATVMQHRDVWFMDDGFLTKRMCEEEVDDIDTQPSIVDPCCACDEAKYELTFEGKWSRHTHPKDFPANSWRTRFSDIIGASHTLDYRFWQYGELASEGLREVAEHGSTRTLESELKDQSEHIRTIIKARGIAYPNVTGKTFAVFRVDSNHHLISLVSMVDPSPDWIVGVSGLELCLPNCSWVENKVHNLYPWDAGTDSGPSYMSADQPQVPPDVVRRIKSNFPNDPRSPFYDPTGAQMKPLATLHINRRRLYEKNCESSDSEQVPPECATNSWSRWDECTTKCGPGKQYRIREFKNPALASRHRCNNALREEKNCVGHKCAGFNEETAEGGEPEVAPSPGSSDDPQCGLSDWSEWSSCTVTCGTGEMTRSRHYLNKKAKKKCQKASRARLHETKICEAMECGGDIENEGGAGEPEEEQAGGDGGGSAEKRSIFRNFESYSQHREDYIPPVCGVTPWSDFSPCMGPCGGHGKRQRIRKVWNNNQVYGVTDPNDDGQDPCRHIKLHEEVNCTNPSCDTIVPGFCYDELTDSPCRDNDVANFWYYDHVSDQCAIYWSDRCDTNRNKFKSKEECEETCRLPRHKQELQHDGIPAIDCLVSDWVSHSCNASCGDGFQLRTRRVLRTPKYGGKPCPKHLVRLDRCYQRCDDMYSISGRGFGERRHVVRAPQPEPQDECRYSEWSAWTPCTATCGDNAVRQRTRTLMNTDLSYKCKDRVRMEKCVMMPCQLTSNDDPERW

SEQ ID NO: 26116 - DNA, 8454 bp, DROSOPHILA
atattcttcgaacaacagatcaacaacagatcatgcgaactaattaaatgtgatgtctaaatacttttgccaccacccaaatcgttgtctgtctagctttcttatcagcagaaggaaaattgaaaaggtaaaaagcacaacatatgtacctctcgcgtgtaactgtaattgaactctttgttttatcatcaatagtttacttatttatttgactgtactatgaaaagcatagcccggcagttgcaagctaatggtgtctaaaaacttatgcccactagtgtaattataatataaaaagtttcaagctaagagattagtttccaaagaagtcgagtcattcgagctacgcagagaagcttatcagaagtacaaaactcgaaaaaagtgcaaattccatgtctgcattctgggaaaaagtgcatgttgtcattggaatttcaatcctaaaaatatctttccagcttttttatttttcttcaaatgaacatttttattcaaattcccttatgtagaaaaattatgtaggctaataaaaaatttgtaagtattgtgtagaaagctgtaaatttttttttacaaatatacaaaatgtaaaaaactgtacgcatttgtaaaatgtatatttgatagttctttcaatatgatttgaatgacattagaaacaaaactacatttgtgtacacatttattatgtattaatttctataaataaattattattttttatacccattactagtagttattctagtaatatgggctactatattcctttgaaaatatgtgacaggtagtagggataaatattcttgatcatgatccggaaattataaaagatagaacatttatattgagtatgcagatctcgaagaccacactttagaaaacgttttggaacacttctcgcatacccatttaacacaacaaatgaaaaaggatacgtttagtggtaagggtttgaaatttctgggtaagtatattctagtaactaaatgtagaactaatttctagtccgatatctggaatcgccatagttgcgcctgcggtttgatggccgcttttcctcccgagcccgctgctccgcctgccaaatggcacggaaatcctcgcactgtggcgaattggtgtgctcctgctgcagtgcagccattcctggctgccggcatttctcgcaatcctcccaccgcctgaacttgttcacattccgatcgcactgatccgcggcatacagcatgcactcatccgcacagaagttgtagaaccaaaagtgacccgtaatagtttgatcgtggcagcgtggctgagccgtctgaaccatttggaagcagcggtaggacagcgaggggtccacatctcctccaggtgtatacatgtccggattgccaaagttgtttgccctttgccatggttcccttggcgaaaccatttcgggcgcctctacgattgagccgtatttgttggagggcctttgacgatgccaaggagcacgttccacatcctccaagcgcggatcatcgggacgtgactgcccagaccacgtggttcgttctgatttttctgcttgctggcgggctctatcgtagtttgtgggcctaagcgacggaacatctcttcccaaatttgtttgcctgttcaaggcccaattgccaatgttgcccttaagattgcccacttcgaatccaccaactgctccatttcgtgagtcatcgtagtcaccaaagttctctgcctcgggttcaagttgcggtccatacatattgcctccaattcgtcctggagaagccccgccatagggactatccatgtcggtgctgtaggatcctggtaagctaccaaggcaatctcgaccagagcattttcgcgtttcctgcagctccatgcgatgtacaccctggcaatcgaactctgcttggggattaaggtactgcctctggcgcatctcgtaaccatcgccacaggttacactacatgggctccagctgccccaggaactgagttcgcattcggcacggcgttgttgtgacggttgataaccaatcctccttggatctggctccaggtcctcaaattcctccggctcccgcatgagattattttgaccacacatctcgccctggcactcgcgctcctcatactgcgcctcattgcaattgtagacccttgcgagctccggttgcttatagacacgtcttctatactgcatgccaaccccgcatttggaagagcagtcgctccaactggaccatggatgggtgaaacattcacgcggcacatcgggatcgttgttggctgcgaatgtgatatagtttgttaaggtcttccccactaaagtcccacttacagtcctcatctgcacatcttctctcgtagattcgctggcgcttcaccgtcagaatggccatgggtttcatgggagttccggatatgtcgtagaaaggagagcgcggatcattgggaaagtcggaacgcatgcgtctaatgacatctggcggaacttggggctgatcggatgactatcaaattaaaggggaattatttactttaatcgagcatctaattatttccaaataccgtataggtgggacccgaatctgtgcccacatcccacggatataggttgatcactttttcctccatccatgtgcagttgcgcaggcatagttccagtccagtaacgcccacaatccaatccggagagggttctatcttggaggcaaaggacaccatgtggtgaatgggatctactcgcaccgaggccattgtcttgctgcttatgttgggatacgatgggccccgtgccttgattatcgtccgtatcttttgatcctgtaagagggaagatgtaacatagagtacttcccaccaatcgtttcaagcatggagtcacccgaaaattaatgctgaactctcgctccagcagacgcgaactgcaatgttccgcatattccttcatagccacgctggccagttctccggactcccagaaacgataatccgaactgtgggcggctcccagaagctcacagaatcgagtctcccagcctcgagtgggaaagtccttgggatgcaggttcctggaccagacgccttcaaatataagctaatgagaggagaattgtagaaggtaattgaggcattggtcattccgtacgggcttacctcatagcgcgcctcatcgcatgcacagcagggcacatccactgccgccggagcagttggctgactttccacatcatcggtgacctcctcgcagatgcgttttgttaaaccgccatcatccatgtgccacacctcgcgatgctgctgaactgtggcccggatcagaacgcagccactgcccggctcactgggcgccacccaagtcaagtgcatgtgcgtcttggagttcgtattggtgttctccaccatgttgatgcagttcggactgaaccgggtctcaatcaagtcgctcagctcaaagcgacccaagtcatcgttgtagctaaagtcaccattctcgttttccagtgccatgataaagctaatgtagcggtggccattgaaggcattaagagagactgaaagagaaatgaccagtcgagttaaaatctcagtattggaaacaatcaaagccgggcccttatcggcggcgaccttgaattcgaacgaatttgcaaagtttcgtgataaggccctctttttgtttactaaacaataaacattgcgcgaattcagccttagaataatccgaaagtcccatgccagcgacaatctcccacgaagttcaagcgcaaggccagtgaacccatccgaactcaccgttgtattcctggccgagaatgtacgtttccggattacccgacacgcttatcataaagttctcatccaccggagatttgggcgagcccgtgttcgctggacggcgcgtgcatatcagggagctgactctaccaatcaccagggacccaagcagaagtagctccacgagaggagcaccacttgaccaccacatgttcgtgttctttttgggagaccgtagttaccgtgtagaaccattcgacgcgagcaactgttgcaaactgagcgaaaattccgaacagacggcgagaagagaggctccggagccgacaaaacccaccgataagacagagcgtattgtttttctgacccactgattcaaatagtccgttgggctcttatcagtcgacgatgcaggaaagccaaaaagtaaagagaattgaatccataagatctctttggatgaaagtgcatttaaaaataaatcaaaagtaacgccatagtattttggttcgactgtcggatacccttgatgcaataatgaatgaaactggagtacaagttagtcatgattataccataaattaatatttattctcttctaatttaggcgacttaaatgctttaatttgttcagccgccataccgaccgcgtctggatgtgtcgtatctgctcctggtctgcgacatgggttctccaatatcacctgcttcactggtttctccataggatctacctcctgctagatcataggaccttccaaccggttgatcataacttcttcctcttgataagtcataggacctgtcttctggttggacatagcttctacctgtcgataagtcataggacctatcttctggttgatcataggatccacctcctgtttgcttatatgatctaccaaatgttcgatcataagatttaccaaccttttgatcatacgatctaccttctgtttgaccataagctattccactcgtttgatcataaggtctacctctcgtttgtttttggtcataggatctccttccgtacaagtccatggcatcgttttcggatcgctccatgtttatttggggctgcagacaggtgccctcgcaggccgtcagggtacggaatcggtttctattctgatcacagttgtccgtggtgaagatcttgcactcgtgatcttcgtgatcgtagaaccagtaattgctctccaccaccggtttggcgaaacagggaagagtcgaggcatatggcttttcaaagcaataatcttgaaccacattatagttgccattgatatcgttggtatttccctccacagtctcctgctgattgggataccgacttccaaagggagtgcgagatgtaaaactaggggtagtgtaatcattgtaagcgtccttgttgttatagtccgaattgaagtcattgtagccgggtctattgcccacaagcttgtcattgctgtagctatttgtcggaggaaagcccttgtcataaccacccatattgtcagatggattatacgcaggtctctgaggattttctatctgatcgaacggtaagtttggggactcctgtgcgttatctctagggttggaaagagatttatctttccacgaattgtagggctttctattccacgcctggttgccggaacctagactggaatgctcctgtttactgttccaagaagtggttttgcccatgtaaccgccgtgatccgtctctccgaacacatctggttccggaaagccatcgagttcgccattatccggaatggtgccaccacaatctgatccaatgcactcccgagtttcctcgagcggtattcgcatcacggacaaacagcgctgcctggcctgcggattgtaatagtcccgggtacgtgtggaagatcctctgccgcatgtcttcgtgcacggtgaccactcgccccagttggtcagctggcactcggccattgagccactacttgggggattttccatgcccaggccaggctcctcgccttccagttcctcctccgctgccccacattgggttccctggcattggcggaactcctccaagcgcctatcgcagttaaagttggcagctagattgggattcttgaagctacgctgacgatgagagtagccctgaccacatcgcgtgctgcagttggtccactcgttccaagggtgtacagcgcactccagcggtccttcctggggaactaatactaaagattatgaacagcacgtgcagggattacaataacgatcacttaccctcttcgcactccctaatgtagagtttcttccgggtcaagtagagtgtggccaagggtttcattggggcaccggtgtcatcgtaaaatggcgaacgatggtcgctgggatacgaagatgttatacggcgcaccacatccggtggcacttgtggctcatctgaggactttgaaggagataaatataatgcatagtgggctatttttcgcctaccatatacgatggtcccgaatcggtgccgatgtcccagggatacaaattcaagacctttcgctccagccacgtacaattgctcaagcaaagctccaatccagccacgcccagtatccaatcgggtgaaggatcaatcttggctgctagcgatatctgatggtgtactggatccagacgagcattggccagggttgtgccaaatgttttcggacgatagggaattccaggagcctttattatagttctcacctcgccattctgttagaaacaccatgatgaagtggatttaatgcgataaaattgattacctacctgagtattctccctgatctcattctcaagggtacgtgtagctccgtgctcggccaactccttcatgcccttgctcgctcttcctccgtaggcccagtagcgatagctgtggctatgtgaagcaccaatcacctcgcccaagcgtgtgcgccagtcctcagagggaaagtccttccaatgggtgttccttgcccactttcgctccagaacaatctattagatacgattattttaaacacaatattaggaagagttgagaagatattccaacctcatatttggcttcatcacaggcacagcaagtttccaagggtggtgttaagctgttcagttcgtcgatttcctcgggacaaatccgcttggtcaggaagccatcgtccagaaaccacacatcacgatgttgaaccacaccagccttaatcagtacacaaccgctgtccggattacgtggtgctatccaggataccgcgatatagatcttggcattcgtatttgtgttctccaccatgttctcacaactggtactgaatcgggtgtctccgactcccagcagttcaaagtgaccggtcatatcctgaccaccgaaggcagccgacggatcctcagcctcgaccaccaaggtgaagctcacgaatttcatgtttattggacaggataacgaaacttatgatgataataatgttgaagtaaaagcttcaggacaactcgagactctcaccattgtactgatgttctggcacataggtctctggattgccatcgataaggatcttaaagttatcatccacaggcgatcgagggccactggcaccttggggtatccgattgcagactcctctgacttcggaagacagcagaatgaggagcacgatatggcgaagcatctcttctcaatcttagcgatccgtactgggtcgaggctcaacggcgactgaccaaaactgatggctagccatctccattaattgatgagcatttccaatttatcaattatcccttaaatggcgctctcggcgttgacagcttatggcatcttgattgagttgtcttcaattaggaatggtttgtttttatggcaagcttttcaattgatgaattgtgcccgggttctttgaacttgcaacccggcgaaaaatcactcgtaaactggccactgtttgcttaatggaactgggtcaaggttaaactcaatcggaattggaattaccacgcgaacacaattctgttttattgtttttaatacatatttaatctgttgcgagaagagctagtgtaggtagtctggaatttttcatatatttaacgatatccattggtaatgattacatagttggattagaactaatacttgtagcagttaatggtatgttcaccaccgctctggatcatcgttgctggtcagctggcaaggcatcatcacgcacttttccatgcggacgcgatccttgcacttgtagctcagatcggtgttcattagggttcgggttcgttggcgaacggcattatcgccacacgtggcggtgcatggtgtccaggcggaccactccgagtagcgacactcgtcctgcggttccggttgcggagctcttaccacatgccttcgctctccaaatccccgtccactgattgagtacatgtcatcgcaccgctggtagcagcgatccaaacgtaccaggtgcttgggacatggcttgcctccatacttcggagtacggagcacccgacgcgttcgcaattggaagccatcgccgcaggaggcgttgcaactgtgggaaacccagtcagagacgagacaatcaatggctggaatgccatcgtgctgcagttcctgtttgtggcgcggcaggcgacatgtctcctcgcactcctccttcgacttgaatt

SEQ ID NO: 26117 - DNA, 5049 bp, DROSOPHILA
atgcttcgccatatcgtgctcctcattctgctgtcttccgaagtcagaggagtctgcaatcggataccccaaggtgccagtggccctcgatcgcctgtggatgataactttaagatccttatcgatggcaatccagagacctatgtgccagaacatcagtacaatgtttcgttatcctgtccaataaacatgaaattcgtgagcttcaccttggtggtcgaggctgaggatccgtcggctgccttcggtggtcaggatatgaccggtcactttgaactgctgggagtcggagacacccgattcagtaccagttgtgagaacatggtggagaacacaaatacgaatgccaagatctatatcgcggtatcctggatagcaccacgtaatccggacagcggttgtgtactgattaaggctggtgtggttcaacatcgtgatgtgtggtttctggacgatggcttcctgaccaagcggatttgtcccgaggaaatcgacgaactgaacagcttaacaccacccttggaaacttgctgtgcctgtgatgaagccaaatatgagattgttctggagcgaaagtgggcaaggaacacccattggaaggactttccctctgaggactggcgcacacgcttgggcgaggtgattggtgcttcacatagccacagctatcgctactgggcctacggaggaagagcgagcaagggcatgaaggagttggccgagcacggagctacacgtacccttgagaatgagatcagggagaatactcagaatggcgaggtgagaactataataaaggctcctggaattccctatcgtccgaaaacatttggcacaaccctggccaatgctcgtctggatccagtacaccatcagatatcgctagcagccaagattgatccttcacccgattggatactgggcgtggctggattggagctttgcttgagcaattgtacgtggctggagcgaaagtcctcagatgagccacaagtgccaccggatgtggtgcgccgtataacatcttcgtatcccagcgaccatcgttcgccattttacgatgacaccggtgccccaatgaaacccttggccacactctacttgacccggaagaaactctacattagggagtgcgaagaggtattagttccccaggaaggaccgctggagtgcgctgtacacccttggaacgagtggaccaactgcagcacgcgatgtggtcagggctactctcatcgtcagcgtagcttcaagaatcccaatctagctgccaactttaactgcgataggcgcttggaggagttccgccaatgccagggaacccaatgtggggcagcggaggaggaactggaaggcgaggagcctggcctgggcatggaaaatcccccaagtagtggctcaatggccgagtgccagctgaccaactggggcgagtggtcaccgtgcacgaagacatgcggcagaggatcttccacacgtacccgggactattacaatccgcaggccaggcagcgctgtttgtccgtgatgcgaataccgctcgaggaaactcgggagtgcattggatcagattgtggtggcaccattccggataatggcgaactcgatggctttccggaaccagatgtgttcggagagacggatcacggcggttacatgggcaaaaccacttcttggaacagtaaacaggagcattccagtctaggttccggcaaccaggcgtggaatagaaagccctacaattcgtggaaagataaatctctttccaaccctagagataacgcacaggagtccccaaacttaccgttcgatcagatagaaaatcctcagagacctgcgtataatccatctgacaatatgggtggttatgacaagggctttcctccgacaaatagctacagcaatgacaagcttgtgggcaatagacccggctacaatgacttcaattcggactataacaacaaggacgcttacaatgattacactacccctagttttacatctcgcactccctttggaagtcggtatcccaatcagcaggagactgtggagggaaataccaacgatatcaatggcaactataatgtggttcaagattattgctttgaaaagccatatgcctcgactcttccctgtttcgccaaaccggtggtggagagcaattactggttctacgatcacgaagatcacgagtgcaagatcttcaccacggacaactgtgatcagaatagaaaccgattccgtaccctgacggcctgcgagggcacctgtctgcagccccaaataaacatggagcgatccgaaaacgatgccatggacttgtacggaaggagatcctatgaccaaaaacaaacgagagatcatataagcaaacaggaggtggatcctatgatcaaccagaagataggtcctatgacttatcgacagcaggaggtagatcctatggagaaaccagtgaagcaggtgatattggagaacccatgtcgcagaccaggagcagatacgacacatccagacgcgaacacgaacatgtggtggtcaagtggtgctcctctcgtggagctacttctgcttgggtccctggtgattggtagagtcagctccctgatatgcacgcgccgtccagcgaacacgggctcgcccaaatctccggtggatgagaactttatgataagcgtgtcgggtaatccggaaacgtacattctcggccaggaatacaacgtctctcttaatgccttcaatggccaccgctacattagctttatcatggcactggaaaacgagaatggtgactttagctacaacgatgacttgggtcgctttgagctgagcgacttgattgagacccggttcagtccgaactgcatcaacatggtggagaacaccaatacgaactccaagacgcacatgcacttgacttgggtggcgcccagtgagccgggcagtggctgcgttctgatccgggccacagttcagcagcatcgcgaggtgtggcacatggatgatggcggtttaacaaaacgcatctgcgaggaggtcaccgatgatgtggaaagtcagccaactgctccggcggcagtggatgtgccctgctgtgcatgcgatgaggcgcgctatgagcttatatttgaaggcgtctggtccaggaacctgcatcccaaggactttcccactcgaggctgggagactcgattctgtgagcttctgggagccgcccacagttcggattatcgtttctgggagtccggagaactggccagcgtggctatgaaggaatatgcggaacattgcagttcgcgtctgctggagcgagagttcagcattaattttcgggatcaaaagatacggacgataatcaaggcacggggcccatcgtatcccaacataagcagcaagacaatggcctcggtgcgagtagatcccattcaccacatggtgtcctttgcctccaagatagaaccctctccggattggattgtgggcgttactggactggaactatgcctgcgcaactgcacatggatggaggaaaaagtgatcaacctatatccgtgggatgtgggcacagattcgggtcccacctatacgtcatccgatcagccccaagttccgccagatgtcattagacgcatgcgttccgactttcccaatgatccgcgctctcctttctacgacatatccggaactcccatgaaacccatggccattctgacggtgaagcgccagcgaatctacgagagaagatgtgcagatgaggactccaacaacgatcccgatgtgccgcgtgaatgtttcacccatccatggtccagttggagcgactgctcttccaaatgcggggttggcatgcagtatagaagacgtgtctataagcaaccggagctcgcaagggtctacaattgcaatgaggcgcagtatgaggagcgcgagtgccagggcgagatgtgtggtcaaaataatctcatgcgggagccggaggaatttgaggacctggagccagatccaaggaggattggttatcaaccgtcacaacaacgccgtgccgaatgcgaactcagttcctggggcagctggagcccatgtagtgtaacctgtggcgatggttacgagatgcgccagaggcagtaccttaatccccaagcagagttcgattgccagggtgtacatcgcatggagctgcaggaaacgcgaaaatgctctggtcgagattgccttggtagcttaccaggatcctacagcaccgacatggatagtccctatggcggggcttctccaggacgaattggaggcaatatgtatggaccgcaacttgaacccgaggcagagaactttggtgactacgatgactcacgaaatggagcagttggtggattcgaagtgggcaatcttaagggcaacattggcaattgggccttgaacaggcaaacaaatttgggaagagatgttccgtcgcttaggcccacaaactacgatagagcccgccagcaagcagaaaaatcagaacgaaccacgtggtctgggcagtcacgtcccgatgatccgcgcttggaggatgtggaacgtgctccttggcatcgtcaaaggccctccaacaaatacggctcaatcgtagaggcgcccgaaatggtttcgccaagggaaccatggcaaagggcaaacaactttggcaatccggacatgtatacacctggaggagatgtggacccctcgctgtcctaccgctgcttccaaatggttcagacggctcagccacgctgccacgatcaaactattacgggtcacttttggttctacaacttctgtgcggatgagtgcatgctgtatgccgcggatcagtgcgatcggaatgtgaacaagttcaggcggtgggaggattgcgagaaatgccggcagccaggaatggctgcactgcagcaggagcacaccaattcgccacagtgcgaggatttccgtgccatttggcaggcggagcagcgggctcgggaggaaaagcggccatcaaaccgcaggcgcaactatggcgattccagatatcggactagaaattag

SEQ ID NO: 26118 - protein, 1682 aa, DROSOPHILA
MLRHIVLLILLSSEVRGVCNRIPQGASGPRSPVDDNFKILIDGNPETYVPEHQYNVSLSCPINMKFVSFTLVVEAEDPSAAFGGQDMTGHFELLGVGDTRFSTSCENMVENTNTNAKIYIAVSWIAPRNPDSGCVLIKAGVVQHRDVWFLDDGFLTKRICPEEIDELNSLTPPLETCCACDEAKYEIVLERKWARNTHWKDFPSEDWRTRLGEVIGASHSHSYRYWAYGGRASKGMKELAEHGATRTLENEIRENTQNGEVRTIIKAPGIPYRPKTFGTTLANARLDPVHHQISLAAKIDPSPDWILGVAGLELCLSNCTWLERKSSDEPQVPPDVVRRITSSYPSDHRSPFYDDTGAPMKPLATLYLTRKKLYIRECEEVLVPQEGPLECAVHPWNEWTNCSTRCGQGYSHRQRSFKNPNLAANFNCDRRLEEFRQCQGTQCGAAEEELEGEEPGLGMENPPSSGSMAECQLTNWGEWSPCTKTCGRGSSTRTRDYYNPQARQRCLSVMRIPLEETRECIGSDCGGTIPDNGELDGFPEPDVFGETDHGGYMGKTTSWNSKQEHSSLGSGNQAWNRKPYNSWKDKSLSNPRDNAQESPNLPFDQIENPQRPAYNPSDNMGGYDKGFPPTNSYSNDKLVGNRPGYNDFNSDYNNKDAYNDYTTPSFTSRTPFGSRYPNQQETVEGNTNDINGNYNVVQDYCFEKPYASTLPCFAKPVVESNYWFYDHEDHECKIFTTDNCDQNRNRFRTLTACEGTCLQPQINMERSENDAMDLYGRRSYDQKQTRDHISKQEVDPMINQKIGPMTYRQQEVDPMEKPVKQVILENPCRRPGADTTHPDANTNMWWSSGAPLVELLLLGSLVIGRVSSLICTRRPANTGSPKSPVDENFMISVSGNPETYILGQEYNVSLNAFNGHRYISFIMALENENGDFSYNDDLGRFELSDLIETRFSPNCINMVENTNTNSKTHMHLTWVAPSEPGSGCVLIRATVQQHREVWHMDDGGLTKRICEEVTDDVESQPTAPAAVDVPCCACDEARYELIFEGVWSRNLHPKDFPTRGWETRFCELLGAAHSSDYRFWESGELASVAMKEYAEHCSSRLLEREFSINFRDQKIRTIIKARGPSYPNISSKTMASVRVDPIHHMVSFASKIEPSPDWIVGVTGLELCLRNCTWMEEKVINLYPWDVGTDSGPTYTSSDQPQVPPDVIRRMRSDFPNDPRSPFYDISGTPMKPMAILTVKRQRIYERRCADEDSNNDPDVPRECFTHPWSSWSDCSSKCGVGMQYRRRVYKQPELARVYNCNEAQYEERECQGEMCGQNNLMREPEEFEDLEPDPRRIGYQPSQQRRAECELSSWGSWSPCSVTCGDGYEMRQRQYLNPQAEFDCQGVHRMELQETRKCSGRDCLGSLPGSYSTDMDSPYGGASPGRIGGNMYGPQLEPEAENFGDYDDSRNGAVGGFEVGNLKGNIGNWALNRQTNLGRDVPSLRPTNYDRARQQAEKSERTTWSGQSRPDDPRLEDVERAPWHRQRPSNKYGSIVEAPEMVSPREPWQRANNFGNPDMYTPGGDVDPSLSYRCFQMVQTAQPRCHDQTITGHFWFYNFCADECMLYAADQCDRNVNKFRRWEDCEKCRQPGMAALQQEHTNSPQCEDFRAIWQAEQRAREEKRPSNRRRNYGDSRYRTRN

SEQ ID NO: 26119 - DNA, 11157 bp, DROSOPHILA
gcaaaggagaagtacgttcccaatatttattgcgaaggctgccatactgttggtaaaacgaaacaggcaggtaaaaatacttataaaatataaaagaattcattaatgaatttcaggaatggccaaaagagttgtatgtatttaattaaatgtatttttattacttaaatgtcaaagtgcaataacaaagtaattgcgaacgtcggacttaaaactgtaaaaaaaggtgtccgctctatggtctggaaaacagcttgaacagctgtttaatgtttacaaaacattccgatagcaaaaattttgcgaaaaccaaaacagctaaaaacgaaatcaaaagattttgcccaaatcgaaataaaaaataaaaattacaggagcatgattgactataaattatcgctgtgcatgcttggcatctcttacatcagcacaaaacacaaggattggcagaattggcgctttttcaaatctacagcagaacacaagatcagtagagatgttgaaccatcggtgcctgatcccacgcagtagaaactttcccctttcgtttaacagttgcctcttttaaatctgttccagtctcatgttaagctttgttaacgatgggaaattggttatagcatgattgcactcgttttccgaaatgaggatgattccatttccacattttcgaaatgtatttgtggaccgtatcatatgaactttatttatcactaaaactaatagaaaaatatacacattctttgataggattttctttaagcatatgaaaaatttaattcatatcggtttacaaatttgtagtattatttaattttatgttttgcatgtatatttcaagctataccgatataattacagagattacagccagcttgttctatatttagaagctagtcgacgtggaatcaagatatattttgcgttgtaaaaaaatactaaagtttagtatgttgcaaaaaacccaaatatttaggcatcgaatacccatgccaaacaagcagaataaccttttcaatattttgagtcatttggtatcgcgttttataaaaattacttgaattcttttgttttcctcggcttttagtgaaacaattcgactatcattaaatttatgtggcgtttaattaatctttcgtattatttcaatcagaatttttttaacatattcactacattttcttagagaaccgtttgtcatatttaatgtatattatgttccctacttaaatatgacaattattaattctgtgtgtgtacgtatcaatcatccgtgatattatattcatgtcttatattgcctacatatggaataatggcagtaaaaatgctgttctttcagatacatcaaatagcctcagggaatgcaacgctcaggaaacatacaaatcttacctaacacatgtgcctacaattatcctggcatttgaaatgctttaatactaactttaaactcatgcgtatgtggattatagtattgtaaatatggcatacgaacgttttggaattattcttcaaagtgaacagtacgatgaagatataggcaacacaaaagtcaatcagaaaatgaatgaaggtaagttcggattttacaggcatgtctatgttttgaaaatcgaattatagcaacaaagcacttttttataaagcgtaacaacaaaatactgtttaatgaagcataaaatataaacatatttacttgttatacccgttagtcctagagtaaaagggtatactagattcgttgaaaagtatgtagaaggaatcgaccacagtattcttactcatgatcactagcgccaagtcgatctgcccgtataaacgttgagatctcgggaactaaataaaagatgtgaaagttaagataaagcatgcacattctagagaaaattaccacttctactccaacgcccacaaaccttcaaaaactgtcaaaactaaaattttaatattgtttaagccgccatactaacatttttaagccaagcccagatcgttaatgtcagcttttaagcgccttggcatcgaagaaatgaagtatcatcagattgttcagtaatatgttaggttaaggtttttccaaaggaggcaagactcggaagactatcactcaaaacacagtgttgacgggtgtgaggctaatcctcatctctcgtgagttacctgtaatggcggagacgccgggtacccatgtaagcgttagtttgggtgtgctgtagacgttcaagttcaataatggtgttgctcacaggcacgctcttgctagtgttcgcttgaaatgttaatatgccgcatgactgtccacaatcaaagctgttattctgattcccatctgactcacatcgttctttaattgctaaactgcagagtccttatacccttgtgagcgttagtttagtgtgccgtagatctcccagttccatgatggtgttgcgcacaagacccgttaccttttcgcttttggcttaaagatttaaagaatattatatggatatgtacggatttgcggatatcctaatgtgcttttgaagacatagaattttaatttaaagtatttttaattagctgcgcaaataattttgtatagagaatatagtagctaatttggttgaaaatttatcacgctatataagtattcttaaactcgcaaagtaaaaggggtttcgaaaaacaatggcaaccgaaggaagcgttcccgaccctataaagtatatatatttttgatccagtgaactacccaagtcgaactggatatgtctggcagtatgaatgtcgagatctcaggaactaaataagctagaaagttgagattaagcatgcagatttcagagacaaatccgctcaagactgctatttgattatttttctccactagttgcgtaatgggtatctgatagtcggagaactcgaacattttctctcctttgttcatagatttaaatatcaacatgctgtgcatgcttgcttacactgatataatcgcctttacccgaaattgtctgcctgtacttgttcaatatttataaagtattaattacgttataaagtatatacattatatacactttttgtccgtttctaggtaaactagtttccaaatttgaaagaattatttctttagaggatcaatatacagctgaattcattgaaatattttccctgatccctccctctctttcgtgagcgacttttattttacttttgtagaatggacatttacttttttatggtgtttattagaatagagttgtctgatgttgtttaacgaaataaaaattaaaaagtgaatttgattaagttgatttgcatatttaaaaggacaatgcaataaataaaattttaaagagcccagaaacgaggaaataaataaaacaacaaagtataagtgtaatattagtaagatctaattatgtgttaaaaaagttataattgattgctgtaagagcggcagagagtaaagattacagataataggattacgtctattatagtcagaacataacatgaacatacagaatgatttaagattaagggtatgtagtttctagtgaatatacttggaacagagaagtttcgccgaaaaaccaggtcgggactactcgtatcgtactactcgtaaacttactaataaagactgttccaagcatcgttctacggttagctagggagggtaactgaattagaattagtctactggaatgaggaataggacccacaaggcaaacattaagaattttttttggacccattcaatgatgcccagtctctgcctagccttcgttgcatacggacgatcgcgatagtctagtctgtttgttgtaacacatcaacaactcttccaatcgtactgtgcacgcgcacaatttctatttctatccaatgcacagcagtggtgacagacaattacgttacttatcatagataagctcaaccaagccgacgctttgtaagcccctcaattgttatctctcgagcttgcgaagttgacaactagtagtaacaccaatgttaccaacaccataaccacccaagctagctgttcgcaggcaagaagtgctgcaatgtctgagatgccatatttttgggcgttccaaaaactattgtctccggggttcaatctgtggcaagcgtgctgggccccacgcaactggctctacgctatgcacgagggataattatttgtgtatcaactgcggtggtgatcatgctgtaactgacaaaaactgtcctgtcagaattggaaataacccaaggctccctacttttgttgctcatggcaacactgtcagctctgaaaaaggtgaaagctttactcacggattcattccggctgaggccatcagaagcaatatttcaaccgccgatattgtacaggccaaaggccctaaatttggttcacttgcgactcaccaacaccacagtgatccaaactcaccacaagacttaggctttggaaaaaagtttcgctggaaagcgccatccaggatataaactcgagaatggacaaaatcttcaaactaattgaggagactgtagaatcaaaaaaggtttttagagaactggttcagatcttcatatcacggacgtcaaaatgacccaaccaataataaaaatcggattgtggaacgcacgagaactagctagaaactctgaggagcttcagcttttccttaggatgcaaaatattgatatcatgcttgccaccgaaacaaacgtgcgggaaggacagcgtatctctctacgtggttactccacctacgacgccagtggaaacagcagaggtggagccactgtcatagtgcactcttccttgaatcattgtccccaacccccaatctcaaccaacgaccggcaggtagcgagcgtgcagctgcagacctcagagggaacagttacttacccacccagcgagcggttgataaaagcttatattgagtaactttttgtaacacttggtggcatatttatgcaggtggagactacaatgcaaaacatcattggtggggaatctcaagagcctgcgccagaggcttgaggcaaacaagatgcgtaacgccatacgattttttggcacatggctctagaggtggctccaggctctctcgaatttttgttagagagcgagagagcgaagagcgctacagcgaacagctcttttcaacgcacaaagtgatagcagacatctgtatgtgtgcacactatgctcatgcattgtaaatttgacaaaatatgcccttcacctcagaagttcttagacgttatatctatattatttttgatcaaatggcaccatgcgaaaaattcttgttttgcattgccttaacgttattattatttgaaaatagattagaaatagccaaatctatgtacatattatcacaaaaataaatttcaaaaatgactttatataagaatatttgtcattagagtattcatcttgcggcgtgtgaaaaattaataaggcaatgattgttgagtgcttgtgtccgcacttcgtgcctcaagatatgaacaaagcaaagacactatttagtatatttattaaatcatttgacttaatatgatgtaacattaacattaatagtgtttcaaaaaaatatttcgcttttaaaaaattgtcagatgagagacaaattagaattaaacataaatatgtgtaaacggtagctaattcgagcggcgattttaacaaacaaatttaaaaagctttaaaattataatagtcagggcgcgaatttttaaaaatttttttattttatcatattgctaggaaattggcaaaaactaccctaatatgtaccacgtaaattcgtttcttcgatcagaattgatttcggcccgaaaatcgtcttctagcacaacacgcacacttatacgagttctcgtctcttgtttttactcacacaagcaagcaaattatatttttagatttcttacgctctcagcgggagtgagcggaaagagagtaattttggcagtcacaaaaaaagtggctgcatagtgccaaaccaatgtatgggccgttacgcatcttgttattctagtgtctttgcttgagggttatttcccaaaagtcttgaagactgcaaacataatcctgatactgaaaccagggaaaacgccaacagaggtagactcgtatagaccaatcagcctcctcccttccattggtgaaattatgggaaggataattctcaacagaatgcgtgaccttgagcctgtagtattggcgatacctgatttccgattcgaattccggactcaacatttcagcttgggatgagcattttgttaggacgaactttctgtgtgatgaccgatggatgcacttcgtccgttaaagtcatcgaagctggagtatctcaagaaagtgtgttaggccctactctgtactccatcttgtccgcggacatgcccacctagacagcaatcactggattagatcgtagagatgtgctgattgcaacataagcaacaccgcgatactgacaaaaagcaacagcattttcgaggcctcagatgcactgcaagagtacttggacgcattccagaattggacagagttgtggaacatctgcatcaatgctgacaaatgttcaaacgtctccttcacaggtttttaaaatgacctggttaattgctgcccgcagcaaactttaaatttacaagagcatattattgtagttccttgccatacaggtgtatggatcgctgccagaacgcaactgaataaaactcgggttcttcaggcaagaactctgaaaaagatcgctccttggtacataaggaccagagatatcgaacgtgatctgaaggtgccaaaaattggagacaggattagacgtgaaatagcgaaaaaatacactgacagactttctagtgggattcttcccatcctaatagtttagctagacgactaagtatcgcagcccagagccatcggacaagaacgagaagaagattgaaacgccaccaccctcaagacctgactgactgggacttgacttaattaattataatcttctaaatattactgcctaaacaattcatttctttaatactcataatcatataatctttttaaataagttaaatagtaaaaatcgtttaaattgataccgattagatcaagttgcccagaaagggtaatagtacgctagtcaattaaataatttagtttaataaattaaaaaaaaaaacaattgaatgctgtccgagtgaactacgttttgtggactcattacctgtgcagctttaaagcgctattaaaacacctttcggtcaacatataactgtttgtgctcgatcttttgcagcatattttttaatctgatgtattatataagaagccttcttgtgcaccgtgctagctgtgctcatcgtagtaatgttaagaatttagaaaattaagtatttgtatttgattagcctgtgtattttatttatgtatgtacatatgtatgttttatatttatttttaacgtttttttctgttcctcaggcaaccactacgacttacacagaaaaaatgcgtttgaccgaattattcattcagaatcaaaaaaaggtgataacgtaattaattacaacattcatgaaaacgacaaaataaaagcggctgacaatatattttcttctaaattgtaagttaaaaaattaagatttatgcaaactaataaaatgtttttatttttagaaaaatgaacccgaatatgagctatgaaatgaatatcaactgttttaaaaatattggatatggcgaaaatcaagaaacttcaaaagttttaacaaatagtttatcgaacaatgatattaataccgaagagtctggtgttgtcgataaaaattcacctttcctaaccttaggtacaactatacttaattcaaacggcaagtcaagacggtgggaacaaaagcttgttcatattaaaactatggagggagagtttagtgttacaatgtgggcatccgggatatcagacgatgaatactctggttcagatcaaatcgttggggcttcggatttattaaaaggaaaggaagaatttggcattgatggcttcacgtctcaacaaaataaagaataccagaaaatggagtcaaaatttacaaatgcacagacccttgaaatgccgcatcctataagctcagttcagatcatggatcatttaataaaggaaaggggaaatttatcgcaagaaaataatatttccgaaagaattttatctaagaccaccttaagctttgaagagccaatcttgcttccggattcttcaagtattgagttagttaacgaaactgccgcaatgacaattaataatcacagaactttaagtaatcatacgggcaacaccggtgatctgcatgctttgcccagctcagtgccatttcgtattggcttgcatgaggggcaagtaaatgattgcttatcaacaatatcacaatcaactcaccaagacaatacaggtaaaagtaatagaatttaaaaaatgtcagcttataatttgctttaaaatttgaataatagactcgactggatgtggggaaatgaatctttccgaagttacagtatcttatacaaatgataaaaaaatagcttgcccacataagggttgtaataagcacttcagagattcatctgcaatgcgaaaacatttgcacactcacggtcctcgagtccatgtttgtgcagaatgtggaaaagctttcgtagaaagctcaaagcttaaaagacatcagttggttcacaccggtgaaaaaccatttcaatgtacattcgagggatgcggaaaacgattttctctggattttaacttaaggtacagtaagaaattaaaacacttgtagtggctattttaccgtgaatgtaaccaaaaaatattttttccaaccgaggaagaacagaataaatatggcaaactctcagggtagtttattactgctttgaagtactgaacaagctgtgtacaagtacttattgttttatccatttgttttaaaaccaaacatttttgaatggctttttaagtttgttggagtgaaaaatgtggaatagacacagcgcaagttagtttccaaatcttgccgcgccccttttaacggtcatgcctccaagcagcccatacttttaaaccatttttaaatttgttctcattgtcttccacaatatctattaatattccagaaaaattatagaatttcggtatctgatagtcgaggaactctcttgtttttatttgttcttttgaaatatataattactggtatataagatcggctctccaaagctttctttctttttaagtttgtattgttaatttattttcaactgatgaaataagaaaagaaaatcataatacgtgattaccaggaaatatctaagtgcttgagacacaaaactattaatactttttatttgcagaacacacgtaagaatacatactggagatagaccatttgtttgtccgtttgatgcctgtaataaaaaatttgctcaatccacgaatttaaaatcgcacatattaactcacgcaaaagcaaagtaagttttgatataaaatttggctaaattgtttttaattggtttctttttaggagaaataccagtatttcggggaaaagtggttgttcaaacgctgaatcaaacagccagagtgaagatacctctgcaaactatgttaaggttgagttacaggatagtgttacagaaaaccatgtaccgtttgtggtatatgcagactgaatgtgtatatcgaccaacatttccgattccatgtctcgatcaaatttggaatgattgcaataatattaatattaatattccttttaaaccccttttaacaaatcccaaaattttataaaaattataattgattttttgaattttcacgtaaaaaaagagtcagttattagctttcatttcgaccaaattgattgagaacgaaaaccagattattgtggttttatttattactaaaaatcagatttaatgtagtacataaaaactaatataattttgccgtaactgttctttaaaatcaataattatatgccgatttctttcctgtacgctgtttgccatgcaggtttaattacatttttaattctatttttagaagtaagctcatgcaacagtgaataaaagtacgttaacagcacttttgtttaagatattacccaattaaatttttaattttgcgtccgtaattttccgtaataaaggaaaattcaattccataatacattgaattgataataatttaaaccggtgagtgttatattgggttgcccaaaaagtaattgcggattttttaaaagaaagtaaatgcatttttaataaaacttagaatgaactttaatcaactatataattgtcattttgttcgataaccttttgtaatcttcctggcaactttagtattccacgctcatagaacttctggcctttatctgcaaaaaactgaaccaagtgcgattttatagcctcatcattgccgaaagttttaccatttaaggagttctgcaaagatcgaaataaatggtagtctgatggtgccagttcagggctatatggtggatgcatcaagagttcccagccaagctcactcagtttttggcgagtgaccaaagatgtgtgcagtctagccaattctggtcgcttctccttgatggctttattcaatttatccaattgttgacattaaaaattcgaattaatcatttggttccttggaaccagctcaaaatatacccttccaatcccaccaaacagagagcaagtgtaaagttatgaccttttgtcgtgccaacccaatacgcatgacttacactctaagtgggtgctccttggacagaataacacgagttgatgatcttggtgttcttctggatccaaaactaaaattttctgaccatatttcgtctattgtcaataaggccaggggtgtgcttggttttataaaaaggtggtctaaggaatttgatgatccttacttgactaaaaccttatttatttcgttagtccgtccgattctcaagtacggatcacctgtttggagtccacaatacgcagtccactcggaccgtatattacctccttattctagtagactacttttaattaatttaccgtccctagctaaccgtagaactatgctt

SEQ ID NO: 26120 - DNA, 2403 bp, DROSOPHILA
gcagaataaccttttcaatattttgagtcatttggtatcgcgttttataaaaattacttgaattcttttgttttcctcggcttttagtgaaacaattcgactatcattaaatttatgtggcgtttaattaatctttcgtattatttcaatcagaatttttttaacatattcactacattttcttagagaaccgtttgtcatatttaatgtatattatgttccctacttaaatatgacaattattaattctgtgtgttaaaaatgctgttctttcagatacatcaaatagcctcagggaatgcaacgctcaggaaacatacaaatcttacctaacacatgtgcctacaattatcctggcatttgaaatgctttaatactaactttaaactcatgcgtatgtggattatagtattgtaaatatggcatacgaacgttttggaattattcttcaaagtgaacagtacgatgaagatataggcaacacaaaagtcaatcagaaaatgaatgaaggtaaaggcaaccactacgacttacacagaaaaaatgcgtttgaccgaattattcattcagaatcaaaaaaaggtgataacgtaattaattacaacattcatgaaaacgacaaaataaaagcggctgacaatatattttcttctaaattaaaaatgaacccgaatatgagctatgaaatgaatatcaactgttttaaaaatattggatatggcgaaaatcaagaaacttcaaaagttttaacaaatagtttatcgaacaatgatattaataccgaagagtctggtgttgtcgataaaaattcacctttcctaaccttaggtacaactatacttaattcaaacggcaagtcaagacggtgggaacaaaagcttgttcatattaaaactatggagggagagtttagtgttacaatgtgggcatccgggatatcagacgatgaatactctggttcagatcaaatcgttggggcttcggatttattaaaaggaaaggaagaatttggcattgatggcttcacgtctcaacaaaataaagaataccagaaaatggagtcaaaatttacaaatgcacagacccttgaaatgccgcatcctataagctcagttcagatcatggatcatttaataaaggaaaggggaaatttatcgcaagaaaataatatttccgaaagaattttatctaagaccaccttaagctttgaagagccaatcttgcttccggattcttcaagtattgagttagttaacgaaactgccgcaatgacaattaataatcacagaactttaagtaatcatacgggcaacaccggtgatctgcatgctttgcccagctcagtgccatttcgtattggcttgcatgaggggcaagtaaatgattgcttatcaacaatatcacaatcaactcaccaagacaatacagactcgactggatgtggggaaatgaatctttccgaagttacagtatcttatacaaatgataaaaaaatagcttgcccacataagggttgtaataagcacttcagagattcatctgcaatgcgaaaacatttgcacactcacggtcctcgagtccatgtttgtgcagaatgtggaaaagctttcgtagaaagctcaaagcttaaaagacatcagttggttcacaccggtgaaaaaccatttcaatgtacattcgagggatgcggaaaacgattttctctggattttaacttaagaacacacgtaagaatacatactggagatagaccatttgtttgtccgtttgatgcctgtaataaaaaatttgctcaatccacgaatttaaaatcgcacatattaactcacgcaaaagcaaagagaaataccagtatttcggggaaaagtggttgttcaaacgctgaatcaaacagccagagtgaagatacctctgcaaactatgttaaggttgagttacaggatagtgttacagaaaaccatgtaccgtttgtggtatatgcagactgaatgtgtatatcgaccaacatttccgattccatgtctcgatcaaatttggaatgattgcaataatattaatattaatattccttttaaaccccttttaacaaatcccaaaattttataaaaattataattgattttttgaattttcacgtaaaaaaagagtcagttattagctttcatttcgaccaaattgattgagaacgaaaaccagattattgtggttttatttattactaaaaatcagatttaatgtagtacataaaaactaatataattttgccgtaactgttctttaaaatcaataattatatgccgatttctttcctgtacgctgtttgccatgcaggtttaattacatttttaattctatttttagaagtaagctcatgcaacagtgaataaaagtacgttaacagca

SEQ ID NO: 26121 - protein, 522 aa, DROSOPHILA
MAYERFGIILQSEQYDEDIGNTKVNQKMNEGKGNHYDLHRKNAFDRIIHSESKKGDNVINYNIHENDKIKAADNIFSSKLKMNPNMSYEMNINCFKNIGYGENQETSKVLTNSLSNNDINTEESGVVDKNSPFLTLGTTILNSNGKSRRWEQKLVHIKTMEGEFSVTMWASGISDDEYSGSDQIVGASDLLKGKEEFGIDGFTSQQNKEYQKMESKFTNAQTLEMPHPISSVQIMDHLIKERGNLSQENNISERILSKTTLSFEEPILLPDSSSIELVNETAAMTINNHRTLSNHTGNTGDLHALPSSVPFRIGLHEGQVNDCLSTISQSTHQDNTDSTGCGEMNLSEVTVSYTNDKKIACPHKGCNKHFRDSSAMRKHLHTHGPRVHVCAECGKAFVESSKLKRHQLVHTGEKPFQCTFEGCGKRFSLDFNLRTHVRIHTGDRPFVCPFDACNKKFAQSTNLKSHILTHAKAKRNTSISGKSGCSNAESNSQSEDTSANYVKVELQDSVTENHVPFVVYAD

SEQ ID NO: 26122 - DNA, 4404 bp, DROSOPHILA
ttattcgacttgagcgagccacctttcagagaggcatttcggttggccaacagtcgagcgattccaccgcaacgaaatgaaaagcgaacgccaagaaactgggacacaacgcgatcgcaattacgaaacacacggcgcatgcgcgacgctcgcgaacgggtttccagctgaagagagactgaggagcagagtggagctagtgcgtccgcctcgtagccaagcgagcggcagactgaagtcagctgctaacgcgatcgacagcgaagcccggctaacagtaaaagccgttaagacaagtctctctctctctctttctctttctctctctgtctcttacgttccacattgggtccacacgaacactctgacgctcagccaccggctctcttttttgggccaacttgcatcggagagcagcatctcttggcttttgcatgtcgaggtcgtgcagttcttttggccaagtccgccaattgttgtaattgttgcattcaattagacatttttaattgatgcgcgggcattatgttttttggcattaatgggcagccgtgagtttgaactttaattatggctttggcaacaggttttatgacctatcctggtgcggaaaaacattagctaacaaactgcgtttgaaaatggacgaataaatatatatttctgctgttacaaccctactatatataaatacatcgaaatcgtttttgatccccaaaaacaaaattttccaacatgccctaaacttcctaataaatatatattttgagcagttacataaagaatttttgctgataacacatggaaagattatctcctactttaagcttccttttttttatcaataaaatcccatcaagcccagtaagatagttaaaatacccttgagtccgtagtttcttcgaaaactttctcttttcggaagccttttttcgcgtgctttcctttttaccccaaacatgcacacacgcagccagacacacacctggtcaggagctgctcacgcaccgggcgcgcgcacacacatactcagggatttagatagacatgggggggactcacatgacaagttgtccagcatgtaggtgagcagtttctgcgtgccgttcggttcgttgtagatgttcatgaactccttttgcagcggattgcccatgaggccgagtatgacgaggtggaacagcttgccgatctcgtaaggcagtacgcgcagaaagttgttgttcagcaacagctccctaaaaggaggcaagacaatggagtggcttagtgaaaagcatggatcagtgatcaatagggtctgcgcccagacagcgatttcacaatagatcaactgctaagggtgcaatagagtatgagacataataataggactaaaatacgatttaacaacgtaaatcatgtcctatgccaacccacaaactcaccgcaactggatgagctcgccgagctctgcgggaagacttcttagcttattgctggacaggtccaaagttcggaggctggtcagcatgccaacgtctgcgggcaatcgcagcagctggttgtcgttcaggtagagggcggttagatgctcaaattcccacagcgacgggctgatattgcggacgcagcctgtaaacagatgtatggtagaattaatatgatatttttcgggattaagtgtgtgatacccaccagtaatctctaggccactccagttcgtcttcttgcccgcagctatgtcctcctgcgacagaaagatctgctgccgccgattggcgctgtcgtatttgtctttgttacgagacattttataatgattgcctgttcggtatatatagaagagagttatattaatatatgtataaggtaagagataacaagttaaaatctggaattgtttcaaggaagttagggctcatgttaggagacaaaacctcgcttagcaacaaaaatgaatgctttgagttttagcttaaatgtatctaggagtattggaatcaaatcataacctttcataataaccgcctgatgataagcgtctctgcaaaatattaataaagtggtttccattattattttgtattagtaaacaaaggtgggtctgaggtccgggtttggtttacatatacagctaaggtaaaactaatagcagttcttaaacattattaattaaaatttaagtacaaggtaaaaggtcgatatggaaaataccgccaaactcaatagttggaggattttaggaaaaatctttatattttattaataaatagcattggatatgtattttggaacgttgtctatgcacctttttttaaagatacacatattaggctttaaagaactgctattggctttcgcacagctgcggatggtaaattgtaaatcataaataaatgcaaacgaaaatgattttggtaagcgcgcgcaaagtgcaagcaccaacacacacgcacacacacggacgcgtagcacacacagaaacactatacagttagaaagaagaatggcgtgggcgggcaaaacaagaagaagaaggaaagccgtatgtcgcatattgaaaatcgtgggtatcaggaacctgtgtaggattacctggctcagttcactattcctaggaagtcacctcaatcggaaattctggctcaaatttactcgccgtctctcctcgtttcgcgcgctcttttcgctctccgcctgcacttactcgaggattttgaaagaaaaaggaagccgcagctggggattcagcaatattcgatattcactgtgaaatttaaccgacttctaccgtttttggtgcctttatttgggtcctatatttgttattttattattttgctgcttttcgttcgtgtttgtcggaacagaagcgacgattctgctaatcaacctattcgttttggatcgctctttcttctgctgggcctctgcttttcatttatttatcacgcgactcgctttcatcgtcggttcttgtttttgtatacatggtgagcagtcggagttgccactcggttttatcagcggacggtatcacggcaagatttgtccaaaatgcgtgcttattcgtccaactgaagtccggcctagtgttctgataaagtgtgagacaacgtttgtttgtaaaaagaactactcaaatgggatttcagtcaaaacaaaacaagagcacatcacacacaagacgcacacatacacacaagacgcacacgcacacagatggtcaaagaggtgcagggctgaaaataaaaacacgtagatatttcgtactgtttgctttactagccacttttttcggtcaatgctttttgctgaggactcggctttcgacgcgatatattttatgtagtttagatctctggatggacgatttatttgtgaatttatgctgctgctactatgtgtaaactttcgttcttcgctttccttcgttttccatttctcttttgtgcgctggtttggcgtacgcggaaatgcccacttgctgttaatcggctatcggaaagaatttgcaagcaggggctccaactagcgtattgagaaagtagctatattttgtatgacagttaagacccctgttttttgaattgatattttttataggattgaaatcaggagctttgaattattaatttgtaaaataaaatgagtttattttgacagcaaacgaaaatacttagctagaatcgagctaaaccattaaaatctgtaaatactgactaatcgataaccttacagagtttcgatagatccattagccgcgaatgcccttaaaaagttgtaatttatttaatttaatgttgcgtgtttttaaaaaaaggttaatatgtcggggacgcaaatgtctgccttcctgagaaagtatctagccgacgaggacaaaaaaattcgtgcgcaattcaaagaaagcgatcctaacaacaaattgattctatggatgcacgaaaaaacggtaagacgcatttcattttgtaaattgaaattgtatattgtatagtatcctgtatttgaagagaataaccgaggaggacttggcacgcccatacaccgaggacgaggtaaaggagctttgtctacgcaccaaagtgaaggttgatatgaccgcttggaattgtctgtgggaagccaaaaagaggtttgaagcaaaaggacgttttgtgaacaagtctgagagattcatcaaccgaatgtatatgaaagcggtgcgcagaaagatggtccaaccgtatccggaggagtttgtggcccagcgaagagaaatagttgcagccgagactaagaagcagaacatcagccgattggatagatggcaaaagaaaaagagtcaaaacctatcagcaccagaatcctctccagacgctcatgcatcttctaatgacgcggtgcagagccacgaggaccaagcaaacacaaatctta

SEQ ID NO: 26123 - DNA, 719 bp, DROSOPHILA
aagaacgaaagtttacacatagtagcagcagcataaattcacaaataaatcgtccatccagagatctaaactacataaaatatatcgcgtcgaaagccgagtcctcagcaaaaagcattgaccgaaaaaagtgagacgcttatcatcaggcggttattatgaaaggcaatcattataaaatgtctcgtaacaaagacaaatacgacagcgccaatcggcggcagcagatctttctgtcgcaggaggacatagctgcgggcaagaagacgaactggagtggcctagagattactggctgcgtccgcaatatcagcccgtcgctgtgggaatttgagcatctaaccgccctctacctgaacgacaaccagctgctgcgattgcccgcagacgttggcatgctgaccagcctccgaactttggacctgtccagcaataagctaagaagtcttcccgcagagctcggcgagctcatccagttgcgggagctgttgctgaacaacaactttctgcgcgtactgccttacgagatcggcaagctgttccacctcgtcatactcggcctcatgggcaatccgctgcaaaaggagttcatgaacatctacaacgaaccgaacggcacgcagaaactgctcacctacatgctggacaacttgtcatgtgagtcccccccatgtctatctaaatccctgagtatgtgtgtgcgcgcgcccggtgcgtga

SEQ ID NO: 26124 - protein, 179 aa, DROSOPHILA
MSRNKDKYDSANRRQQIFLSQEDIAAGKKTNWSGLEITGCVRNISPSLWEFEHLTALYLNDNQLLRLPADVGMLTSLRTLDLSSNKLRSLPAELGELIQLRELLLNNNFLRVLPYEIGKLFHLVILGLMGNPLQKEFMNIYNEPNGTQKLLTYMLDNLSCESPPCLSKSLSMCVRAPGA

SEQ ID NO: 26125 - DNA, 11164 bp, DROSOPHILA; identical to SEQ ID NO: 1996

SEQ ID NO: 26126 - DNA, 6159 bp, DROSOPHILA
ctgaaaatggcctgaagcaaaggccaaatagttattaataatagtaaatccgataataatagtcgcgtgtttcgtattgcatgttaattatatagttcgccaagcagcgcatacaggcgattggcacattccgccagtcacaccgagccgcgcacacggctggcaggccagttaaatgaacattattccttacttttctgtccactgcactccacacgtatttgcgtagcttttaaagtagctaaattcgtggatttcaacgcacttggcgcgtcttagtcaaagtggcccagttaagcagtccaattggaaaactgtgaaaatgatgtaaaggaaaactctcaagtagtccaactgtgtgtgcgtgtgtgtgtgtgtgcgtgcggtgagtgttggtgtgtggaaattaacgtagtgtgaagaagaaaagcgaaggaaaagcgacaattgcagtccaaggcgaacagcaaaagcaactgaaggttgcccacgcccccttcgtccccgcgcccccttggaggacaactaacgggagtgcaaggaaacggcgccgccatggaggaaaagcgcatcgccgactactttgtggtggccggaatgccggagaatccgcagctgctgcaggagaacagcttcaatgactcgggaagattgagagcggccaccaccatcgaaccgatcacggacatcggcgtctatttcccgctgctgggcgaggaggtgcccgagggatacgagatcctctcgcacacgcccacgggtctacaggcgaacctcaatcacggatcggtccgcaccaccgactgctacatctacttccggcgtggcaaggatcgcccgccgctggtggacataggagtcctgtacgatggccacgagcggatcatgtcggatgcggaaatcgttgcggagacgcctggcggcagggtggccaatgtgaacaactcgtccgcgaagacgttcctcacgtaccgacgcgcccgagcggacatgccctgcaacgagctggtggtcaccgaactgtgcgtcattgtccagagcaagggtgagcgggctccgcacgccttttgcctaatctacaagaccctgaacaagggctatgttggcagcgacgtctacctgtgctacaagaagtccatgtaccggcctaagcacatcagctacaagccggagatcctgctgcgctaccccaccttcgaccacaccgacttcccgctgaatctgtgcccgagcgtgccgctcttctgcctgccaatgggcgcctccctggaggcctggccacacgtcaacggcacggagaagcggaaacccatcagtccggtgttcagcacttttgtgctcaccgtgagcgatggcacctacaaggtttacggatcggcgttaactttctacgaggattacgatgagtcaaagttgtcggctgagcagaaggagctgctcggttgggacgaggagttcggcgcccagcactcgctgcacatgatcaaggctatatgtctgctgtcgcatcatccctttggcgacaccttcgacaaatggctgaagtaccttcatcgaatggttctgtatgacgttaatatacccattcccgtggagcgctacatcacccagctgctggacgaagtaccgtttccggcgcccagcattcacctgcagctgtccagcgagtccaacgatcgcatactgctcacacagccggaagattccccgctgccgcgaagtggcgccggtttccacatactgctccagaacctgggcaccgacaactgtctgcatgtgctgctgctggccctcaccgaacagaagatactcatccactcactcagacctgccacgttgactgctgtggccgaagccattgtctccctgctgtttccgttcaagtggcagtgtccgtacatcccactttgtccgctgggcttggcggaggtgctccatgccccattgccttatctcattggcgtggactcgcgcttcttcgatttgtacgagccgcccacggatgtcacctgcatcgatttggacaccaacaacattagcctatgtgagtcgcagcgtcacttgtcacccaagctgctgccgaaacgggcagcccgcctacttcgccagacgctcaccgaactggagaatgccaagcccattagctatgactccacaaacagtttggatcgcgatattcgaaagcggaaacgagaactggtgctggagcagcgcatccaggaggcctttctgctcttcatggccagcattctgcgcggctacagagactttctggtgcccatatccaaggcaccatcggtgggagccaccgatccaagtgccctcttccagctgaaggcttttttgcgatcgcgtgataagtcgcaccagaagttcttcgagctgatgatgaagacccagatgttcatccgtttcattgaggagcgttcctttgtctccgatggcgatcatggtctcagcttcttcgacgagtgtgcggagaaggtgggcaactacgatgaaacgcccgcccagctgcatttggtggactgggacacggggcagaacagcgagcgcaccaagtacatctttccgccggacagcgtaactccggcgggatctcagcctggcggcggaggaggaggattagcctacaactacgagaactttacgctgcaaccggaactgttgcagagcacgaagaagacggctttatcgaaatttctgcagctgcagctgaacgcttccctctcgccaggatcacccattgcccggcgaaccaaacacgagattaagctgtcccagaagatggccagccgttgtcagcagcatccggaggcgtggtccaaatacttgttggccacctgttactcgctgtacttcctcatcctgccatccatggtcttggatccgcggcacgccggcaaggagccagagatactgcgcgccgcctacgatgtcctcgtgcgagccagtcgtctaaagatcacctgtgacgagttctgctacaggatcatgatgcagctatgcggtattcacaatctgcctgtgctggccgtccgtctgcactacctgatgaaacgctctggcgtgcaggccaatgcgctcacctatggcttctacaaccgctgcgtccttgagtcgcagtggccccaggacagtaccacgatcagccagatccgctggaatcgcattaagaacgtggtgttgggagcggcgcagttccgcaaggctggcaaacaaagggccgcctccaaggtgaacaagtcgctcagtgcgtcccaggaccagaacctcagcaccctggaaacggtggacggacagtcgcgcaccagtttggcttcctcctccggcgatggcggtggccatggactgctcgattttgccgccttcgatcggctcaggaacaagttgggcagcattgtgcggcagacggtgacgggcggcaataacgagacaatgggcgatgcggtcaacaacactgggttgctcatacccggcgaactcagcgccccgaatacgccgacctatggcggtgacaccgaaatcctggccaaggcacttcagcaacagcagccacgcaaacagatcatgagcattggcggcggcgatgacgatgatgaggatgaggacgaagatgaatacacggccggatcgccgagcacgccgcaaaagcaactggaagcgggcgccgatgacctggaatacgccggtggaggagactacgaggcggacgaggaggacgaagatgaagtcgacgagcatgtggccgcacagcgggcacgtcagcgagtgcagagtccaaccaaaatctcgccacgcacgcccgtgacccaaaacgatccactgggtgctctcaacgaggaggagtccgccgccagtgccacgcccacgcaggagacgcagcaggagcagcagcactcacagtcgcagatcgacagcagcatatacagcgacaagccgatcctgttccggggccagaggagcgccactttcgacgagtcgacgcagatcgggaagagtatgcaccgttcggaaacgatgccggtggccagcagcggtgtgaccaacagcctggccaacatcggatcctcgctgaagttcacgttcggacgttattcacccgcacgattgtcccttaagaaagacttgaaattgcccgccaatattatagaaaatatatcgagcataagtcccagcttgacgggcaagaagtcgaacgagttgatccagggcagtctgagcagcatcaaatcggcggccaattcgctgaccaaaaagttcgacgagatcaaaggcgtgatatcggccaattcaacgccgacgaaaacgaacaatggacaccatccgcatggcctgcatcatggtcaccatcatccgcaccaccaccatcatcatcattcgcagcacggcaatgcggagcaggaggagcacgatgccgccgtccacgaggagggcaagctgcgtcgcgtctcaagcgacctggatccatggggcaggctcagcgagtcgcgtaaatccagctacaataacctcgtgccgctcggcgagaacagctccaccggcgcccttcacatgcacgcctttcccgctgtgcccgacaacctctatagtctaacaagcgagaacgccgcggatcgtgactgcgatgtgctgatccagctgacgacctgctcgcagtgccacaattgctcggtgctcgtctacgacgaggagatcatgagcggctggacggcggaggactctaacctgaacaccacctgccatgcctgcaacaagctcacggtgcctttcctcagcgtacagatcgaacggcaggtggaggagtcggaacagtcggatccgctgcaggacggcaaggagcaaatagccaacggcaatagccacaagaccagcctgaccgtgccgtatctaaatccgctggtgctgcgcaaggagctggagaacatactcacgcaggagggcgacattgcgctgataaaaccggaatttgtcgatgagcacccgatcatctattggaacttgctctggctgatggagcgcatcgagagcaagacgcacctgcccgagctctgtctgcccgtgccgagcgacaaggagcacatcgatccgctgagcaaggtgaagacggtgcacatccagtgcctgtgggacaatctgagcctgcatacggaggccagtggtccacccatgtacttgctgtacagggagacccagccgacgagtccgctcatcaaggcgctgctcaccgatcaggcgcagctcaacaagaatgtcattcagcaaatcatttcggccatccggtgcaatgacttcgccactcctctcaagcgcttggccaatgagcgacacaagctgaagagcaacggcgtggagcgatcgcactcgttctatcgcgacatactcttcctggccctgaccgccatcggtaggtccaacgtggacctggccacattccatcgcgagtatgcagccgtgttcgacaagctgacggagcgggagtgcaacatgtactatcgcaatcaggatctgccgccctcggcatcgacgatcttctgtcgtgcttacttccgcccgcttctgctgccctgacgcagtggctcccagctggaggcaggagcagcttcaagcgatgccgaagtggacacatgagtggagcagccgaagcctaaaagacaagacgaccaaataacttgataacaaaatggaaacgaagggagagtttgacgacaacgaaacgcttatcacacaccttaggctgggtcgattttatagatgggacaagtatgaattaattttacttagatatcagagctcttatttacgttacggaaaagaaaaggacggtattttggaactattcctagtaggctataaaaatgtaattgttttaaacgaaaaaaaaaaaatacttgattcgaagtgttcttaggttttcaaactaatagttttttcccaagcgaggaagccttctgggcaaacttctttagaattgtcctcaatttacttgtacttgtacacaagccagaatatttaaattcttaaacgaactttcctaagtgaaagccccaacttgacatgtgttgcattgtgaaaacatgcaaatgattttgtaaatgacttgatcttaacatttaagtacttaacgatttttcgctgtttaaaactaatcaaaaatat

SEQ ID NO: 26127 - protein, 1561 aa, DROSOPHILA
MSDAEIVAETPGGRVANVNNSSAKTFLTYRRARADMPCNELVVTELCVIVQSKGERAPHAFCLIYKTLNKGYVGSDVYLCYKKSMYRPKHISYKPEILLRYPTFDHTDFPLNLCPSVPLFCLPMGASLEAWPHVNGTEKRKPISPVFSTFVLTVSDGTYKVYGSALTFYEDYDESKLSAEQKELLGWDEEFGAQHSLHMIKAICLLSHHPFGDTFDKWLKYLHRMVLYDVNIPIPVERYITQLLDEVPFPAPSIHLQLSSESNDRILLTQPEDSPLPRSGAGFHILLQNLGTDNCLHVLLLALTEQKILIHSLRPATLTAVAEAIVSLLFPFKWQCPYIPLCPLGLAEVLHAPLPYLIGVDSRFFDLYEPPTDVTCIDLDTNNISLCESQRHLSPKLLPKRAARLLRQTLTELENAKPISYDSTNSLDRDIRKRKRELVLEQRIQEAFLLFMASILRGYRDFLVPISKAPSVGATDPSALFQLKAFLRSRDKSHQKFFELMMKTQMFIRFIEERSFVSDGDHGLSFFDECAEKVGNYDETPAQLHLVDWDTGQNSERTKYIFPPDSVTPAGSQPGGGGGGLAYNYENFTLQPELLQSTKKTALSKFLQLQLNASLSPGSPIARRTKHEIKLSQKMASRCQQHPEAWSKYLLATCYSLYFLILPSMVLDPRHAGKEPEILRAAYDVLVRASRLKITCDEFCYRIMMQLCGIHNLPVLAVRLHYLMKRSGVQANALTYGFYNRCVLESQWPQDSTTISQIRWNRIKNVVLGAAQFRKAGKQRAASKVNKSLSASQDQNLSTLETVDGQSRTSLASSSGDGGGHGLLDFAAFDRLRNKLGSIVRQTVTGGNNETMGDAVNNTGLLIPGELSAPNTPTYGGDTEILAKALQQQQPRKQIMSIGGGDDDDEDEDEDEYTAGSPSTPQKQLEAGADDLEYAGGGDYEADEEDEDEVDEHVAAQRARQRVQSPTKISPRTPVTQNDPLGALNEEESAASATPTQETQQEQQHSQSQIDSSIYSDKPILFRGQRSATFDESTQIGKSMHRSETMPVASSGVTNSLANIGSSLKFTFGRYSPARLSLKKDLKLPANIIENISSISPSLTGKKSNELIQGSLSSIKSAANSLTKKFDEIKGVISANSTPTKTNNGHHPHGLHHGHHHPHHHHHHHSQHGNAEQEEHDAAVHEEGKLRRVSSDLDPWGRLSESRKSSYNNLVPLGENSSTGALHMHAFPAVPDNLYSLTSENAADRDCDVLIQLTTCSQCHNCSVLVYDEEIMSGWTAEDSNLNTTCHACNKLTVPFLSVQIERQVEESEQSDPLQDGKEQIANGNSHKTSLTVPYLNPLVLRKELENILTQEGDIALIKPEFVDEHPIIYWNLLWLMERIESKTHLPELCLPVPSDKEHIDPLSKVKTVHIQCLWDNLSLHTEASGPPMYLLYRETQPTSPLIKALLTDQAQLNKNVIQQIISAIRCNDFATPLKRLANERHKLKSNGVERSHSFYRDILFLALTAIGRSNVDLATFHREYAAVFDKLTERECNMYYRNQDLPPSASTIFCRAYFRPLLLP

SEQ ID NO: 26128 - DNA, 4359 bp, DROSOPHILA
ataaaacaaaacgaaaaaaaaaatacaaacactgagaaacaaccaaaaaaaaaaacaaaaagcgtaattcatttcctctctatgctatgatagttaagcctgaaccattgaacaattaaacaatttgtacgtaaaactagacgatgaatgactaggcgatgatgatgttgcgaggacgtaacgacttaatagcgaaaagtttaaataaaatttatacttgcgagttgaaaaaacatatatgcggccggaacttttcatgaccaatgctcccactctggccacttttagtcttgattccactgtatgcctcatataattataaaccccagtaaataaaaagcggacaacaacagcgagcgttcgttttgtagataaccgaggaaaacaataaagcgataaccaccatccacgggggccatttactccagtccaacttaatgcccaaccggagccaaagctgttcctgatagccgtcttggatccaccaaaaagtattgcaacgcgtggcaaacaggatggtagaatcagtctcaaaaagtgcatcttactttcatggattctacatcgaacaaaatgactaataatatttatcgcttatactttagttcccccttaatatacaaaaaaaaaattccactttcttgggcactacaaaacattttgttcattttaattttgaaacttcttcgcactcatttctaaaagatcagttccaaacaactttcacaagtatgcttaggtacataaatactaaacgagtaatacaattcttttttatccattttgctcgggcatcacaaagcatagtaaatcatacattaaatagttagacaaggcatatacacgcatcgtggggttacagttaaaacaattattaataatcggagcaaatattttggtaaggactgtgtggcgtactgtgtgtatataaaacttaaccaagaacacttgcgctgttaagtataaagagttgacctaagcgctatttctgtaaccctaattaatcgtatatatagtggctttcgatcgctgccatcttgtttagatgcgacgccatcttcacctcgtcgtccatgggaccggaattggattgcttctggcagggtttggtttgcgtttccgtttcggtatcggtttccgcctccgcttcgtcctttgcgacttcatccttcgtcgcgtcgccggcttcctcttgatcattgttagtcgcctggctgccatttcggcagcgggctatcagatcgctgtagggacggccgtgcagcaggcacaccagcaccacggtcatattgtcgccgccgaggcctcccatttggcagtcgggtgctaggcagtgattcatcagctcttcgcagatctcctccggaaacatgcccatgccgatgcgcgtgcgacagaactcgagcacttccgcgttgctcattacatcccaaatgccatcgcaggccagcacgatgaattcccaatcgtccatgattttccgcgtctccacgtccgggaaggctatataggcgcacggagaacaagaaacaaggtgataatgcttaacaagaacaatggatggagatggtgattctcacctgtgacgatttgatcttccggttttttgttctcatgcttgaatacatagtcaccgagggcgcgggaaagcgcaagattgccgttgacgcgattgaactcaacccagccgccgccttggatgatccgcttggactccgcctcgttattgggcttgtggtccagcgacaggacctccagttgtccgttcacgcaggcaatggcgcgcgagtcgcctgcgttggcgcaataaagcttgttgtcctttaccaaaacaactacggcagtcgagccggccatctggtcaccacatgtcttgttgcgtagcataacgtagtcgatgtccagaaagccctgcaattgcatcatatatgagtcatgaattaaatagaatggcttgaagagctttacatgttctcaaaactagtgaatttaaatggcattacattttagatatctttataagttaatctgttgtttatatgtatcttcaaaaagtatatgactttaataaacgtgagacatataaagataaatgtatagaggttttaacaagttgttttcatcccattacttatcattcttaacaaatctttgtgctgcagatgagtaacaatttgttgaaatgagtcgcttgaatagaatagaataggtacgtattgtacatacatacatatatgtgtaatatgtaaaactttggttttaagaagtgggtactaccctcatatatccaagtatccaattatcatttatttaaggacatcatcgataccgtgcatatccgaaagaagactgcatgtgaggagtacatatacataggtactccaactgccttcagcgatctataaatgtcgccattcccgccatctaaaagtgactctgccgtgactcacctgctgcagcgcctgttcgatgttgtcgttgtactccggccgcttgagaacgtacttgtgcaggtgcttgccggcgtactgggccaccgtggcgcctccgtgcccgtcgtagacggcgaagaatgccgctcccggatcgtccggcagcgagaggatgtgggtgtgcgagtcctccatgttgatgcgccacccctgcatgcaggagctgcccacgcggtaggcggcgttctggcagtacgctgactccttggcggtcaccggttccgatagagtctgacccattgcggcttgtatggtgtgcggtgtggagtgtgttgtgtgggctgacttctttgcgggcggggttagtgctatcgatttacgtcgcttttctgcgggaaagaagacgtacaagcacacgggttaagttaattacgaaactgactgctgcggagcgcggaacgaccgacggccgactgtcaacttcagatacgcgtgggctccggagattagtatatcagaggcataagcaaacagacgtggagatttcagggccggatcgcgatccggaattggattcagcttgggttcaaagggcaggtgataaatgagcgtcgataagccggatattacggctgacgatcaacgtacttccttcgcgtgctccctaatatgttcacagtttgcagcttatttaaacttatgcaaaaccagaaaataagaacggaaaaccagaacagcaacggaaaacacgcaaaaaaaacggagagaagtggagagaagatagaagaggaggagcggcgccaaattaacgatgcgctgattacacacctggcgttcaccgtttttgctccaccctgcaaagcgagtacgcatcaaagaaaaactgtttggtaaaaaattattaaaaactgcgcgtgtttatttttttattgaatttgtgttttgaagtgtgaacgtgtctgaaaaatggtaaattcctaactgctgtttacaaacgcatggtagttgaccacactaatgccggtactgttcaacactggcagagtggcgccctgcttgtgagtgcgtctcgactagcttggcagcactggcgaaaagctttttggttttggcgccttgatttgaatttaaaaagtttaaaatccaaaaaaatattatttatgcaccttaattgtacaaataatgagtgatgttcttttgcctttccattgaaattcacatttcgaatgaattctgcaattccaatgcaaatttcacattatgcggctactcttttccgcttctcatttcgccttttcgtcgtcttatctgctcttttattttttttgtttagctggcgagtgcattgaattttgcgaatttcgctttgggcttgcggcaaatatacgaattcaaggacaaatgacgtcagctaagcactttttgcggttgccgctgctgctgttttgttgttgctcccatattgttgttgcttggggaattaaagcttgactggcattcgccgctgccaacgcctctgctttctatttattgtcttcttcgtcttcgtctctttttttgggttcttttgttttgcgcttttggcgagcgcaaaaaatgtattaaatatttgcacagcagcagcaaaagcaaaagccacagagcaatttttgataaagaactagtggatgtatttcagaggtccctctccatttccattttattcgcattatctttggcgctctgaaattgtttcggcaaacaaagtcaatcagaactttgttgtcgaacctacatatgtacatacgaattggtatcacccgcctttatgcatttataagtagtacaaatttggaactcaaacaaagattagataggaacgaacatacacttccatacaacaacaactattcttaaattattcgaattttgaggaataatgttcgac

SEQ ID NO: 26129 - DNA, 1304 bp, DROSOPHILA
aaaaaataaacacgcgcagtttttaataattttttaccaaacagtttttctttgatgcgtactcgctttgcagggtggagcaaaaacggtgaacgccagaaaagcgacgtaaatcgatagcactaaccccgcccgcaaagaagtcagcccacacaacacactccacaccgcacaccatacaagccgcaatgggtcagactctatcggaaccggtgaccgccaaggagtcagcgtactgccagaacgccgcctaccgcgtgggcagctcctgcatgcaggggtggcgcatcaacatggaggactcgcacacccacatcctctcgctgccggacgatccgggagcggcattcttcgccgtctacgacgggcacggaggcgccacggtggcccagtacgccggcaagcacctgcacaagtacgttctcaagcggccggagtacaacgacaacatcgaacaggcgctgcagcagggctttctggacatcgactacgttatgctacgcaacaagacatgtggtgaccagatggccggctcgactgccgtagttgttttggtaaaggacaacaagctttattgcgccaacgcaggcgactcgcgcgccattgcctgcgtgaacggacaactggaggtcctgtcgctggaccacaagcccaataacgaggcggagtccaagcggatcatccaaggcggcggctgggttgagttcaatcgcgtcaacggcaatcttgcgctttcccgcgccctcggtgactatgtattcaagcatgagaacaaaaaaccggaagatcaaatcgtcacagccttcccggacgtggagacgcggaaaatcatggacgattgggaattcatcgtgctggcctgcgatggcatttgggatgtaatgagcaacgcggaagtgctcgagttctgtcgcacgcgcatcggcatgggcatgtttccggaggagatctgcgaagagctgatgaatcactgcctagcacccgactgccaaatgggaggcctcggcggcgacaatatgaccgtggtgctggtgtgcctgctgcacggccgtccctacagcgatctgatagcccgctgccgaaatggcagccaggcgactaacaatgatcaagaggaagccggcgacgcgacgaaggatgaagtcgcaaaggacgaagcggaggcggaaaccgataccgaaacggaaacgcaaaccaaaccctgccagaagcaatccaattccggtcccatggacgacgaggtgaagatggcgtcgcatctaaacaagatggcagcgatcgaaagccactatatatacgattaa

SEQ ID NO: 26130 - protein, 371 aa, DROSOPHILA; identical to SEQ ID NO: 2391

SEQ ID NO: 26131 - DNA, 8411 bp, DROSOPHILA
acgttaattttacccaacaaaatccctagcaataggatatgtcattccgtagggtgcaatcagctgttgctgatcgaataactatcgaaagggtggtcagatcgaatttgcatggtggtcattgcttgttaaaggaatacaacagctcagaatagccgtaaaatcagcgcggcaatattaaagtcgggttggaaaaattaaatggcaatttctttaagaattcaaaaagtttgtgatgacaaatataccgattgtttgtcactgctttgcgcggcacacgttcctttatacttttattcgcgtcgagttggcagcacataccagttttttttgtggccattcaaaagtgtgtgttcgtacgggtaaaaagtgatttaaattcaaaatattcagcgaaacgaccgcctccaatagaagcaactgtaccctatggtaagtaactgccctctgcacccgtttcacacccggacatcctccggatgagctgaccaagaaatccgcagcctttgttacgcttccgactgcgaattgcagttctggcgatgggcagcgatgtgtttcggttttgaatcattctccgcgtaaaaaaaactcagaaagagggtcgactataacctcgcggagtaactgcatcacggcccgtgtgccttttgtactccgcgtaaggcgatcgtttaaatgcaatcgcgtatgcttaattgtccgttgggcgaaaagtaacaacattgtgggtctatacatgcgggattgcctctggctgaccagaaaccacattgaaaccatcccgttgaccgtagatataagcgtgtgccatttgggatctggaaatcgtgtttccacccagttgtttgcatatttataaacaattaaagaaaaatattaaattttttggtcagggctgtcgcccctcgcatggcatcgatagaagagcgtccggagctgcggttgcaaccctatccgctcacgcaaatctatcgaaaaattttactccacggtcgattttcgttgcttttttttcacactcgtgtaaaaaaaaaggaaatagctaagtaaatcgaaagtacagtgcagtgttttgatcccgtggagtgcatgttccagcggaaagtgtgtgcaacaaatatgagcagttcgcaaaagtggcgagcaaaagcaataacaaagtagcaacagcaacgcaacgtgtgtgtgttgtaagcaatctgtacagcggaaaggtgttggtgtgttggtgtgctcggggggtggtgtgcgtttcgcccgtcccgtgtccataaattagaatcaaatcgaatcgaaatcgacattgaagtccgctgctccgccaccgcgatgtccgtcgaccaggatcaataagcagcgtcaccaccagtagcggaccatcattaagttctccatatcgagagcaggctgactcggaatcgaactcggattcggaattggaattggaattggcatcggaatcggaatccatagcggaggaatcacgcgcggcagccagcccaatacggaaaactgctgaaaaatgttagataaatgcccagttatctacaattattatggcttgtccctgtgtgcgtgtccaggtgtgagggtgtgtgtgtttgtgtgcgatagcagaagcaaaatccgctcaaattgcgatgccaaatagtcggccaattaattgatctttcaattggcgacatcaggcgccctcccatatacccagctccgcacgaaacccgatatatatccgcggattgagtctctgcttttgccgcacatatgtattgtataacccttgtttatctttggacaatccgaggtggagtggagtacagtggaggctggccaagttggacacatgtgccgataaggtggcgtgtgctggaacgagtgtcccctgtaatgcggtcttatctgaagagctttgcaggtcactccgactgacaaattcacctgcaagctaggaggggaaagccctgtgaagaactctctaacacgataaagtcatattcctgattgatacaactataacacacagaaatcactatcagaccagagaaccagctcgcaagacccaagactgtagctataccaaataatctatccataaaaataggaagttcttatcttatcacatactctaggtaaagatttaagatggatctctataaatacttttgaatttacaacccaatttgttatgcttctcctgtaagtggcccaaaaatcgtcagttaagcatatgaaaagtctcgacaatgtggctgcactttgttcctttaattgttcttatattgtttacaaattgcataagctgtaaatgtaaactttgcttagttcgatttcgcttattcccgaagtctgtttaaacattcaacaggaaatgagaaactgagcttgtttataaaacgttaggcaacattaccccttttgccattcatcttttccattaagaacgccatataaattcagttttcaatttacatcgtacagctgtgggttgtagagcactattagctgctaggaaagcaggttgaataaaatgatgatgagaaatcacagaattcgaaggaccttgggtgagtcactgactagcagctttcactgcaccatccacgcactcaaagccgaccacaactggagttcatacacacacaggggccaccataaataattcgcatccactaggtggaagtgagcaaatgtttactcaataactattcttgcagagcccgcagtcgcagcaaagcaacgattaccagcgacacgagcagggagcagaaggaagccggcggaggaggagaagaaggagagccaccgcacagattgggtaaagcgcaccaccatggtgagtaccaatctggtggtacccgtggtgctgtggggtcccaccgcgcccacgcactgcatctctagcgtgttcctctcggacgatcagtttaccctggtcaccggctgctacgatggacagatctgcctttggcaagtggagcccaccaccctgaagatgtcgccgcggtgcctcttggtgggccattcggcgcccgttttgtgcttagtgcgtgcctcgcttctgccggagaacaacttcctggtcagctcgtctgagaacggagagatgtgcacctgggatcttacggacggcaagtgcatggaggcggtcaagcttccacaggtgcacacccaaattcagagctaccacaccgccaacagcgaggatgtgcgcctcttttgcattggctactatgctgaaatcatggtcatggatccgttcagcctagaggtgatctacgtgctcagctcaaaggtcaaaccggattggatatccgctattcacgtactgcgccccatgcgtcgcaaggatgacgtagtgttggccatcaccaccaccggaaccgtgaaggtctggactctgacgggtaacgagaacaaacacgcggagcccatttacgagaacgaatccaaggagatccgctgcctgaatgccatcaccatgaattgctgcgcccagaaccagcgcacagtgctcttagtttgtaccaaatactggcagatctacgatgccggcgacttcactgtactctgctccgtaattgctcccgcaagggaacgttggcagggcggcgacttcatcacctccgaccgggtaatgctatggacagatgagggaaagggctacttgtacaagctgcccgcaaactgcattcccgacaacaaggagttccactcgaagagtgtggtcagggatgcaccttacctctactacgtgttgcaacacgccggtgataaggtgctgtcgtgccccccagccatgaagttgcttcagggcgccggtggccagcacaatctactgcgcggagactccgagggatacatctctgtctggaatgtgccggaggtgccgttagacaatattagcatactgcaggccaaacagatgccgccgcgacccctcaagccgcacgtgtgcacttcgttggtcgaggcgtggtccataatggatccaccaccagtgggcatcctggatcagctctcccgcatcacagaatcgccggtgaagctcacctcgagcatctatctgccacagcagagtcgcctggtgatcggacgcgaggatggcagcatagtcatagtgccagccacccagacagtgatgatgcagctgctggtgggcatcaagcaaaacttcagcgattggccctcgcatcagatcctctacggtcatcgtggaagggtcaattgcctgctctgcccctcgatgattcactcgagatatgagaagtcgcatctactttccggcggcatcgatttcgccgtgtgtctgtgggatctgtacagcggaagcttactgcataggttttgcgttcatgcgggtgagatcacacaactgctggtgccgccagagagctgtagtccaagaatcctgaaatgcatatgttcggtggcctcggaccattccgttacgctagtgtcccttcaggagcgcaagtgtgtgaccctggcaagcagacatctattccctgtggttaccattaaatggcgtcccctggacgactttctaatcgtaggctgttccgatggcagcgtgtatgtgtggcaaatggaaacgggtcacctcgatcgagtgcttcacgggatgctggcagaggaagtcctttccgcttgcgatgaacaggcggaggatggcggctcgggcggcggcggtggttccaatggtgcatctgccagcgagatgggtatggccaatccggcagtgcacttcttccgtggcctgaagtcgcgcaacatgaatgcaatccgtcatgctacccagcgcgggattacgcaactccagcaacttcagggtcataaccaaggaaacttcgactttctgatgaaacaccgcagcaatcctttagtgatccagggtcttcgtactaatcctaaggacgcggagagccacatacttttctttgacatcgagggactgatcttcgaattgcatagcgaggaatacgcacagatgacaccagctaccttggaatcacttggtgtccacctgcagaatcccaaagatggcaaatcgatgcatttggatgctagcaagaagatcggtgacttcttcaacaaggtgaagaacaaggccgtagatgtggagaagatcctgaaggacaaagacaaacacgggctggtgcagaagttcaaggagaaaactgagattgtcgagaagaaagtacaggccaaggtggagagcctgcaaaaggcagtagagccgcacgaggagcagcaggacctgaagagcaaaatcgcttccaagatggaggttacgcatgttatggaggtagcccagctacttctttcgctgctccattcttggggcctagatccacatctagacaagatgtgcgagacgcgcttgggcctgcttagacccattgtgcccatctcatacggagtgctttccaaggccggctatatgtcgctgctgctgcccacatggcagaacaactatgccataccacccggtatccagcttccctccagttccaagaagcgcccgctgccagaggagctgcagcgcttggagcatctcacggctgttttcacatcccgtctgcattgggagctcagcactacgttgaccaccaaccatattcttgcgctggtggccatgtccaatacgctgctgtcgatgagtgcggcctcctttctgccggacagcgagaagcacaagaagctgcagcgcttggcccagcgcacggactccacattgagcaacgaggaggagcgcgaggagctgatggcccaccacatctctcaaatcaagcacgcctggagcctgcttgctacccaccattgcttcctgttgcccgacaaaattgaggccctggagccgaagaaattcaagcgtccgcaggtggaaatgatggtcaagcgctggcagcatcactgcatagagatcagggaggcggctcagcagatccttttgggcgagcttacccggatgggcaagaagggtcgcaagcagctagtcgagagctgggcacaatatctgccactctacacgcacaccgagcccatagtgggagcccaacagcagttggccttgataagtcagccggcaagcggaggagctggctcgggatcgggcggcaatggaggggtgggcgtcggagtatccggaggcggtggtgctggtagtggtagcgggccaggtggcagcgttcctgggggagatgcccaccaagatgaagactacgaagaggaagaggaggagattatacgcaaaccatccagcttgtcggagctgaagcgcaaacaaactacggcagttatcctactgggtgtaataggagcagaatttggccaggatatatcccaggagtcaccgaatcaccgtggaagtattagcatggccacgggagcaaatctaaccagtggagttgctggcggggaacgtcgaaaatctagtgtcgtggagggcttcggcatagccaacaatctagcccgtcttacttcaatggccctggctcacttgctgtacgcgccaccatctcccaagctgccgcaatacacgccactgcgccgggcagccatcgatctgttgggtcgtggattcaccgtttgggagccgtacctggatgtgtccaaggtgcttcttggtttgctggagatatcgtgcgagggcaaagcagtgccaaatctgaactacaaacttccactaaccccgcaagcggatgcctgccgaaccgccaggcatgctctgcgcttgatagccaccgctcggccggcggcgttcatcactacgatggcgcgcgaggtagccaggtacaatacgatgcagcagaacgcgcagtccatcaacacgccgctcacccagtccgttctgcacaaggccaagggcgagattctgcagtgcgttgagatgctaatcgacaaaatgcagtcggagatcgccggcctcctggtggaagttatggacattgccctgcactgcgtggacggcaacgagctgaagaaccgcggcctggcggagctgtgtcctgccatctgcaagtttaaccagatctcgcactgcgcccaaacacgccgcatcgccgtgggcgccaacagtggcaacctggccatttacgagctgcgccagaacaagtgccagatgatcccggcccacacgcatccgatcacctcgctggccttctcgccggatggcaagtacctggtctcgtactcttgcgcagagaaccgcctctccttctggcagacctcaacggggatgttcggactgggccagtcgcagacgcgctgtacgaagggctactctacggcacccattccggatgtgtcgcgcctgaatccgatgcgcctggccaagcttgtgtggatcaacaatcgcacggtgaccctcatgctggccgacggctccgagacgcgattcaatgtctaaggtgaaggagcaatgataatggactagtgaatcttgcgggatgtatagcatgttattaggcaatcagtgcggacttcagagcagcgcttcggaggagcagaacaaggaggacgactcggcggtggagtaggaggagctggaagagctgcggggagctggaggagcagaagcgacaaaacaataattattcgaaaataaaagtgcggtaatgtatggcgtttcgtgagtagttaaggtaatggaaacgaaaaaaagcttagcaaaattaagacaaaacgaaaatgaaagcatagctagggcaaacgggaagctaagcgaagttagttcaagcgaaaattcacaacacattttgttatttatttatatacttaccctatatatctgtatctgtatctgtatctaatccgtatctgtatgtattttaatgtattacacgattttaatatgtctcttattcgcccctctgcgttctttttaatttttagtgcctaacttttacccatactcttagaacacgtatttctgtttctgtttctgtttctgtttgtcgttaatttccaatgcggaaaaactaataactaaatccaaatccaaatattaacaaattaaacaacaattaaccagatatgcaagcaaacacaactacacgagaaaagcaaaggaaatgaaaaacgaaaaaaaaaaacaaagaatgaaaagctgttattattattactcaactattattattactattgtatgctactattattattattattattattgatatttgttatgcctaatgtattgttatatatatatacctaaaataaacctaaacaaatgtattgagcaagtaatgaagcgaaggccaagcaaccagagtttcctcgaacgaggattaaacaactagtgagcgaaggggttttttttttaactacattataaccattgtaactcccatatatctgattctttcgatgttatatttatgcttaagcctgtgtaaaaagtcata

SEQ ID NO: 26132 - DNA, 5221 bp, DROSOPHILA
tttcgttgcttttttttcacactcgtgtaaaaaaaaaggaaatagctaagtaaatcgaaagtacagtgcagtgttttgatcccgtggagtgcatgttccagcggaaagtgtgtgcaacaaatatgagcagttcgcaaaagtggcgagcaaaagcaataacaaagtagcaacagcaacgcaacgtgtgtgtgttgtaagcaatctgtacagcggaaaggtgttggtgtgttggtgtgctcggggggtggtgtgcgtttcgcccgtcccgtgtccataaattagaatcaaatcgaatcgaaatcgacattgaagtccgctgctccgccaccgcgatgtccgtcgaccaggatcaataagcagcgtcaccaccagtagcggaccatcattaagttctccatatcgagagcaggctgactcggaatcgaactcggattcggaattggaattggaattggcatcggaatcggaatccatagcggaggaatcacgcgcggcagccagcccaatacggaaaactgctgaaaaatagcccgcagtcgcagcaaagcaacgattaccagcgacacgagcagggagcagaaggaagccggcggaggaggagaagaaggagagccaccgcacagattgggtaaagcgcaccaccatggtgagtaccaatctggtggtacccgtggtgctgtggggtcccaccgcgcccacgcactgcatctctagcgtgttcctctcggacgatcagtttaccctggtcaccggctgctacgatggacagatctgcctttggcaagtggagcccaccaccctgaagatgtcgccgcggtgcctcttggtgggccattcggcgcccgttttgtgcttagtgcgtgcctcgcttctgccggagaacaacttcctggtcagctcgtctgagaacggagagatgtgcacctgggatcttacggacggcaagtgcatggaggcggtcaagcttccacaggtgcacacccaaattcagagctaccacaccgccaacagcgaggatgtgcgcctcttttgcattggctactatgctgaaatcatggtcatggatccgttcagcctagaggtgatctacgtgctcagctcaaaggtcaaaccggattggatatccgctattcacgtactgcgccccatgcgtcgcaaggatgacgtagtgttggccatcaccaccaccggaaccgtgaaggtctggactctgacgggtaacgagaacaaacacgcggagcccatttacgagaacgaatccaaggagatccgctgcctgaatgccatcaccatgaattgctgcgcccagaaccagcgcacagtgctcttagtttgtaccaaatactggcagatctacgatgccggcgacttcactgtactctgctccgtaattgctcccgcaagggaacgttggcagggcggcgacttcatcacctccgaccgggtaatgctatggacagatgagggaaagggctacttgtacaagctgcccgcaaactgcattcccgacaacaaggagttccactcgaagagtgtggtcagggatgcaccttacctctactacgtgttgcaacacgccggtgataaggtgctgtcgtgccccccagccatgaagttgcttcagggcgccggtggccagcacaatctactgcgcggagactccgagggatacatctctgtctggaatgtgccggaggtgccgttagacaatattagcatactgcaggccaaacagatgccgccgcgacccctcaagccgcacgtgtgcacttcgttggtcgaggcgtggtccataatggatccaccaccagtgggcatcctggatcagctctcccgcatcacagaatcgccggtgaagctcacctcgagcatctatctgccacagcagagtcgcctggtgatcggacgcgaggatggcagcatagtcatagtgccagccacccagacagtgatgatgcagctgctggtgggcatcaagcaaaacttcagcgattggccctcgcatcagatcctctacggtcatcgtggaagggtcaattgcctgctctgcccctcgatgattcactcgagatatgagaagtcgcatctactttccggcggcatcgatttcgccgtgtgtctgtgggatctgtacagcggaagcttactgcataggttttgcgttcatgcgggtgagatcacacaactgctggtgccgccagagagctgtagtccaagaatcctgaaatgcatatgttcggtggcctcggaccattccgttacgctagtgtcccttcaggagcgcaagtgtgtgaccctggcaagcagacatctattccctgtggttaccattaaatggcgtcccctggacgactttctaatcgtaggctgttccgatggcagcgtgtatgtgtggcaaatggaaacgggtcacctcgatcgagtgcttcacgggatgctggcagaggaagtcctttccgcttgcgatgaacaggcggaggatggcggctcgggcggcggcggtggttccaatggtgcatctgccagcgagatgggtatggccaatccggcagtgcacttcttccgtggcctgaagtcgcgcaacatgaatgcaatccgtcatgctacccagcgcgggattacgcaactccagcaacttcagggtcataaccaaggaaacttcgactttctgatgaaacaccgcagcaatcctttagtgatccagggtcttcgtactaatcctaaggacgcggagagccacatacttttctttgacatcgagggactgatcttcgaattgcatagcgaggaatacgcacagatgacaccagctaccttggaatcacttggtgtccacctgcagaatcccaaagatggcaaatcgatgcatttggatgctagcaagaagatcggtgacttcttcaacaaggtgaagaacaaggccgtagatgtggagaagatcctgaaggacaaagacaaacacgggctggtgcagaagttcaaggagaaaactgagattgtcgagaagaaagtacaggccaaggtggagagcctgcaaaaggcagtagagccgcacgaggagcagcaggacctgaagagcaaaatcgcttccaagatggaggttacgcatgttatggaggtagcccagctacttctttcgctgctccattcttggggcctagatccacatctagacaagatgtgcgagacgcgcttgggcctgcttagacccattgtgcccatctcatacggagtgctttccaaggccggctatatgtcgctgctgctgcccacatggcagaacaactatgccataccacccggtatccagcttccctccagttccaagaagcgcccgctgccagaggagctgcagcgcttggagcatctcacggctgttttcacatcccgtctgcattgggagctcagcactacgttgaccaccaaccatattcttgcgctggtggccatgtccaatacgctgctgtcgatgagtgcggcctcctttctgccggacagcgagaagcacaagaagctgcagcgcttggcccagcgcacggactccacattgagcaacgaggaggagcgcgaggagctgatggcccaccacatctctcaaatcaagcacgcctggagcctgcttgctacccaccattgcttcctgttgcccgacaaaattgaggccctggagccgaagaaattcaagcgtccgcaggtggaaatgatggtcaagcgctggcagcatcactgcatagagatcagggaggcggctcagcagatccttttgggcgagcttacccggatgggcaagaagggtcgcaagcagctagtcgagagctgggcacaatatctgccactctacacgcacaccgagcccatagtgggagcccaacagcagttggccttgataagtcagccggcaagcggaggagctggctcgggatcgggcggcaatggaggggtgggcgtcggagtatccggaggcggtggtgctggtagtggtagcgggccaggtggcagcgttcctgggggagatgcccaccaagatgaagactacgaagaggaagaggaggagattatacgcaaaccatccagcttgtcggagctgaagcgcaaacaaactacggcagttatcctactgggtgtaataggagcagaatttggccaggatatatcccaggagtcaccgaatcaccgtggaagtattagcatggccacgggagcaaatctaaccagtggagttgctggcggggaacgtcgaaaatctagtgtcgtggagggcttcggcatagccaacaatctagcccgtcttacttcaatggccctggctcacttgctgtacgcgccaccatctcccaagctgccgcaatacacgccactgcgccgggcagccatcgatctgttgggtcgtggattcaccgtttgggagccgtacctggatgtgtccaaggtgcttcttggtttgctggagatatcgtgcgagggcaaagcagtgccaaatctgaactacaaacttccactaaccccgcaagcggatgcctgccgaaccgccaggcatgctctgcgcttgatagccaccgctcggccggcggcgttcatcactacgatggcgcgcgaggtagccaggtacaatacgatgcagcagaacgcgcagtccatcaacacgccgctcacccagtccgttctgcacaaggccaagggcgagattctgcagtgcgttgagatgctaatcgacaaaatgcagtcggagatcgccggcctcctggtggaagttatggacattgccctgcactgcgtggacggcaacgagctgaagaaccgcggcctggcggagctgtgtcctgccatctgcaagtttaaccagatctcgcactgcgcccaaacacgccgcatcgccgtgggcgccaacagtggcaacctggccatttacgagctgcgccagaacaagtgccagatgatcccggcccacacgcatccgatcacctcgctggccttctcgccggatggcaagtacctggtctcgtactcttgcgcagagaaccgcctctccttctggcagacctcaacggggatgttcggactgggccagtcgcagacgcgctgtacgaagggctactctacggcacccattccggatgtgtcgcgcctgaatccgatgcgcctggccaagcttgtgtggatcaacaatcgcacggtgaccctcatgctggccgacggctccgagacgcgattcaatgtctaa

SEQ ID NO: 26133 - protein, 1525 aa, DROSOPHILA
MVSTNLVVPVVLWGPTAPTHCISSVFLSDDQFTLVTGCYDGQICLWQVEPTTLKMSPRCLLVGHSAPVLCLVRASLLPENNFLVSSSENGEMCTWDLTDGKCMEAVKLPQVHTQIQSYHTANSEDVRLFCIGYYAEIMVMDPFSLEVIYVLSSKVKPDWISAIHVLRPMRRKDDVVLAITTTGTVKVWTLTGNENKHAEPIYENESKEIRCLNAITMNCCAQNQRTVLLVCTKYWQIYDAGDFTVLCSVIAPARERWQGGDFITSDRVMLWTDEGKGYLYKLPANCIPDNKEFHSKSVVRDAPYLYYVLQHAGDKVLSCPPAMKLLQGAGGQHNLLRGDSEGYISVWNVPEVPLDNISILQAKQMPPRPLKPHVCTSLVEAWSIMDPPPVGILDQLSRITESPVKLTSSIYLPQQSRLVIGREDGSIVIVPATQTVMMQLLVGIKQNFSDWPSHQILYGHRGRVNCLLCPSMIHSRYEKSHLLSGGIDFAVCLWDLYSGSLLHRFCVHAGEITQLLVPPESCSPRILKCICSVASDHSVTLVSLQERKCVTLASRHLFPVVTIKWRPLDDFLIVGCSDGSVYVWQMETGHLDRVLHGMLAEEVLSACDEQAEDGGSGGGGGSNGASASEMGMANPAVHFFRGLKSRNMNAIRHATQRGITQLQQLQGHNQGNFDFLMKHRSNPLVIQGLRTNPKDAESHILFFDIEGLIFELHSEEYAQMTPATLESLGVHLQNPKDGKSMHLDASKKIGDFFNKVKNKAVDVEKILKDKDKHGLVQKFKEKTEIVEKKVQAKVESLQKAVEPHEEQQDLKSKIASKMEVTHVMEVAQLLLSLLHSWGLDPHLDKMCETRLGLLRPIVPISYGVLSKAGYMSLLLPTWQNNYAIPPGIQLPSSSKKRPLPEELQRLEHLTAVFTSRLHWELSTTLTTNHILALVAMSNTLLSMSAASFLPDSEKHKKLQRLAQRTDSTLSNEEEREELMAHHISQIKHAWSLLATHHCFLLPDKIEALEPKKFKRPQVEMMVKRWQHHCIEIREAAQQILLGELTRMGKKGRKQLVESWAQYLPLYTHTEPIVGAQQQLALISQPASGGAGSGSGGNGGVGVGVSGGGGAGSGSGPGGSVPGGDAHQDEDYEEEEEEIIRKPSSLSELKRKQTTAVILLGVIGAEFGQDISQESPNHRGSISMATGANLTSGVAGGERRKSSVVEGFGIANNLARLTSMALAHLLYAPPSPKLPQYTPLRRAAIDLLGRGFTVWEPYLDVSKVLLGLLEISCEGKAVPNLNYKLPLTPQADACRTARHALRLIATARPAAFITTMAREVARYNTMQQNAQSINTPLTQSVLHKAKGEILQCVEMLIDKMQSEIAGLLVEVMDIALHCVDGNELKNRGLAELCPAICKFNQISHCAQTRRIAVGANSGNLAIYELRQNKCQMIPAHTHPITSLAFSPDGKYLVSYSCAENRLSFWQTSTGMFGLGQSQTRCTKGYSTAPIPDVSRLNPMRLAKLVWINNRTVTLMLADGSETRFNV

SEQ ID NO: 26134 - DNA, 5039 bp, DROSOPHILA
ctgcctgatgatcttcatcgccggaatggacgacgagctggtggcctttcagctcgagcagttgcagctgcgcgccgggtgagtggcaatgcttccggcgagattccgtgatcgattggacggggtagagggattcgattcgatctcaaatcggcggacagctgccagagacagccatcaaaattgaatccgtcgatggataaggctggcgtccgtcgcggaaatgccgtggccaaatgtggaatggcccaggagatggcagcgagtggccaaatccccaacgcagcccccacctatgcaatgcaatgtaattaaaataccttgcgaaggccatgtgggcggtccgtctttttggtggagccgtggccgccggcacgcctggttatttatataaatcccgcaaatttgtgtcaatttatgcaaaatcgtatgcatccacatttgcgccataaaaataacgcacacaatatttcggaatcgatttgtcaataaaattggagagcactggccaagcacatttcagtggatcttgccgagtggccgagtgctccgccaaacgtatgagtaatatttaagaagcatccgtcgctgggaaaacgcgtccgaatcgctttgaaatcgcgagcaagtcgagtgtcctagtcggtggttgatagtgttccgtgttgaaagtcgtttgttcaatccgtcggtaaatcgattttaagaacgtacttaaatccccaacaaaaaagtggcttaaactctgagaaaaaaaaacaggaaatcctagaataattaggctttcgaaaacaaaattttgataaatttaaaaaaaaaagccagcttcaagattttgtggcattgatatcaaataatatggataagttttttctctgagttaaggtccttaatataaagtattgaaaatatatcaatattttaaaaaaaaaaagttttttaacatagaaagctatttgtaagtgatcaaaagagttggtagtgcaaaaactccgtcaaaatgtcgatggatccatcggtttctctagaggatctggagcgagtgagtgaaagaagttgtggtggtgaaaagctgtcgagaaactacggcaatacaattttcaatacagcgtcgtcgtcgcgccagttccgcccgcaagcagtcacatactccccagccagcatctcacctggcggattcggaggccatggccgtaatcaatgagatatttaatcccacgctgaagctgccggagtccagtggccactatacgctgcccgaggagatgagggccgatgataatgtggcgccccatgaactggacattgccaagctggcggagctgaaggaagtaagttttcgagtgctgcctgaccgtggttcattccgtggcttgtccgaaggtcttctcgctcttcgatacggactgcgatggactgatctcgaaggatgatctacggttcacctacacggcgctgggcaacgaaccgaacgaacagctactggaacagatgatgcaggaggccaaggagccgctcgactatgaagccttcgttcggctgatgagtcgtcgcacccaggaactggatcccgaggatgttttgttggaggcctggagcaaatgggatgaccatggcacgggcaagatcgacgaacgcaagtgggtgctaccgggtagagtggactaccacagtgatagtctccattttgaacactccccagaatctatgaagagctgaccaactatggtgacaaaatgaccctcaacgaggccaaggaggctcttagccacgccccgatggccaagcccaagtccttggaggagccgcccatgatcgattacccggccttctgtcgcatgctaagtggaatgcggaagcggaaaggggaataacgtgctatttttgggagaaactttaaaagtttactttaaattcaaatccattaaatattttctgatttaatgtttttttttcagttaacctactaatatacaagctctttcatttcatatcatttaccctatgaaatttatattctttctagatcaattttgaaaacctttcgcagctattgttgcgtttctgattatgattttatagccttagattgttatttgattggtaaatattttgaagcagctgtgccgatttgacaatcgtattagccttaacgccaacttttgttcgactttttatcaaaataaatcgtgaagaaccagcgatgcgttgggaattatttcttaatggccatttgctgcttgcgatggtgtatatttatagggaggccggctgaccaacgagccagccccaaaagtatcggccaataaattttagacatcattacgcatctgctctggccaatgcaagcggcctggggaattccacctctctctcctcgccactcctcctcatccaatgccgattgcaatttcgtgacaggtgcttggacagcgtggacatctttccctatttgcgggagcccgtcatcgagaacgcaaccctggcggcggacaccttctgccagcacagccgggagcgcagtgccacgcctatttatagcgcgggtcgattgctcggactgcgcctccggttccagcagccgcccaccgacctggccagctggaacttgaccctcaacgccagctatcgatttctaaagcgaggtgagttgacattgatgacacgcatacatcaaggattttttacaagcttgagcatttttaaaatttatttaaatttttagttatagttagttatagttatatttgacatatattatatatgttgattaagcagtcgtgcagccattaaagcagccattggtggtaataagtggtcaacgtgtcgtacgagtaatgcgtatttaaagcattaagctacatatatttaatttgtttaatttgccacagaaaacttccggacggatggtcgattagttccgcacagcttctgtgacttttacttcttcgccagcttgtccggcgaggaggccaatatgggccaaggctacttccactcgccccagtttccagcccactatccggcgcacattaagtgtgcctacaagttcattggtcggccggacacgcacgtggagatcctcttcgaagaactgcagctgccgcctgtggtcagtggaggctgccagttggatgcacttactctgttcgacgcagaatccgctcacatgaactcggtcatcgatgtcatctgctccagccgacccacacgccgtctggtgagcactggtccagatctgctgcttgagtttaatgccagctccaatcgcacggccaaaggatttcgtggaaagtacaagttcgtgtcgaatgatctgggagtaccgaacgcctctgtcccacctccggccgttttggaggcagccagtgtggtggttaagcaggaaaagctccagcaggagcaggcttctgccgccaaggagaacagtctgatgtcggatgtggaactatcgaagcccggacgctcatttggtgagttggcgccccataaattagccttacatttgcgtcttaatgcccttattgattgcctaatatacattggaataatattgcaatacttttatttggctggatagcaaactatatttatttaagtggtgcccttgtttgataaataatatccattaaatgtcacttgaaaaattgttttgtcttaacttgcatagctgtttaaacaaactatttattcttctcatccttcttaattataagttatcccaatttttgttagtgtttctaaccgacccctctcttaatccccaaatcgaattaacttaatcgatggaaaatggcggcaaatgtaaccccgtctttcccggcgacgttcgacagcttccgtctggtttggtccggaattcgcggcggaaacggatgcgtccaattcacagcctcggtccaaagtgattggccatgtaaatggcattgggcttttggcctggctcagtctattgccaactgttgtcacgttcaaatggcgggaatcgcagggctgtttctacaactttgtctgtggtgtaatcttattcatcaattgatagcatcctgttctcctcagcccattagtgagttcaagcttaatacttcggccaaaacatttattaattgcatacaagttgctttttgtcttaatttgcgtgttatatgaaaattatccttctaaaagaacgttcaaaaaacgtaatgatggtttttgctttataaaaatagctatagctatgataacgcctatataattgctgtttttgatgttaaaaatgagatataaagagtgagtaaatcatagccaattaactttatttgtgattattatacaaatgagcccagtagtcgcttcaaaattgaccacaatattagggcagcaccgccacaaagagtgaactgcagcagccgatgaagaaattcaaacctgtgacaaaaacataagaaataataatagctactattatagaatatatgggatacatattacaaatttccaactcaccttttatagatctttcgtcccctttccactacctcctgtcctggttcctccttggcgagatagatgcgaactccggccagtgcctgtaggaagtaatcatcccagtcgacgctgctcatattaaaatcgtaaagcttttgatcctcgacagacattttggcccacaacttgcgggtgttgacggtatcgaacgaccaggatgtgatcacaaagggtgccagaatatcaatgttcttgtggatcttgtcgtacaacttgatcatacgtggctttttgccccataaacgcaaggccagatcaatggcatagccggggagcaggtgataaaagatggccgtgaaccggaatagccagggaatggtggtgcaatgcagaaacggcaaccacatcatcttggtcagtggatacgtgtaccgcagcctcgccgccttgtcccgaaatccaccccaggttatcaggttatcattatttggcgtaaaattgtagataggtggctccggcgatagcttgatacttgtatcccgggccgtgttccaagcgcaggtcagcac

SEQ ID NO: 26135 - DNA, 1728 bp, DROSOPHILA
atgtcgatggatccatcggtttctctagaggatctggagcgacgtcgtcgtcgcgccagttccgcccgcaagcagtcacatactccccagccagcatctcacctggcggattcggaggccatggccgtaatcaatgagatatttaatcccacgctgaagctgccggagtccagtggccactatacgctgcccgaggagatgagggccgatgataatgtggcgccccatgaactggacattgccaagctggcggagctgaaggaagtcttctcgctcttcgatacggactgcgatggactgatctcgaaggatgatctacggttcacctacacggcgctgggcaacgaaccgaacgaacagctactggaacagatgatgcaggaggccaaggagccgctcgactatgaagccttcgttcggctgatgagtcgtcgcacccaggaactggatcccgaggatgttttgttggaggcctggagcaaatgggatgaccatggcacgggcaagatcgacgaacgcaaaatctatgaagagctgaccaactatggtgacaaaatgaccctcaacgaggccaaggaggctcttagccacgccccgatggccaagcccaagtccttggaggagccgcccatgatcgattacccggccttctgtcgcatgctaaaaccagcgatgcgttgggaattatttcttaatggccatttgctgcttgcgatggtgtgcttggacagcgtggacatctttccctatttgcgggagcccgtcatcgagaacgcaaccctggcggcggacaccttctgccagcacagccgggagcgcagtgccacgcctatttatagcgcgggtcgattgctcggactgcgcctccggttccagcagccgcccaccgacctggccagctggaacttgaccctcaacgccagctatcgatttctaaagcgagaaaacttccggacggatggtcgattagttccgcacagcttctgtgacttttacttcttcgccagcttgtccggcgaggaggccaatatgggccaaggctacttccactcgccccagtttccagcccactatccggcgcacattaagtgtgcctacaagttcattggtcggccggacacgcacgtggagatcctcttcgaagaactgcagctgccgcctgtggtcagtggaggctgccagttggatgcacttactctgttcgacgcagaatccgctcacatgaactcggtcatcgatgtcatctgctccagccgacccacacgccgtctggtgagcactggtccagatctgctgcttgagtttaatgccagctccaatcgcacggccaaaggatttcgtggaaagtacaagttcgtgtcgaatgatctgggagtaccgaacgcctctgtcccacctccggccgttttggaggcagccagtgtggtggttaagcaggaaaagctccagcaggagcaggcttctgccgccaaggagaacagtctgatgtcggatgtggaactatcgaagcccggacgctcatttgcttccgtctggtttggtccggaattcgcggcggaaacggatgcgtccaattcacagcctcggtccaaagtgattggccatgtaaatggcattgggcttttggcctggctcagtctattgccaactgttgtcacgttcaaatggcgggaatcgcagggctgtttctacaactttgtctgtggtgtaatcttattcatcaattga

SEQ ID NO: 26136 - protein, 575 aa, DROSOPHILA
MSMDPSVSLEDLERRRRRASSARKQSHTPQPASHLADSEAMAVINEIFNPTLKLPESSGHYTLPEEMRADDNVAPHELDIAKLAELKEVFSLFDTDCDGLISKDDLRFTYTALGNEPNEQLLEQMMQEAKEPLDYEAFVRLMSRRTQELDPEDVLLEAWSKWDDHGTGKIDERKIYEELTNYGDKMTLNEAKEALSHAPMAKPKSLEEPPMIDYPAFCRMLKPAMRWELFLNGHLLLAMVCLDSVDIFPYLREPVIENATLAADTFCQHSRERSATPIYSAGRLLGLRLRFQQPPTDLASWNLTLNASYRFLKRENFRTDGRLVPHSFCDFYFFASLSGEEANMGQGYFHSPQFPAHYPAHIKCAYKFIGRPDTHVEILFEELQLPPVVSGGCQLDALTLFDAESAHMNSVIDVICSSRPTRRLVSTGPDLLLEFNASSNRTAKGFRGKYKFVSNDLGVPNASVPPPAVLEAASVVVKQEKLQQEQASAAKENSLMSDVELSKPGRSFASVWFGPEFAAETDASNSQPRSKVIGHVNGIGLLAWLSLLPTVVTFKWRESQGCFYNFVCGVILFIN

SEQ ID NO: 26137 - DNA, 9631 bp, DROSOPHILA
gaacgggccctcaaaactcattggcttttttttctcattgtgttctcggctacatcttttaaaatacacattgacttattgaagctttttaaaagctaatccattggttaatcataaaaatggtttaatttttactttacttttactttcactatatgtggttacgaggattaaagctttatacaacacactgttgaatcgtacttaaactaagatgcgtcttggtttttggttattcgcggtcataggaatatctcaattctccactcccatgagtagtgtcttccgcttggagtcgtggcaaagtgtctactcctctgtggccccgagggaactaaacgccaaatgatggggatgtgggttgagggaatctcgctcggttgaacaaaataagtgtactataaattatgaaaaacattttgcatcatatttattttacatacatgtacgtttcaattgttttccattttatttattttttgtttccacatatgcgtagagtagaattgtttttatttggatttttacataaataatttgttgatggggttttctatttatgtgcgtctcatttagttatccttgtatattaaattaaactaaaattataaaaacaaaaacaaaacactgaacccacttggccagacatcgccgttttggctagccgccaaagcgagtcccttgttgcatacattaagatctataaaataagcaaacaactaacaaagttaatgtaaaaagtacgaaaatcaagctatttttgataacaatgtttcgactgaaattttgatggcaacaaaagtacgtgagagcaaaactttcccttctgatagttgtgtttctcgaccagtggtatatcgcatttgattggatttaacctgatgtctgattaaatatcaataagttgtatggattctgctgttgcatgttgcatgttgcatgggtggttatcgacattttttacaaacacgtatttaatgaatgctccatgtaaatgtttctggcttttctcatacaaatctagctcctatatcgtttttgtattggtttgcatgcgtttcatttcttttcttttcattctcatggtattaatacgaatcgtaatttacaatgaatggagctcgcgcaatgcaaattaatcaatttttaaattgttacatatgcgtttatgaattattatatctgctttcatgtatagttaaatatttcggtaaacaatagtatcaatatttacggtttactgtttagcttaataaaaaatacagtattatctgtgatttcgttttcattcattttatcattttatcagcttatcattttcggtttattatttttacacgcctatatgccctgaaattctaataagaaacttcttgcatatataattctttgaatatatatatatttcgggggatttttacgcaaaagtatgtttttgtttttctgtagttatttagtaaaatgttgctttattatgttatgcttcagtacgacaaagttgtttcagtttgttgttccttatcaagcttttgattaaatttacgtttcatattttgtgtttcggattttattacaaaagttactatagtaataaatttatttaaatattacagagtgacaacaactaattcggacgatattttgtataaaaacttttcaaggaaatcatgtttcttgtgtaggaaggaaaaactaccatcagatttattcaaatctaaccaaaaactctatcgattgggtaccaatcatttctggccactgtctttttgactttcaagagttttcctagtcgaaacaaaaaaaaaaaattcacacaacgttttctgaaaactttgccgctagaaagaatagaagtactgcaatataaataaatgttttacgaatcgtcacattcgtaagagaaactctgccctgattatttgttgtcacactgtatcagattttgtgttatttttctctcaaattaaaatgtatacatctttttcatcattctgctgatgcggttttagcatctcagtttagtattctatttatgctacaattttcggttcctgatgtaacaaacgtaagaaactttctcgggtctaatttatgcctaattttcggccacattcgctcgcttctcaattcttcttttatatttagtaaatatgcgaaaaaggaattatatgaatgtgtatgtgtgtttgtataaaaatcacaaaaatagtttttcgatccaaatccagtttagaccaaattatattccttaaggttcgattgcagaattgtgtccttaacagctgcaaacacaaaccttatattttccgtatctagacaaaagaaaagaaggcgtagttagtttgattttgtcaaataatcctatgatagtaaactgcacacattttccattcacgatatttcacagactatatttagtttttattgagggactttgaaaaacaaatcatatacattataaataaataattcatttgcattgccacttttcctgatatccgcactgcccgccttagcccaaattgaattccttaagtgcattttgcataattgtatctttgacagcgcagaacacaagtttgatgttttcggtatctgtttaccaagagatcgttgttttattagaaatcaattcgtttaggtttgcaaatttgactagcgatacacaactactctctactctagatcagcggcaaaagcaaatatgcaaatgtaaatgtttttcacacaaaagtttaccttttgaccagtcctttttaggctgaaaactaaaatcacatccacacacaatttctgaccaaacacagaactggcagcaaacttacctgtagcacacgtgaaatgagaatagataattttttcggaatctggatttaaatctacaaacattcgcagtataaactctcgggccgttattgcatctcgctgaggacctgtttcgataagaaggcgaatatgaagttacgtctagcgtggttctacgaaaactagcaaataatctacggatgatattggcgatttaaggcaattacatagatcttaagtacataaggtgaaaatccacctgtggccgttgtgaaatgcgaatagcattgacgttcgggatctggattgcaggccaagtactttttcagaacgaactgtttggccgcagcgtgatcctgttttggacctggttcattgccgcataaaatcgtacataattatggccacctttatcatgcggaacacttaccatcgtattcaggaaaatagtctaccaaatgcgaatacattattttctcttccaacaagtccttcttattcaggaaaagaataactgacgaattttgaaaccaagggtatgtaattatagtacgaaataaagctttagattcctccattcgattctgtgaaagcgtacaggtgattatttgtttaaaaaaaatatattcataacttgaaatcatacctcattatcagattcaaacaagatttgatcgtactccgatagcgctaccaaaaatataattgatgtcacattctcaaagcaatgaatccactttcttctctcggatcgctgaccaccgacgtctaccattctgtttattaagaaaaatatattattgtaagaaaagttaaccaacaaattaactacatataaggccaaacatacaagcatttaattctagagcgcaagcaacgaatctattagtaactaaattgtaagaaatcgtcttcactagctttacaatgaccatttacattactagccttgccggtaattaccaattgatatttttaatagatacctaaacacaatgccatccaaatcgaatggatactcaagaatgccagttgtcggcactcgagcacgcagaatatcctgctcggttggcaagtaatcagcctgttcaattcgagctagatcgctcaagtagctaaattagataaattaatacacttttaaaacaatgaacggaaccaaaagcagtggcaaaaatagttttgcaacccgtctcagtccatcaatttcgctgaaggccctaactaagtccctgaattgtttgcttgaagagacatgcgctaaagaaattcttaagtgtgtagttacaaagtacaaaataaattttaaccataaccaaacaagaggtcatgcacatgcaacgaagtaagggtagaaagatggtatgtacctaaatctgatttcttctaaatcaaagggatactcaattatccctgttgtgggcacacgaactcttaaaatgtcttgctcagtgggtaaatatgcaggttgagccacacgatcgagatccttcagataactatacatagacaagataattgatttagtttgcatagtcgtttcggtagtttcagtctcttcagttcgtttttcggtcattttgcggacggatttaaaccgttccctttgcatgccaacggttaacttactatttggctgaatcagtcagctgatattccctacgacgatcatagcactcctggatgccagcatcgtcccaaagcgttttgatggcattcaagtatggatcctcgaacgtggtaacggtctcataatcgatgctcatcaccagatcggccagttcctgtggatcgtaagatgttgtttaagattcagtgacttcaattagatcaatgtttcacttacactatgctctccctggccgtaggaaatcttcagcatatccatggccttgatcattgactgcatggccatgaatatgttctgaaaaaccagcttgatgtacccacgcttgtcctcgtccgagtaaccgctgccgtggataatacgcatctgtttgatgaatgtggacttcccggactcgccagtgcctggggatataggattggaaaatatatatagccataagcggcgggcaaacaatgcaattagcgaggcggcttcaattgcattaagccaggctaagtgcaatcgaaatgggccatgctccacttacccagtagtagcagtttaagctcgcggcgcgcatctctcttgtcccggcgcaactgcttctcgatttcctgattgatgcgcttttgttccttggcctcctccgataaacagcactccatgctaactagatttatagacgctttcgcgtgctgctgccactacgctcgacagaccgttccgtatataaaatgtatgctgtttggatggtgggatggtctcctggactcccttctctggaccctcggacacctagctaattggttgtatggcgggcgttgaattcacccgttccaagttatagattctgttgtagtttcgattggtgcatttgtacttcggctttgctcgctctgcagacctcctccagcgcttacgatccaggctctctttggctattgctattgctaattacgggtctacgctaagttcttgaccagatttcggtgactcggaggctgagagtgatggttactaatgaacaaagaccacatcgaacgatccaagaacatctgcaaggagacaaagctttgatttagtgcttgcataaccgaactgtaggatctatccaactattgctgctacggaccaccacagttgttggcccaacgagagttcgccgcgttgtgtcccgtgctgacaattaacatttcatatttgctagcctgccccactagctggcgacgtcgatgacgacgtcggatatagattgcccatggctacccatgactaccccgggacttcctctgaccatggcattggctttggttctaagttctgggcctgctctctctgcgcagacctgggatcgccctctaccaggtggcaatagattgaggaagcgttccccacaatgcccctcagccaagttcaatgcaagaaagctgattttggaaaatatatggcttcgctggccacaagttagcgagagtgttctcctattgggtggaccaagcagtctatggataagaagaattggcatatcattctaattcggaaataaaaaagtcacataccgaaacttatgatgcaaaaacacagctctatacacaaaactggaatatcattgcataaactttaaaactcttaatgtacttttatcgttaaaagatatgagtccacccgaatccgcggttcattcatgggttcagcatagggcatgcctatagaatatagcctataaccactggtgctatttcctctcttttccaacccctagtttatatatcgagtgatggctaatccaatttcgtttggcgaacacattgacatgggtcgaggtaaggctttcagcatgaccactaccaaatatcgatggaatacctagcaataattttgacaaaagtctgaccaggagaatttggcgggctcaggtgggcgaatatggagatctggataatgatggctagacgcatagtattcgggaggattagtgggctgcactcggaacacattgctcgctgagcaaagccacaaaatcgaattagcagtggcagcaaaattcaggggcaggggcacgcaattggcgcaatgaagcgttttttaacaatagtttgccagatatatcatgccaccaaatcagagggagatttacctaccgcgaactggtcttatctgccttacatattgtatatgctgatgataaaccactctgagataacgtttgatttgacttcttaatctttagacgactactgctcttctgaaaatcactgttctaatgcaacccatttccgaaaaaccatttctaagccggaaatagcttcacgttactcatgcagttccttatcgcatcctcagcctatttttgctggagaatttatgagctcatattttagatacaaaagtaccctttcattatgatgaaagcatggcttttacacaaaataaatatattcgaatggatttgaataagatggatgacaatccattaaactcgcctggagaataattcgatttttggattataatatatttcggccagtttttagtggcaaccaacaagtggtcggagtcaaaaattaaccacgaaattacgattcttgtattcaatgagcattcagtattacttacttaacattacggagacacgggactaaaggtattcagacgagattctccaaaaagatgttccggttatcgtctcgatttgttttagctaccactatgttatacaaaaaatattgaatttcgggttttagtacgccgattgaagttcttccggattgatcgtgttcttttaatttttgtttttggttccctgccgatgttcggtctgttttaaatatttttagtttaatcacgcgatttgctttgcggtgcgttggttggtcttacgttttttagttagcttaaactaatttcaaaagcatttcgtttttagttggtttgcggtttggaaaacatttgtttttaaggaacgtgtgtagttggttatatattttttactggtgctttttaatataaaagttacgataacgtctgttcggcttccttttaatgtaaatgtgtgatacgatactatttatatatgtagatatatatctatatataattttccctttttgcttctagttttcggtgtgtatgagtgctgttgttgttgttgttcttggtttttaacgtttcttcttgttgttgttgtttttaaacaccagtctgtaaatgcaacgaagtttcaacaaatattcattgtagtgtaattgaaacggaaaagtatgtacgacgacaacgacgacgacgagcggtcttcaaattgatttcacacgaaacacttagtggctccttttgtatttaattttctgcatattttatgcttcttgtatttgtttatttttctgtatgcagtggaactgcaagtaaagaagagagacagagagataaggagaagaacgatggggggggggggtggtattatgggtggtaaggtgggaatatgcattccggaaaatcatcatcatactggctaaggtaaacacacacgaccctcagctaccattttttttttcattttttggttagcccacccgttttaagcccaaaaatatgcacaatccactatgtagttacgcgaccccaactaacttctcgctggcatgcaccgtttagtggcaaaagaaaaccacattgagttaaacaaactatttcttttttaaatttctcaacttttttcctattcgcagtgtttttctcgggcaagcagtgcgacttgctgcgcactgctttacgaacgaatacacacaaatataagcgagggcgttaacgaaacgaaaaaattttgatagcaatgcgattcgaagatttcgcgattcgattcgccgtttgtttaacaattatgggggggccttgcttaatggccagcactgtttggcgaaaaaatacactttacactggcatttcggggaacgttttcggtgctgctaaattttttttttgtcgagggggggactttttcgggtggctgccaggcggctgcggatggcgaccgctggctggcggggagtccgtttgacggggatcttgctcgaaactcacaacatattcgatttggcatcgctcgctactcacaacatatttaattttgcatttttcgctaacgttgacgcacgacccgactttcgatagcaggaggcgttatttgtccgaacctatcggccctatcgttcgtcgatatcgatggtcaaaccaatcggacggcatttgaactagtggtggcaagatatcgatgatggaatagatgctcttaaatcaaagtcttcattgtattacataaggaaggagttttatttgccgcataataactaatagaagtggtttataacaaataaaaacggatttcctggcagttcagcttaatttgaaaatatattacttttggtattttttagttgccacccccaccacaacacatgtcggtgttgccatacggatttctattcatgtgtgtcaatacacattcttagcaataaggttggcaacgccttacatccttcaaataaggatggcaacgccagacatccttaaaaataaggatggcagtgcgccatattctcataattcaggatggcaatgcctgatagctttaggaaagactgaaaatgttgtgtccttttcactctctaacaacagggaatacacttaccatgcacttccatattcgttaagctgtgacccgaaccaatgactatgatcgtaaattttaaataactaaatatatgtgtgtataattaccatttagaacataaaaaatgcgaatatcgtaaaacgccggtcaatcgtcaaatttacaagcactttctatcttcgaaatcagaagacattgcccgccaaatcaaaagacttgtattatttaatctatgttttattggctttctgtaaattattatcatttgttcaatatgttcatgcgataaataagtgtttaaattaattaaataaaattaaaataataactttacagtgtgtgcacaatttaaacaattatttcgggtttcgtgtgatttacaatcgagttaaataaaataaaaacatcgaatcgatcggttagtgactattggattgtgttcgcgttataaagctgtagctagttcgagtctctcaaacgaaaaattaaaaaccaaagtacaaattaaagatacacgtaatcgctaaacgttaatgttgttacttgaaaca

SEQ ID NO: 26138 - DNA, 3600 bp, DROSOPHILA
gatatcgacgaacgatagggccgataggttcggacaaataacgcctcctgctatcgaaagtcgggtcgtgcgtcaacgttagcgaaaaatgcaaaattaaatatgttgtgagtagcgagcgatgccaaatcgaatatgttttccactgcatacagaaaaataaacaaatacaagaagcataaaatatgcagaaaattaaatacaaaaggagccactaagtgtttcgtgtgaaatcaatttgaagaccgctcgtcgtcgtcgttgtcgtcgtacatacttttccgtttcaattacactacaatgaatatttgttgaaacttcgttgcatttacagactggtgtttaaaaacaacaacaacaagaagaaacgttaaaaaccaagaacaacaacaacaacagcactcatacacaccgaaaactagaagcaaaaagggaaaattatatatagatatatatctacatatataaatagtatcgtatcacacatttacattaaaaggaagccgaacagacgttatcgtaacttttatattaaaaagcaccagtaaaaaatatataaccaactacacacgttccttaaaaacaaatgttttccaaaccgcaaaccaactaaaaacgaaatgcttttgaaattagtttaagctaactaaaaaacgtaagaccaaccaacgcaccgcaaagcaaatcgcgtgattaaactaaaaatatttaaaacagaccgaacatcggcagggaaccaaaaacaaaaattaaaagaacacgatcaatccggaagaacttcaatcggcgtactaaaacccgaaattcaatattttttgtataacatagtggtagctaaaacaaatcgagacgataaccggaacatctttttggagaatctcgtctgaatacctttagtcccgtgtctccgtaatgttaaatgttcttggatcgttcgatgtggtctttgttcattagtaaccatcactctcagcctccgagtcaccgaaatctggtcaagaacttagcgtagacccgtaattagcaatagcaatagccaaagagagcctggatcgtaagcgctggaggaggtctgcagagcgagcaaagccgaagtacaaatgcaccaatcgaaactacaacagaatctataacttggaacgggtgaattcaacgcccgccatacaaccaattagctaggtgtccgagggtccagagaagggagtccaggagaccatcccaccatccaaacagcatacattttatatacggaacggtctgtcgagcgtagtggcagcagcacgcgaaagcgtctataaatctagttagcatggagtgctgtttatcggaggaggccaaggaacaaaagcgcatcaatcaggaaatcgagaagcagttgcgccgggacaagagagatgcgcgccgcgagcttaaactgctactactgggcactggcgagtccgggaagtccacattcatcaaacagatgcgtattatccacggcagcggttactcggacgaggacaagcgtgggtacatcaagctggtttttcagaacatattcatggccatgcagtcaatgatcaaggccatggatatgctgaagatttcctacggccagggagagcatagtgaactggccgatctggtgatgagcatcgattatgagaccgttaccacgttcgaggatccatacttgaatgccatcaaaacgctttgggacgatgctggcatccaggagtgctatgatcgtcgtagggaatatcagctgactgattcagccaaatattatctgaaggatctcgatcgtgtggctcaacctgcatatttacccactgagcaagacattttaagagttcgtgtgcccacaacagggataattgagtatccctttgatttagaagaaatcagatttagaatggtagacgtcggtggtcagcgatccgagagaagaaagtggattcattgctttgagaatgtgacatcaattatatttttggtagcgctatcggagtacgatcaaatcttgtttgaatctgataatgagaatcgaatggaggaatctaaagctttatttcgtactataattacatacccttggtttcaaaattcgtcagttattcttttcctgaataagaaggacttgttggaagagaaaataatgtattcgcatttggtagactattttcctgaatacgatggtcctcagcgagatgcaataacggcccgagagtttatactgcgaatgtttgtagatttaaatccagattccgaaaaaattatctattctcatttcacgtgtgctacagatacggaaaatataaggtttgtgtttgcagctgttaaggacacaattctgcaatcgaaccttaaggaatataatttggtctaaactggatttggatcgaaaaactatttttgtgatttttatacaaacacacatacacattcatataattcctttttcgcatatttactaaatataaaagaagaattgagaagcgagcgaatgtggccgaaaattaggcataaattagacccgagaaagtttcttacgtttgttacatcaggaaccgaaaattgtagcataaatagaatactaaactgagatgctaaaaccgcatcagcagaatgatgaaaaagatgtatacattttaatttgagagaaaaataacacaaaatctgatacagtgtgacaacaaataatcagggcagagtttctcttacgaatgtgacgattcgtaaaacatttatttatattgcagtacttctattctttctagcggcaaagttttcagaaaacgttgtgtgaattttttttttttgtttcgactaggaaaactcttgaaagtcaaaaagacagtggccagaaatgattggtacccaatcgatagagtttttggttagatttgaataaatctgatggtagtttttccttcctacacaagaaacatgatttccttgaaaagtttttatacaaaatatcgtccgaattagttgttgtcactctgtaatatttaaataaatttattactatagtaacttttgtaataaaatccgaaacacaaaatatgaaacgtaaatttaatcaaaagcttgataaggaacaacaaactgaaacaactttgtcgtactgaagcataacataataaagcaacattttactaaataactacagaaaaacaaaaacatacttttgcgtaaaaatcccccgaaatatatatatattcaaagaattatatatgcaagaagtttcttattagaatttcagggcatataggcgtgtaaaaataataaaccgaaaatgataagctgataaaatgataaaatgaatgaaaacgaaatcacagataatactgtattttttattaagctaaacagtaaaccgtaaatattgatactattgtttaccgaaatatttaactatacatgaaagcagatataataattcataaacgcatatgtaacaatttaaaaattgattaatttgcattgcgcgagctccattcattgtaaattacgattcgtattaataccatgagaatgaaaagaaaagaaatgaaacgcatgcaaaccaatacaaaaacgatataggagctagatttgtatgagaaaagccag

SEQ ID NO: 26139 - protein, 353 aa, DROSOPHILA
MECCLSEEAKEQKRINQEIEKQLRRDKRDARRELKLLLLGTGESGKSTFIKQMRIIHGSGYSDEDKRGYIKLVFQNIFMAMQSMIKAMDMLKISYGQGEHSELADLVMSIDYETVTTFEDPYLNAIKTLWDDAGIQECYDRRREYQLTDSAKYYLKDLDRVAQPAYLPTEQDILRVRVPTTGIIEYPFDLEEIRFRMVDVGGQRSERRKWIHCFENVTSIIFLVALSEYDQILFESDNENRMEESKALFRTIITYPWFQNSSVILFLNKKDLLEEKIMYSHLVDYFPEYDGPQRDAITAREFILRMFVDLNPDSEKIIYSHFTCATDTENIRFVFAAVKDTILQSNLKEYNLV

SEQ ID NO: 26140 - DNA, 3130 bp, DROSOPHILA
tgtgatgtttaattcgcttgtttgcccatataaggttctacggttaatgcaaagcatgacatatatatgattttattgtgatagttcacgtgtactgaaaccccggctaaaagcagctggattcatagttagtgcgtttaggctgaataagaacagtatgtaaaccgagttatatttaatggattgtatatgtaaacataagattgaaataaaaaacagttttttaacgtccaaaagcaacaaggcgcatttaatatacatcagtttataatataatagcaaacttataaataattaaaaagttattttctgttttacatacatttatttccctatttttaaaatatgatacacaaaggttgttactcatcaatatgatttaaatagacattttgtagaaatcgaggtcacagcaaattagtttcacttaaatgcaattccagaattgtgtccttgacagcagtgaacacgaacttaatattttcagtatctacaaaaccaaaaaacacttttttagttattgagtgtaaagcgtccttagtttttatgttgagacacaataaaacacaagcaaggaattcaaaaagatgtgtttttttcaaaaatcagaatataaagttgacttacttgtagcaacggtgaaatgaggatagatgcacttgtaaggatcaggattcacgctagtaaacatgtacaatatgaattctcgggccgccttagcatccttctttggacctggttaataggatgtcgaataaaatcctttatatgacatgtacatacgtttgattgatgtcaacttaccattatattcaggaaaatagtctgccaaatgcgttgacaatattttctttttaaataaatcctccttgtttagaaacagaataacggacgagtgttgaaaccatgaaaacgatattatattgtgaaataaagctttagattccttcatacgattctgaaataaggaatttggttattcattggaagaaattgaatttcaaaagaatacatcattctccgattcagccaaggatagatcaaactcggacatggcaaccaaaaacataattgatgtcacattggaaaaacaatgaatccactttcttctctccgttcgctgaccagcgacgtccaccaatctgtgttgtgttgtacgatttaattgaagttattaattttactatatttcaaacaaataccttatcagaaaaccgtccaaattgaagggatactcaacaatattggttgttggcgctcgaacatgaagaatgtcctgatcagtggcctggtaatcactccgttcaattcgcgctatgtcattcaaaaagctaattggatgaaaaatgaagcgattttaatttaagttatttatttaattatgcttaatacaaatgcttagataaaatgtaactattatcacattcaagacacataaaataagcagaaaaagagttgattttaaatgggttttctgtgcacgattacccatgtgtgcctctcagatatttcttagtaaatcaatccgctcactcactattcagttgaatcagtcagctgatattccctacgacgattgtagcactccttgatgccagcatctttccaaagagttttgatggcattcaagtagggcgcctccagtctggtaactgtcttgtaatcgatgctcttcaccagatcggcaagtttctgtggatcataagatttcgttggaggcaaatcaaaatatgtattattgcttcaggaattagtcttacactatgctcctgctgaccgtagggaattcgcagagtatccattgcactgatcatcgactgtatggccatgaatatgttttggaaaacatttttggtgaactgcttcctctccttgtccaaaaatcctttgccgtgaatgatgcgcatttgtttgatgaatgtggtcttgcccgattcacctgtgcctgcgattgtggatttgttgggtatatacacaggccatgaaattaattattctacgatttcccttacccaggaccaatagcttaagttcacgtcgagctttcttcttttccgctttcaggaacttatcaatttccctgctgatacgcctttcctcacaagcctggtccgataggcagcagtccatggttattcctgcaggcttattctctggttccttgattatttcgattctttatttgttgagtaaagaacgcaattggtcaatataaatacgcctttctttgatctttacttgatcgttgcaagtgtgtaacacgtagaaggataagttttctatcctgtagcttaattaattaatatcaacaattatagatcctgtccgtttgtccgtatgtcgggatcttgggaacgatatggctagcaagttcactgaacccgaatctagaatgctgattccagtgacacatgggtaatttactatgacgactccgaaagtttggccttgaaaaatatcatatgaaataaggctctgcctatacgaatataatattatcttcgctttgggtattaatacaaaacaaaagtgttactcactccaaaatatcgagctgaacattttgtcgagttgtaattattaaatgtatgccgaaacccaaattggcattgttttaaatgagtttataaaatatttcataaataaaataaagcaactataattttttgattctgtcgactgaaatgaatcactcatacatacaatatattatgtatgtacgattataaatccttccttctgcgagttccggataacggaagtgataacacgttattttataactgactcacgtgcttacaaaatattttctttttattttttagatacaattttacatttatttcatcgttttttggtcgttttttttcgtgctttttaggttcgcttttgaagtgatgaaacgatttattgaaatttagtcacatgaaagcactattattaatttctaacttttttgtagattttaaatttgtttcaccaattttacgggtttacttaatttttttattttttattcctgttctgtaggttatatataaaattttaaacttccgaaacgtggactaaacagaatttttgcaaaatttgtatattctgtcttgagagtttttctaagactaattgggcg

SEQ ID NO: 26141 - DNA, 669 bp, DROSOPHILA
atggactgctgcctatcggaccaggcttgtgaggaaaggcgtatcagcagggaaattgataagttcctgaaagcggaaaagaagaaagctcgacgtgaacttaagctattggtcctgggatttttggacaaggagaggaagcagttcaccaaaaatgttttccaaaacatattcatggccatacagtcgatgatcagtgcaatggatactctgcgaattccctacggtcagcaggagcatagtaaacttgccgatctggtgaagagcatcgattacaagacagttaccagactggaggcgccctacttgaatgccatcaaaactctttggaaagatgctggcatcaaggagtgctacaatcgtcgtagggaatatcagctgactgattcaactgaatactttttgaatgacatagcgcgaattgaacggagtgattaccaggccactgatcaggacattcttcatgttcgagcgccaacaaccaatattgttgagtatcccttcaatttggacggttttctgataagattggtggacgtcgctggtcagcgaacggagagaagaaagtggattcattgtttttccaatgtgacatcaattatgtttttggttgccatgtccgagtttgatctatccttggctgaatcggagaatgatgtattcttttga

SEQ ID NO: 26142 - protein, 222 aa, DROSOPHILA
MDCCLSDQACEERRISREIDKFLKAEKKKARRELKLLVLGFLDKERKQFTKNVFQNIFMAIQSMISAMDTLRIPYGQQEHSKLADLVKSIDYKTVTRLEAPYLNAIKTLWKDAGIKECYNRRREYQLTDSTEYFLNDIARIERSDYQATDQDILHVRAPTTNIVEYPFNLDGFLIRLVDVAGQRTERRKWIHCFSNVTSIMFLVAMSEFDLSLAESENDVFF

SEQ ID NO: 26143 - DNA, 15505 bp, DROSOPHILA
acctattcaacctggccgccgccatggatcagctctttccgggagctgtagacgagcatctcgaagaactggttgcttgcgttaagcgttacattgtcgaggatgagccccagttaatacgccatgcgctgttgcatgagatttccggtattctggaggaggaacagctagcggagcaggcacaccagctggagaagcttttggagcgatgtcagaaacctggcggccgcgagtggttgatctacgctgcactgcaagctaaaaacaagtcgtgacaccacaacattttgcaatagaagactactgtttattgtaaataccaagaagcttgggatatttctttttagatgcaccattccaaatagaccaattgcaacgacgtgttatagaggcttctgacgaatcacaattacgattgtgatttcctgtcatgaacattattatttattcattattatatatgaaaacatattttaaatataaatttaaaacaaacatttgtgtgattttatttaaagtgaattgtcttgtgatttgtggtatcattaaacattgaattattaaatatatagtagttataaaaatcataaaatatagagagcacgctctaggccggatagaacgtataaatctatgttgatagtaacattaatatctaatctttaaatttataattcaggaatcacggcattcagatagtactcaatatagcgtttatcagcttttcgaatcaattccaatatttattttatttccaccggtgtaaattaaccatttttcaatacaatggcacgttatatatgaatctaattaggcaagtaacttaaaggattttaattaaaagtttctagatttaatttaattttacggggaataccctaaatagcgaacgtgtagaatatagctgtgctgctttggtctcactgctagaaaatatcgataagattgatatcgataatgcccaagcttgccgttcatcgatggcgcccagtcgtcgaagttttcacagctctaacagttgagacaacattttgagaaattgtcgtttgttttgtcgtgctttttgtttaaacattgcgttgtgttttttgtttatcgcccccgtgtcgatctgatctgattcggttcgccaatccaattggattgggcaagcgccacaaacgttcaacagcggagtgaatcgccatgaaacaggtgggcggggcttaacggtttgcgggggggttggttggtatttagtgggtggttgtgttgcggaatgtgttattgttgctgttgtttttgttttcgttttttgtttctgctgctgctgcgatgatgttatgtcccctgcttgtcaatgtgtttctctctgcatgtgtgtgtgtaaaatgcaaattagaatgacaacatgtttgcatttgctgcttttcaatatcaaccatcacatcaccgttaggtttttgctgctgctccagatgaatcatttgagctctccccctctctcttgctccctttcccatgcagattcttatcagagcagcgaaagtcaatgttctatctttattgttcttgttcttgtttttgttctcttgccaacaagtttcttattggactacatttacattaccaacatgacgcaagagttgccaacctccccccccctctgaccatgtcgttcggagctcctttttattgcctactttgctgagttattgataatgggctctcgcacacaagaaggataaagcataacggcgcataacttattaccattaccatgcaaatttccatacgaccattgtgtttgtgtgttagagcgagaggacctatgaattgtgagagtatgccagtatttacattttagcagattacactttttagtatgtactcgcatgtgggatttattactttgctttctcaaaaaaaaaaaagaaaagagaaaaggcaatttggggagcttcgcctcctaacaagtatcgattcctggttaaagcaagggaaaacctcggtcagggttgccaacgcattgggctaacaatccgaaatcaaagccagcgacaaccatacggactcgttggtgctttgcataaccatataaccaggatattcaggacgtgccagtgtgtttctgtgtgtgtgtgagtgtttgaattgtgtgtgtgtgtgtactcctccgtgtatgtataacacgtgccgtggaaactgcgcggaaacgctaccagtttcagtttttcgctgtagagcattcgacgcgttcgcacgcgttgattttttcctaaatcctaaaaaagaacccacaaccattaagccaaaatctataaaaaaaaattgcaaaacatctcgaaacaaaaagaaaatctgttccagatgtttacgccaagtaaatccagaggaaaagctacaatttaaaagaaaaaaatcgctgtgttggtatgtgtgtgtgtgtgctgctcctgcgctgcctcaacaaatttttcacttgtatgtgtgtatgtgtgtgtaactcgtgtcatgtgaccgcgcgcgcaaaacattttgcattgtttttgcccaagcagttgctgtagttgttgttgcaggatatccagcgtgtacgcgaaaaacgtttttgggggcgaaatagcgtaagcctgcgcaatagtcgctcacatggcagctggccatacacacacatgcacacaaacgcagggataaacaggagttagccgagatttttttgtgccattaaaacgagggaaattcaacgaagaacgccttgaagtaggctaaacaaaaagcggagcagcgattgattccgttacatttccaatcagcataaattgcaagcagtgtgagtgagagtcagagtgccagtgtgtgtgtgtgtgtacgtgtaatactcacgcatatacttacatacgttgagaatcctagaaagcagcatcgcctgctccttttcgttggcgctctcgttctcaattttgcagcagcagcagcagcagcagtagagacagtagaagcagtaaaagcagcagcagcagcagctcagtcgacaactgaccagccaagcactagcatatttcctattggccccttgcaacaaaaagccccgaaaatatattgaaaatttcacaaaaatggtagaagccaaaactgtgaaaaactaaagcgaacgtcttgaagccattaaaaaagcgcgcctattcagtgaatgtgtgtgtgtgcgtgagaattgatgtgtaaaaagaacagtgtattgaaatatcaataaactatcgatgatcctttgaaaattaagaaaaaaaatttaattttttttttgtatgttcaagtgaagaagctgcaggaggagcataagatgaagatgtagctaacatgtgagtagcaacaagcagggccaagcagtgcctatgtgtgtgaaaaatctgtaaatcgaggttatctatacacgcacactcacatgagcagtgagcagaagcgagatagaagctgccgaacatacatacatatacatacacagatttcggcagcatccagcgactccatctcgctcgcactctctccctgcccaaacccactcgcattctcctctactctaaagcaatggcattttaatcatcattaggacgagtggaagggggatagcacactgtcattatcaacagacacacatacacacacacagtcacacctcctgttgtcctgcaggcgccacccaccatattgctctttctctttccatcccccgcaacccagttgctctgcaatgtttgtttgcgggaattaaatttaaagtatgccaacgatttgcttgtccttctccacccactcttcttcgctttttcgccccactgttgcgcgcatttcgtcctggcgacccatatgtgtatgtacatatgtatgtccttgtgttcacgtgtatgtttgtcaaagcgtaaacaattgcgaataaaacaagctgcaaaaaaggaaaaacgacagcaaaaatagcaacaaaaagtagcaagagaaataatgaaacgaaaacagaacaagaattcacacacaaagagagaaatacaaaaaaaggaataccgtgtagcagttgaacaacacacgacatttgcaatgtgcgagtgtgcgaaaaaatcgatttgtgtgccatcaaaaactgcatatataggcaacccatattcccatatatatccgccaccccctcatcccccgcagcacaaacaacctgcccccgttgtgcaacataatgtggcagcaacgattttcaattaacatcaaacaatcgcttaacgtttaacatccgccattgcaatcgcaatatcccgttatacagattgattctctttcattcgcgccatccctttcgcacacccagcaggctcggtgggggggtggagggtcagggtatagggatttagagggtagggagcttggatggctcttaattaatctacgtgtgccattgtcaaaaggctgaatagaaatcaaggtttatgtaatccgccaggccaggcgatacaaaaatgaaaaacaaaagaaatcgaagggagggaagcaaacaaagcgaacgcaaaaaaaaaacggtttaattctagcaatccagactatacacagctgttatcgatatctaaattgatatttcctcatttccgttccaagaaatgcaaatcttgcgacatcaaaacttccggaaaagccatgaaaggaaaaggaagcatattttctatatgaactgctattgaaatcattttcaagcatggtttgtgatttaggtcgactttaaaatcaataaataagtgtgttaaatgtttgctcgttaacataaacattcaattttggaatataatatcttgaagattgaacaaaggtgcccgcaagtatacaacaaaataataaaaagctgcagttttgcatattttatacactttataatttatactttacttacaaagtgattttaaatcatcagagatttgtgtatgctcttaaaaaaacatggaatgaaacttgaccaaaaatgtgttgtgcgtgtaagaggacctcggggagcacttaggatacagaacagagagtagaacatattgtaattgaagctttcaacttgttttcatccgttttaattagatctcccatttcccattctctccctcattgcagcaaatatttcgaccactgttaacctagtttcacatctcaaaaataaaaccaaacaacaaggacgaactcagaccagcactggctcctctgtcttcaattacgcacagctctaccagtatctagagaataacgagtaaaggctaccaaggactcgagggaagagaatcgcctggggcagaggaagaagccaatccccatacttttcggttctcctcggaccagaatcatcacctcccccatcccgaccccggcactaccttcccgctgaaccacatacactctgtccactatccactattcgacaccaccacactctgtgcatccaactatttggccaaccattaatccttgggcgagaccagagcagccccatcgcataactgtggatagcagagcagccggagcacgaggacgactcatgttacaaaaatgaaaaagttcacattcaaaggagttctagatggatttcgacaaagcgttcagccccaagccacacgacaggagcaggagattcaggagcaactcaaggccgatcactttacgttaaagaaagtaagttaaaaacatacgataaatgggatacgagttgaaagtgcccataatcgaaaggcatctgttgcagctagcgggtgttttatttggtagctgtaatgatttgaatctatcataagacacacgcggctataaccgttgtctaagagcttcaaaatcgataataacaaacaataaaagtagtaatttataatactaaatcatacgagttagcgtgattagtacgtttgatccaatttcttctctttatcgcagacctttcgccatggctttccatactcgcccacatccttcgccttcgatccagtacaaaagctactagcgattggcgacaaatcgggctacattcgcatgtaagtgtgacttgaatacaacgtttttctcattatttattaatctcatctttctatatatgaactaattgcagtttgggacgacctggcgtcgatgcccatgccaaacacgagggcgaatccgagtgcgccgtgctctttgcccagttcctggtcaacgagggcgcattggtcaccgtcaccgccgatgacaccattcacttgtggagcattcgccaaaagacaccgcgcattgtgcagagtctgaagtttcagagggagcggtaagttcaagtccattatgtttggtcttattatggatatcacgatatcgtaatactgccgtccataaaacgggttatcaatttggctaattctcaacatattccaacatatgtatatcccccgatgacataatctccatctctcttgcagcgtgacttgcatacacctgcctgtgggcagcaaatggctgtacgtgggcaccgagaagggaaacatacacgttgttcacatagatacatttgcacttagtggttatattattaactggaataaagcaattgaagtgtaagtccaattactcccttagtgacctaaaccgaccgcattaagttctaatcacgggcttaaaccaatttgcagggttagaactagtcatccaggtgctgtgattgcgttatgtgataatccattggatgcaaacaaggtgaatactttgtttcaatgaggaaaatgcctcaagaagatttcactccccttaaacttaatgcatatattatattattatattcgatgactgatgagattctttccgcacagttgcttattgcatttgagtgcgggctgcttgtgctgtgggatctgaaggcgaaatgcgctgagctgcgatggcaggcggccgaggccgtcaagtccctggcctggcactacgagggcaaatattttgtgtcctcgcacacggatggctccatttgctcctggcccacgaagccgcaggctaagccgcagtcgcaggtctgtccgcatggtaagttgcacagtcattatccatatataaatatatttgattcgatttatgtatgctttagctaaaatcaacaaggatggcaatgcggagaaatgcaagccgatatataaagttgacttgaagtccagcgcaactgggtgagtaataagcactgtcgaatcatttgtttactactatgctttatttatattacacggagatagctgaacaacctagggcgttatctttatttttggaacaataaccataaagcaattttacaataatatttcaacaataagaatcattgcgctgccggcgtgtcgataaaacaaatgaataatgataacttgactcattaaaaatttataatcttttaatttgcccgccgcagggaaaccttcacaattttctcgggcggcatgccctcggagaagggctccaagtccaactgcatcacggtgatggtgggcaaggccaccacggtgctggagatggagcacgccgtttgcgatttcataacactctgcgagaatccctggccctgcggtatgttttaaataagataagaacattaagatcgacagagcatatgtataagtcaactgtgattgtattctgcagacttgttggtatttgtgtgatgttatatattatatataagatatattgtataatatgaaataatttacttacttggtttttgtctgcctttacagagacccaggagccgtatgctattgccgtgctgttgcaatacgacttagtattaatagacttattaacacccggttttccatgttttgaatcgccttatccaatggacttacacgaatcacctgttacatgttgcacatatttaaccgattgcccatcggatttggttcctgctttctattcagtgagttttacacgcacccaattttcgttaatatccttcaattgattcaataattcgtgtgctttaggttggtcgcacaacgacaagtaaaaagagctgcttctcggagcgcgaatggccgatatccggtggcgagtggtcgccggcgtcgtgcagctattcggagatcgtgatcaccggacaccaggacggcagcctcaagttctgggattccggtgccggcacactgcagatcctctataagctgaagacagccaagatgttcgagaagccgcgctcccacgtcgcccactcgcatccggaaagcgacaatccgctggcggtgcacctaatcttcctttgctcggaatcgcgacgcctgtgtgtggccggcgccatgggacaggtgatgctcttcaagttccgcaaagtggagtccacgtcggaggtactggtgctggagatacccatactctatgagaattttgatgacatttatgggacaagtcccgagtgcgattttctaacgggccatcaagtgcagaaggctgagtcgagtgattcggataaggtaatgataacttgtgcatgttgttccttcgcaagttccccgctgatttctcgatatcctacatcatatctattacagacggccgagtgttcgctaaaggtgcgcaatggggcgcaacgcaagccgccgggcttccagtcgcagctggtctgcctcaccaccggaccaaatcgccggaacgtgcaggtcacctcgctgtgcatcagctccagttatggcctgtaagtagcatagctgctgccacccatccaaccatccagctagccagccagccagccagccagccaaccgttcatcccattaatcccatcatccccgagacactcgcttcaatccatccgatcatccatcctgcaatccatctgcccatcgatccagccacacacgtacacacaccaccaccaaaaagccccaagcagctcccagccgccaacaataaccagcccagagcaaagccacccaactacccaccagacaaaggacacaggaaagcggacttaaaagatactagctccctgaaccctgcccaaaaaaaaaaaaaatttacttagaccgtagtctagtttgtattcgtaaatgcatgacgttctctgagaaaagcgcctgagacgtagccgcgaacgctcgacgagtgttctagcctgcccaaaaaacctgataacccctgccacgccccccccccccccaatttccacctgcctacgcctctgccccgcccccaaggtgcaccgcttttgttgaatttgtttgcgttgtgtattccgtagtatgcaacagttgcaagcagaccgaaaaaaaaaccaaatcaacgtcccttggtaattacaagcacctaaagcagaatttctggacagaattgtgacccattgacctcttgtcttttcggatctagaaaccgattgcccaaatccaacgccagactggcataaaagcgacgtactcatgactgaaaccgaaacccggacggattcgtattttagtgcctggtgtgtgcgcgtgtgtgagagtgatgatgcgcatcaaaataattcatttgtctttcagttttcgttttcaagggtttcgtatttgcgtttcggtatttaatattgttttttgtttttcattttttaatgtgataatttgctttcgagtttcgtttacgtactagtgctaattagtattttggtatttttttgaaatttttttactttagctaagcactgtagtttgctttcgtatttatttttcttaagcacttttcttatgctaattttttagtactttctaaatatcttaaatattacaataccataatttaatagagtaaaaaaaaatagtaaaacttaattgcataatatgtagtactttctgatgagaagtttaaactattgaaatttttggtacttcagacagctaatatatatatttttatttatttttacttatgtattatgattttttgtatttgtattaccttggtatacgttgcattatctaaattaagttattatcctgatgacgaatagtttcctcgcatttgttttgtgacgttgatttgtatgcagttgattttggaaatatatatgaatattttctgtttttagaatggcttatggtaccgaatatggacttgtcataattgatataatccaaaaaatttgcctattgagtgttgcatgccccgatctgtatggcgcacatgatccttactcgcgaacaccaaaaagtccaaaacgtattgaaaacaaagaggagcaaagccgatcgcccagctcagatcaggtaagtgccctcgctctctctctctctctttctctctctctctctctctgtctgtcagtctctctgtctctctctggcaccgagactaattttataaccgaatcgcagtgaaccgcgcgtacaaacatacactcgaatccataacgaaagtacacagacagaccatataattcaaatgcgccattgatttgaattgaaacacagccacactaacaacacagacaccgcagatcatttgaattcgcaattgatttgaactgaaacacagcaacactgagaacacagacagaccgaaatgtatgctatactattcacgccgaccaacaagtgctcatttgaaacatgttacatactcaatatttttctaaacatcttacatatacatatttgaattttatatgcataccgatatttacttattacataacgaacgaaattttaattacgtatcacatactaacaaatataccaaattgatatatacattatataatctatatatatatatatttaaacatactcgtatgtatgagctaacttttaaaaattgtagccaatgaaacttttgttttggtttgtgttttttgttttcgttttccctttagttaacctatcgctctccctgtctcgctgtcaccttattgcatttttgtggcattttttttataccaatctgatggaatacctcataagtacttagaccccagtccatttatatctatatattacactcacccacatgcaagcaagcaagcaaatataaccaaaatgtttagctgaatatctaaaaggatatgaaactgtagctttagtttagcttggtagttgctatcaagtattttttcgatgtactatagctagcccttttttacagcgaataactaaccatccctctctaactgaagatcacactgatatagttttctctttattgaacacccaactaacgatatcgatccccgaattggctaatggctatttaatacttcggttaccttaaatttggtattttatggtcaagtacaataaaatgtggccatccttttctctttcctatctctatctctgtctccgctttcaagcttatatatatctatctctgtctctaagctaaagtactaaatgcagcatggtaaaaatcatattaacgtattggtttcagttttgtttggttttttttttttgtgttttgcacgaagcttgcctacgatatgatggaaattttatttgatttggatggattggattggtgtcttttctgttttgattgccacgctaaagaccatcgcatagacacgattgatcgctttgattgttgtacatgtacatgtgtggtatgatgcgatatgattcgatgccgatacgatcctatttcattcgattatctttgattcgattcaggtcgatttcgagtcggttcgatttgagttgatttgatctgagttttgcctgaaaaataagtgcctagcgaacacccaagaaacaattacaatcgaaacaacatgaacaacagcgacaacataaatatgtttctccccccctctctctctctctctctgcctctatgtctgtctctctttctctgtgtttgtgtatcaacttattgattgaataattgatgaaaaaagtgtatgtgtgtgatcgttttactttgtcacctctccttcagaacaccttatgtaacataaccaacaatcaaaccacccaccaccaccaatgcagctaacaaattattcaattatttgatatacatatttataacctaattcgaattgataattgatcgtagttcattttattacattttaaattctaaatctaagcatatctgaaacaaattaaatcgttgtattgcctgtgcgtgtgtgtgtttgtgtttgagttttgccaatgcgtatgtgaatgtgtgtgtggtgtacacactcactcctagcatcaaactgttatacgcctaaagtatatcagctaactaagtcgttgcctaaagttaaacccctatccgatgtttgttaatccacaagaaaaccaaacgaatccataacaagtttaaattgtaaattgttgatacaatattcccccagtcccccccccccccttagcaacccaataaccccgtttaagctctgtttatccttgtaaaaaaaaaaaaaaaaaagtacacccccaacatactccaaagaaaaactggagcaaacccaaaaaggcaaataagcagcaacaagaatgcgcagcttccaacccccaaaaatggcataaatatgtatttatatgggtgaaaactgcgaaatgccattgcaaaagcatgccaaaaatttataatccatcctctttcattcactaatttttcacttttccgcttttcgtgacctacttcaatttgctgtatttatacaccctcaatggaaaacttgtgcattacaaattatttgagatttatttctatgaaattcagtaaatatttatcaatatttagagttggcgcccgaagagaaattggcaggaactattccgtttgagagtccaagattttttttttagaaacacatggttgcattgaaaggcagccaatgtaaatactaacaatgtcataaagcatcatgtataaactatattctaataatattatgggaattagaaagattcaattttattcaaatagccccttgtcattaagaatcataatattgtaccatattttcttacgtattttcacctcacttttcgcctttacttgttgctgctatatttttgcatctttgggcttgctgatcaaagagaagagaacaaattaaacagaaaccaaaacaaaaacctacaaaaaacaaaaaaacaaaaataacccagtaacccaaaaaacaaaaacaaaaattaattagtgaatgttaaccccttaatctccatgaagtcctctaaaatcccatgtccgtcgataccgaccactactacttttcttattgttgcctaaacgaacagaaagaaaaacgaaaattaaaactctgcaccctacccctcaaaaatcccgatcttcatctagctgaacgacacgaccagtccggatagtccgtctctcgaatttgtaccggaggctggcgaaacatcggcccacgatggcgtggcgacggcaactagctcacgtcccagttcaccggacccggtggtgaacagtgctcgtgaaacgctgctcagcggatcggcagcggcaacggcggctgcggcagcatcggcggctgtcatgatggccaagagtccccagcgggatgatgcagctcccaaggagctgcaggacagacgaaagtccatgtcctggaaaacgttcaatttgaagcgtcaattatcgaaagtcaatatgaagatcggcggcctgaatgtcaataccgatatggagtcgctaaagaatagctccattttctacacgcccaaggaggtgtcaccggaggctgctacgccaccggcaacagaagaggaggcaacgccggagggcaaggaggacgagtccctggatgatggcgaaatggcgaccaacgcgggagcagcagcagctgcatcaccatcgccggcagttcgtggcaaatttcgctcatccaccacggattcacctgatgagggcgccagcagtagcattgccagcggcattcgtcgtgtggactttgaacagccggctggggtcgaggtggagcgaccaaacaacctgccactggcggatgcaccagctccactgaagcccgcccgtcaaaagttcaaggaaaagtcgcgcgatcagcgacttttatccgttccgaacattaagtatcagccgcgagattcgcgtggcggtgctcggaacctcaagaatgatgtctcaccgctgatgggcggtggtggcggtggaggaggcgttgttggtgccagcagcggcattggtggaagcgtcgctggaggcaagaagatacgtaagtatggccccagcgaaaggatcatcctccatcttatccaaaataacaaatcaaaagaacgctttaagccgaaagtttaacccccttaactataaaaaaaaaaaagaaattttatgtgcagagcgagcgagcgagttctttcctgagtggtcgcaaggcaggcagacagattgtaaatcacgaatccccgaatcggatacgaaatttcgtcctcgttattgagattttactgcgtttatgtgagggtgttctgtggattctgtgtattaatgttatagaacttatctgtgttcgaagtttttagttaaggtgaccgaaaatattcttttccagagactgcatgccaatattaagaagactttgaaacgtatagttaatcgatccaacaagatcaaactaaataataccattgagaaacgcataaacgcagtacatccgctctcgacgtcgcaagtgatccttctcttcgtttctctaaaccctttctcccacccagtctcccctctctctcaccgtttctctcctcctcgaacatcggcgttctgtcgtcgtttctgtttgggtttttcacttttctcgtttcagttttgtgttgtgcctttgctttgcgttgcttttagttgctgcaagctgtagaaaatagcataaacaaatgagatactactgtatacttagcacccctgctcctttgtccaagcgcctgtttccaaaaaaccctgaccctatcaatagcgcagctagagatgtgcatattccaataccggatatagagatgagaaccgaacgataatcaaaattccgatgatgctttattttgttgatttttgaaacggaaacaaaaaccaaaattgcattttgtgtatagagcatactttgtagagagttagctaatttaaacaacaaccaaaatcaagtaaaacgtgacaataaaaaataatgatgtaaaaaacaatacaaaataatacacttgagaaacaatgtgatgcgacaacaacagcaactaacaaacaaaatcacatacgcacccaacctaaacaattacaacaactatgtagaaaacaaaaactttacaaaaagtacaaatttttgccaaaaatttcttatctatgcttcttcttctcctcaatacctaggcaacggatgcagaagagctgcaatacaactgcctgtatgtgattgtgtggaagttctttggtaaatcatttaacaaccaccaccaccatcatcactaccactactcaccagtcacttaaaacaaaacacacaagaacaacaaccactaacaagcaccatcacacccacatacaacatgtaactataaagctctgaaattacttactacttagtatgcaa

SEQ ID NO: 26144 - DNA, 3546 bp, DROSOPHILA
ttttcacagctctaacagttgagacaacattttgagaaattgtcgtttgttttgtcgtgctttttgtttaaacattgcgttgtgttttttgtttatcgcccccgtgtcgatctgatctgattcggttcgccaatccaattggattgggcaagcgccacaaacgttcaacagcggagtgaatcgccatgaaacagaagctgcaggaggagcataagatgaagatgtagctaacatcaaatatttcgaccactgttaacctagtttcacatctcaaaaataaaaccaaacaacaaggacgaactcagaccagcactggctcctctgtcttcaattacgcacagctctaccagtatctagagaataacgagtaaaggctaccaaggactcgagggaagagaatcgcctggggcagaggaagaagccaatccccatacttttcggttctcctcggaccagaatcatcacctcccccatcccgaccccggcactaccttcccgctgaaccacatacactctgtccactatccactattcgacaccaccacactctgtgcatccaactatttggccaaccattaatccttgggcgagaccagagcagccccatcgcataactgtggatagcagagcagccggagcacgaggacgactcatgttacaaaaatgaaaaagttcacattcaaaggagttctagatggatttcgacaaagcgttcagccccaagccacacgacaggagcaggagattcaggagcaactcaaggccgatcactttacgttaaagaaaacctttcgccatggctttccatactcgcccacatccttcgccttcgatccagtacaaaagctactagcgattggcgacaaatcgggctacattcgcattttgggacgacctggcgtcgatgcccatgccaaacacgagggcgaatccgagtgcgccgtgctctttgcccagttcctggtcaacgagggcgcattggtcaccgtcaccgccgatgacaccattcacttgtggagcattcgccaaaagacaccgcgcattgtgcagagtctgaagtttcagagggagcgcgtgacttgcatacacctgcctgtgggcagcaaatggctgtacgtgggcaccgagaagggaaacatacacgttgttcacatagatacatttgcacttagtggttatattattaactggaataaagcaattgaagtggttagaactagtcatccaggtgctgtgattgcgttatgtgataatccattggatgcaaacaagttgcttattgcatttgagtgcgggctgcttgtgctgtgggatctgaaggcgaaatgcgctgagctgcgatggcaggcggccgaggccgtcaagtccctggcctggcactacgagggcaaatattttgtgtcctcgcacacggatggctccatttgctcctggcccacgaagccgcaggctaagccgcagtcgcaggtctgtccgcatgctaaaatcaacaaggatggcaatgcggagaaatgcaagccgatatataaagttgacttgaagtccagcgcaactggggaaaccttcacaattttctcgggcggcatgccctcggagaagggctccaagtccaactgcatcacggtgatggtgggcaaggccaccacggtgctggagatggagcacgccgtttgcgatttcataacactctgcgagaatccctggccctgcgagacccaggagccgtatgctattgccgtgctgttgcaatacgacttagtattaatagacttattaacacccggttttccatgttttgaatcgccttatccaatggacttacacgaatcacctgttacatgttgcacatatttaaccgattgcccatcggatttggttcctgctttctattcagttggtcgcacaacgacaagtaaaaagagctgcttctcggagcgcgaatggccgatatccggtggcgagtggtcgccggcgtcgtgcagctattcggagatcgtgatcaccggacaccaggacggcagcctcaagttctgggattccggtgccggcacactgcagatcctctataagctgaagacagccaagatgttcgagaagccgcgctcccacgtcgcccactcgcatccggaaagcgacaatccgctggcggtgcacctaatcttcctttgctcggaatcgcgacgcctgtgtgtggccggcgccatgggacaggtgatgctcttcaagttccgcaaagtggagtccacgtcggaggtactggtgctggagatacccatactctatgagaattttgatgacatttatgggacaagtcccgagtgcgattttctaacgggccatcaagtgcagaaggctgagtcgagtgattcggataagacggccgagtgttcgctaaaggtgcgcaatggggcgcaacgcaagccgccgggcttccagtcgcagctggtctgcctcaccaccggaccaaatcgccggaacgtgcaggtcacctcgctgtgcatcagctccagttatggccttgttgcatgccccgatctgtatggcgcacatgatccttactcgcgaacaccaaaaagtccaaaacgtattgaaaacaaagaggagcaaagccgatcgcccagctcagatcagctgaacgacacgaccagtccggatagtccgtctctcgaatttgtaccggaggctggcgaaacatcggcccacgatggcgtggcgacggcaactagctcacgtcccagttcaccggacccggtggtgaacagtgctcgtgaaacgctgctcagcggatcggcagcggcaacggcggctgcggcagcatcggcggctgtcatgatggccaagagtccccagcgggatgatgcagctcccaaggagctgcaggacagacgaaagtccatgtcctggaaaacgttcaatttgaagcgtcaattatcgaaagtcaatatgaagatcggcggcctgaatgtcaataccgatatggagtcgctaaagaatagctccattttctacacgcccaaggaggtgtcaccggaggctgctacgccaccggcaacagaagaggaggcaacgccggagggcaaggaggacgagtccctggatgatggcgaaatggcgaccaacgcgggagcagcagcagctgcatcaccatcgccggcagttcgtggcaaatttcgctcatccaccacggattcacctgatgagggcgccagcagtagcattgccagcggcattcgtcgtgtggactttgaacagccggctggggtcgaggtggagcgaccaaacaacctgccactggcggatgcaccagctccactgaagcccgcccgtcaaaagttcaaggaaaagtcgcgcgatcagcgacttttatccgttccgaacattaagtatcagccgcgagattcgcgtggcggtgctcggaacctcaagaatgatgtctcaccgctgatgggcggtggtggcggtggaggaggcgttgttggtgccagcagcggcattggtggaagcgtcgctggaggcaagaagatacagactgcatgccaatattaa

SEQ ID NO: 26145 - protein, 960 aa, DROSOPHILA; identical to SEQ ID NO: 3159

SEQ ID NO: 26146 - DNA, 13521 bp, DROSOPHILA
acctcggtcagggttgccaacgcattgggctaacaatccgaaatcaaagccagcgacaaccatacggactcgttggtgctttgcataaccatataaccaggatattcaggacgtgccagtgtgtttctgtgtgtgtgtgagtgtttgaattgtgtgtgtgtgtgtactcctccgtgtatgtataacacgtgccgtggaaactgcgcggaaacgctaccagtttcagtttttcgctgtagagcattcgacgcgttcgcacgcgttgattttttcctaaatcctaaaaaagaacccacaaccattaagccaaaatctataaaaaaaaattgcaaaacatctcgaaacaaaaagaaaatctgttccagatgtttacgccaagtaaatccagaggaaaagctacaatttaaaagaaaaaaatcgctgtgttggtatgtgtgtgtgtgtgctgctcctgcgctgcctcaacaaatttttcacttgtatgtgtgtatgtgtgtgtaactcgtgtcatgtgaccgcgcgcgcaaaacattttgcattgtttttgcccaagcagttgctgtagttgttgttgcaggatatccagcgtgtacgcgaaaaacgtttttgggggcgaaatagcgtaagcctgcgcaatagtcgctcacatggcagctggccatacacacacatgcacacaaacgcagggataaacaggagttagccgagatttttttgtgccattaaaacgagggaaattcaacgaagaacgccttgaagtaggctaaacaaaaagcggagcagcgattgattccgttacatttccaatcagcataaattgcaagcagtgtgagtgagagtcagagtgccagtgtgtgtgtgtgtgtacgtgtaatactcacgcatatacttacatacgttgagaatcctagaaagcagcatcgcctgctccttttcgttggcgctctcgttctcaattttgcagcagcagcagcagcagcagtagagacagtagaagcagtaaaagcagcagcagcagcagctcagtcgacaactgaccagccaagcactagcatatttcctattggccccttgcaacaaaaagccccgaaaatatattgaaaatttcacaaaaatggtagaagccaaaactgtgaaaaactaaagcgaacgtcttgaagccattaaaaaagcgcgcctattcagtgaatgtgtgtgtgtgcgtgagaattgatgtgtaaaaagaacagtgtattgaaatatcaataaactatcgatgatcctttgaaaattaagaaaaaaaatttaattttttttttgtatgttcaagtgaagaagctgcaggaggagcataagatgaagatgtagctaacatgtgagtagcaacaagcagggccaagcagtgcctatgtgtgtgaaaaatctgtaaatcgaggttatctatacacgcacactcacatgagcagtgagcagaagcgagatagaagctgccgaacatacatacatatacatacacagatttcggcagcatccagcgactccatctcgctcgcactctctccctgcccaaacccactcgcattctcctctactctaaagcaatggcattttaatcatcattaggacgagtggaagggggatagcacactgtcattatcaacagacacacatacacacacacagtcacacctcctgttgtcctgcaggcgccacccaccatattgctctttctctttccatcccccgcaacccagttgctctgcaatgtttgtttgcgggaattaaatttaaagtatgccaacgatttgcttgtccttctccacccactcttcttcgctttttcgccccactgttgcgcgcatttcgtcctggcgacccatatgtgtatgtacatatgtatgtccttgtgttcacgtgtatgtttgtcaaagcgtaaacaattgcgaataaaacaagctgcaaaaaaggaaaaacgacagcaaaaatagcaacaaaaagtagcaagagaaataatgaaacgaaaacagaacaagaattcacacacaaagagagaaatacaaaaaaaggaataccgtgtagcagttgaacaacacacgacatttgcaatgtgcgagtgtgcgaaaaaatcgatttgtgtgccatcaaaaactgcatatataggcaacccatattcccatatatatccgccaccccctcatcccccgcagcacaaacaacctgcccccgttgtgcaacataatgtggcagcaacgattttcaattaacatcaaacaatcgcttaacgtttaacatccgccattgcaatcgcaatatcccgttatacagattgattctctttcattcgcgccatccctttcgcacacccagcaggctcggtgggggggtggagggtcagggtatagggatttagagggtagggagcttggatggctcttaattaatctacgtgtgccattgtcaaaaggctgaatagaaatcaaggtttatgtaatccgccaggccaggcgatacaaaaatgaaaaacaaaagaaatcgaagggagggaagcaaacaaagcgaacgcaaaaaaaaaacggtttaattctagcaatccagactatacacagctgttatcgatatctaaattgatatttcctcatttccgttccaagaaatgcaaatcttgcgacatcaaaacttccggaaaagccatgaaaggaaaaggaagcatattttctatatgaactgctattgaaatcattttcaagcatggtttgtgatttaggtcgactttaaaatcaataaataagtgtgttaaatgtttgctcgttaacataaacattcaattttggaatataatatcttgaagattgaacaaaggtgcccgcaagtatacaacaaaataataaaaagctgcagttttgcatattttatacactttataatttatactttacttacaaagtgattttaaatcatcagagatttgtgtatgctcttaaaaaaacatggaatgaaacttgaccaaaaatgtgttgtgcgtgtaagaggacctcggggagcacttaggatacagaacagagagtagaacatattgtaattgaagctttcaacttgttttcatccgttttaattagatctcccatttcccattctctccctcattgcagcaaatatttcgaccactgttaacctagtttcacatctcaaaaataaaaccaaacaacaaggacgaactcagaccagcactggctcctctgtcttcaattacgcacagctctaccagtatctagagaataacgagtaaaggctaccaaggactcgagggaagagaatcgcctggggcagaggaagaagccaatccccatacttttcggttctcctcggaccagaatcatcacctcccccatcccgaccccggcactaccttcccgctgaaccacatacactctgtccactatccactattcgacaccaccacactctgtgcatccaactatttggccaaccattaatccttgggcgagaccagagcagccccatcgcataactgtggatagcagagcagccggagcacgaggacgactcatgttacaaaaatgaaaaagttcacattcaaaggagttctagatggatttcgacaaagcgttcagccccaagccacacgacaggagcaggagattcaggagcaactcaaggccgatcactttacgttaaagaaagtaagttaaaaacatacgataaatgggatacgagttgaaagtgcccataatcgaaaggcatctgttgcagctagcgggtgttttatttggtagctgtaatgatttgaatctatcataagacacacgcggctataaccgttgtctaagagcttcaaaatcgataataacaaacaataaaagtagtaatttataatactaaatcatacgagttagcgtgattagtacgtttgatccaatttcttctctttatcgcagacctttcgccatggctttccatactcgcccacatccttcgccttcgatccagtacaaaagctactagcgattggcgacaaatcgggctacattcgcatgtaagtgtgacttgaatacaacgtttttctcattatttattaatctcatctttctatatatgaactaattgcagtttgggacgacctggcgtcgatgcccatgccaaacacgagggcgaatccgagtgcgccgtgctctttgcccagttcctggtcaacgagggcgcattggtcaccgtcaccgccgatgacaccattcacttgtggagcattcgccaaaagacaccgcgcattgtgcagagtctgaagtttcagagggagcggtaagttcaagtccattatgtttggtcttattatggatatcacgatatcgtaatactgccgtccataaaacgggttatcaatttggctaattctcaacatattccaacatatgtatatcccccgatgacataatctccatctctcttgcagcgtgacttgcatacacctgcctgtgggcagcaaatggctgtacgtgggcaccgagaagggaaacatacacgttgttcacatagatacatttgcacttagtggttatattattaactggaataaagcaattgaagtgtaagtccaattactcccttagtgacctaaaccgaccgcattaagttctaatcacgggcttaaaccaatttgcagggttagaactagtcatccaggtgctgtgattgcgttatgtgataatccattggatgcaaacaaggtgaatactttgtttcaatgaggaaaatgcctcaagaagatttcactccccttaaacttaatgcatatattatattattatattcgatgactgatgagattctttccgcacagttgcttattgcatttgagtgcgggctgcttgtgctgtgggatctgaaggcgaaatgcgctgagctgcgatggcaggcggccgaggccgtcaagtccctggcctggcactacgagggcaaatattttgtgtcctcgcacacggatggctccatttgctcctggcccacgaagccgcaggctaagccgcagtcgcaggtctgtccgcatggtaagttgcacagtcattatccatatataaatatatttgattcgatttatgtatgctttagctaaaatcaacaaggatggcaatgcggagaaatgcaagccgatatataaagttgacttgaagtccagcgcaactgggtgagtaataagcactgtcgaatcatttgtttactactatgctttatttatattacacggagatagctgaacaacctagggcgttatctttatttttggaacaataaccataaagcaattttacaataatatttcaacaataagaatcattgcgctgccggcgtgtcgataaaacaaatgaataatgataacttgactcattaaaaatttataatcttttaatttgcccgccgcagggaaaccttcacaattttctcgggcggcatgccctcggagaagggctccaagtccaactgcatcacggtgatggtgggcaaggccaccacggtgctggagatggagcacgccgtttgcgatttcataacactctgcgagaatccctggccctgcggtatgttttaaataagataagaacattaagatcgacagagcatatgtataagtcaactgtgattgtattctgcagacttgttggtatttgtgtgatgttatatattatatataagatatattgtataatatgaaataatttacttacttggtttttgtctgcctttacagagacccaggagccgtatgctattgccgtgctgttgcaatacgacttagtattaatagacttattaacacccggttttccatgttttgaatcgccttatccaatggacttacacgaatcacctgttacatgttgcacatatttaaccgattgcccatcggatttggttcctgctttctattcagtgagttttacacgcacccaattttcgttaatatccttcaattgattcaataattcgtgtgctttaggttggtcgcacaacgacaagtaaaaagagctgcttctcggagcgcgaatggccgatatccggtggcgagtggtcgccggcgtcgtgcagctattcggagatcgtgatcaccggacaccaggacggcagcctcaagttctgggattccggtgccggcacactgcagatcctctataagctgaagacagccaagatgttcgagaagccgcgctcccacgtcgcccactcgcatccggaaagcgacaatccgctggcggtgcacctaatcttcctttgctcggaatcgcgacgcctgtgtgtggccggcgccatgggacaggtgatgctcttcaagttccgcaaagtggagtccacgtcggaggtactggtgctggagatacccatactctatgagaattttgatgacatttatgggacaagtcccgagtgcgattttctaacgggccatcaagtgcagaaggctgagtcgagtgattcggataaggtaatgataacttgtgcatgttgttccttcgcaagttccccgctgatttctcgatatcctacatcatatctattacagacggccgagtgttcgctaaaggtgcgcaatggggcgcaacgcaagccgccgggcttccagtcgcagctggtctgcctcaccaccggaccaaatcgccggaacgtgcaggtcacctcgctgtgcatcagctccagttatggcctgtaagtagcatagctgctgccacccatccaaccatccagctagccagccagccagccagccagccaaccgttcatcccattaatcccatcatccccgagacactcgcttcaatccatccgatcatccatcctgcaatccatctgcccatcgatccagccacacacgtacacacaccaccaccaaaaagccccaagcagctcccagccgccaacaataaccagcccagagcaaagccacccaactacccaccagacaaaggacacaggaaagcggacttaaaagatactagctccctgaaccctgcccaaaaaaaaaaaaaatttacttagaccgtagtctagtttgtattcgtaaatgcatgacgttctctgagaaaagcgcctgagacgtagccgcgaacgctcgacgagtgttctagcctgcccaaaaaacctgataacccctgccacgccccccccccccccaatttccacctgcctacgcctctgccccgcccccaaggtgcaccgcttttgttgaatttgtttgcgttgtgtattccgtagtatgcaacagttgcaagcagaccgaaaaaaaaaccaaatcaacgtcccttggtaattacaagcacctaaagcagaatttctggacagaattgtgacccattgacctcttgtcttttcggatctagaaaccgattgcccaaatccaacgccagactggcataaaagcgacgtactcatgactgaaaccgaaacccggacggattcgtattttagtgcctggtgtgtgcgcgtgtgtgagagtgatgatgcgcatcaaaataattcatttgtctttcagttttcgttttcaagggtttcgtatttgcgtttcggtatttaatattgttttttgtttttcattttttaatgtgataatttgctttcgagtttcgtttacgtactagtgctaattagtattttggtatttttttgaaatttttttactttagctaagcactgtagtttgctttcgtatttatttttcttaagcacttttcttatgctaattttttagtactttctaaatatcttaaatattacaataccataatttaatagagtaaaaaaaaatagtaaaacttaattgcataatatgtagtactttctgatgagaagtttaaactattgaaatttttggtacttcagacagctaatatatatatttttatttatttttacttatgtattatgattttttgtatttgtattaccttggtatacgttgcattatctaaattaagttattatcctgatgacgaatagtttcctcgcatttgttttgtgacgttgatttgtatgcagttgattttggaaatatatatgaatattttctgtttttagaatggcttatggtaccgaatatggacttgtcataattgatataatccaaaaaatttgcctattgagtgttgcatgccccgatctgtatggcgcacatgatccttactcgcgaacaccaaaaagtccaaaacgtattgaaaacaaagaggagcaaagccgatcgcccagctcagatcaggtaagtgccctcgctctctctctctctctttctctctctctctctctctgtctgtcagtctctctgtctctctctggcaccgagactaattttataaccgaatcgcagtgaaccgcgcgtacaaacatacactcgaatccataacgaaagtacacagacagaccatataattcaaatgcgccattgatttgaattgaaacacagccacactaacaacacagacaccgcagatcatttgaattcgcaattgatttgaactgaaacacagcaacactgagaacacagacagaccgaaatgtatgctatactattcacgccgaccaacaagtgctcatttgaaacatgttacatactcaatatttttctaaacatcttacatatacatatttgaattttatatgcataccgatatttacttattacataacgaacgaaattttaattacgtatcacatactaacaaatataccaaattgatatatacattatataatctatatatatatatatttaaacatactcgtatgtatgagctaacttttaaaaattgtagccaatgaaacttttgttttggtttgtgttttttgttttcgttttccctttagttaacctatcgctctccctgtctcgctgtcaccttattgcatttttgtggcattttttttataccaatctgatggaatacctcataagtacttagaccccagtccatttatatctatatattacactcacccacatgcaagcaagcaagcaaatataaccaaaatgtttagctgaatatctaaaaggatatgaaactgtagctttagtttagcttggtagttgctatcaagtattttttcgatgtactatagctagcccttttttacagcgaataactaaccatccctctctaactgaagatcacactgatatagttttctctttattgaacacccaactaacgatatcgatccccgaattggctaatggctatttaatacttcggttaccttaaatttggtattttatggtcaagtacaataaaatgtggccatccttttctctttcctatctctatctctgtctccgctttcaagcttatatatatctatctctgtctctaagctaaagtactaaatgcagcatggtaaaaatcatattaacgtattggtttcagttttgtttggttttttttttttgtgttttgcacgaagcttgcctacgatatgatggaaattttatttgatttggatggattggattggtgtcttttctgttttgattgccacgctaaagaccatcgcatagacacgattgatcgctttgattgttgtacatgtacatgtgtggtatgatgcgatatgattcgatgccgatacgatcctatttcattcgattatctttgattcgattcaggtcgatttcgagtcggttcgatttgagttgatttgatctgagttttgcctgaaaaataagtgcctagcgaacacccaagaaacaattacaatcgaaacaacatgaacaacagcgacaacataaatatgtttctccccccctctctctctctctctctgcctctatgtctgtctctctttctctgtgtttgtgtatcaacttattgattgaataattgatgaaaaaagtgtatgtgtgtgatcgttttactttgtcacctctccttcagaacaccttatgtaacataaccaacaatcaaaccacccaccaccaccaatgcagctaacaaattattcaattatttgatatacatatttataacctaattcgaattgataattgatcgtagttcattttattacattttaaattctaaatctaagcatatctgaaacaaattaaatcgttgtattgcctgtgcgtgtgtgtgtttgtgtttgagttttgccaatgcgtatgtgaatgtgtgtgtggtgtacacactcactcctagcatcaaactgttatacgcctaaagtatatcagctaactaagtcgttgcctaaagttaaacccctatccgatgtttgttaatccacaagaaaaccaaacgaatccataacaagtttaaattgtaaattgttgatacaatattcccccagtcccccccccccccttagcaacccaataaccccgtttaagctctgtttatccttgtaaaaaaaaaaaaaaaaaagtacacccccaacatactccaaagaaaaactggagcaaacccaaaaaggcaaataagcagcaacaagaatgcgcagcttccaacccccaaaaatggcataaatatgtatttatatgggtgaaaactgcgaaatgccattgcaaaagcatgccaaaaatttataatccatcctctttcattcactaatttttcacttttccgcttttcgtgacctacttcaatttgctgtatttatacaccctcaatggaaaacttgtgcattacaaattatttgagatttatttctatgaaattcagtaaatatttatcaatatttagagttggcgcccgaagagaaattggcaggaactattccgtttgagagtccaagattttttttttagaaacacatggttgcattgaaaggcagccaatgtaaatactaacaatgtcataaagcatcatgtataaactatattctaataatattatgggaattagaaagattcaattttattcaaatagccccttgtcattaagaatcataatattgtaccatattttcttacgtattttcacctcacttttcgcctttacttgttgctgctatatttttgcatctttgggcttgctgatcaaagagaagagaacaaattaaacagaaaccaaaacaaaaacctacaaaaaacaaaaaaacaaaaataacccagtaacccaaaaaacaaaaacaaaaattaattagtgaatgttaaccccttaatctccatgaagtcctctaaaatcccatgtccgtcgataccgaccactactacttttcttattgttgcctaaacgaacagaaagaaaaacgaaaattaaaactctgcaccctacccctcaaaaatcccgatcttcatctagctgaacgacacgaccagtccggatagtccgtctctcgaatttgtaccggaggctggcgaaacatcggcccacgatggcgtggcgacggcaactagctcacgtcccagttcaccggacccggtggtgaacagtgctcgtgaaacgctgctcagcggatcggcagcggcaacggcggctgcggcagcatcggcggctgtcatgatggccaagagtccccagcgggatgatgcagctcccaaggagctgcaggacagacgaaagtccatgtcctggaaaacgttcaatttgaagcgtcaattatcgaaagtcaatatgaagatcggcggcctgaatgtcaataccgatatggagtcgctaaagaatagctccattttctacacgcccaaggaggtgtcaccggaggctgctacgccaccggcaacagaagaggaggcaacgccggagggcaaggaggacgagtccctggatgatggcgaaatggcgaccaacgcgggagcagcagcagctgcatcaccatcgccggcagttcgtggcaaatttcgctcatccaccacggattcacctgatgagggcgccagcagtagcattgccagcggcattcgtcgtgtggactttgaacagccggctggggtcgaggtggagcgaccaaacaacctgccactggcggatgcaccagctccactgaagcccgcccgtcaaaagttcaaggaaaagtcgcgcgatcagcgacttttatccgttccgaacattaagtatcagccgcgagattcgcgtggcggtgctcggaacctcaagaatgatgtctcaccgctgatgggcggtggtggcggtggaggaggcgttgttggtgccagcagcggcattggtggaagcgtcgctggaggcaagaagatacgtaagtatggccccagcgaaaggatcatcctccatcttatccaaaataacaaatcaaaagaacgctttaagccgaaagtttaacccccttaactataaaaaaaaaaaagaaattttatgtgcagagcgagcgagcgagttctttcctgagtggtcgcaaggcaggcagacagattgtaaatcacgaatccccgaatcggatacgaaatttcgtcctcgttattgagattttactgcgtttatgtgagggtgttctgtggattctgtgtattaatgttatagaacttatctgtgttcgaagtttttagttaaggtgaccgaaaatattcttttccagagactgcatgccaatattaagaagactttgaaacgtatagttaatcgatccaacaagatcaaactaaataataccattgagaaacgcataaacgcagtacatccgctctcgacgtcgcaagtgatccttctcttcgtttctctaaaccctttctcccacccagtctcccctctctctcaccgtttctctcctcctcgaacatcggcgttctgtcgtcgtttctgtttgggtttttcacttttctcgtttcagttttgtgttgtgcctttgctttgcgttgcttttagttgctgcaagctgtagaaaatagcataaacaaatgagatactactgtatacttagcacccctgctcctttgtccaagcgcctgtttccaaaaaaccctgaccctatcaatagcgcagctagagatgtgcatattccaataccggatatagagatgagaaccgaacgataatcaaaattccgatgatgctttattttgttgatttttgaaacggaaacaaaaaccaaaattgcattttgtgtatagagcatactttgtagagagttagctaatttaaacaacaaccaaaatcaagtaaaacgtgacaataaaaaataatgatgtaaaaaacaatacaaaataatacacttgagaaacaatgtgatgcgacaacaacagcaactaacaaacaaaatcacatacgcacccaacctaaacaattacaacaactatgtagaaaacaaaaactttacaaaaagtacaaatttttgccaaaaatttcttatctatgcttcttcttctcctcaatacctaggcaacggatgcagaagagctgcaatacaactgcctgtatgtgattgtgtggaagttctttggtaaatcatttaacaaccaccaccaccatcatcactaccactactcaccagtcacttaaaacaaaacacacaagaacaacaaccactaacaagcaccatcacacccacatacaacatgtaactataaagctctgaaattacttactacttagtatgcaa

SEQ ID NO: 26147 - DNA, 3587 bp, DROSOPHILA
taaaagcagcagcagcagcagctcagtcgacaactgaccagccaagcactagcatatttcctattggccccttgcaacaaaaagccccgaaaatatattgaaaatttcacaaaaatggtagaagccaaaactgtgaaaaactaaagcgaacgtcttgaagccattaaaaaagcgcgcctattcagtgaatgtgtgtgtgtgcgtgagaattgatgtgtaaaaagaacagttgaagaagctgcaggaggagcataagatgaagatgtagctaacatcaaatatttcgaccactgttaacctagtttcacatctcaaaaataaaaccaaacaacaaggacgaactcagaccagcactggctcctctgtcttcaattacgcacagctctaccagtatctagagaataacgagtaaaggctaccaaggactcgagggaagagaatcgcctggggcagaggaagaagccaatccccatacttttcggttctcctcggaccagaatcatcacctcccccatcccgaccccggcactaccttcccgctgaaccacatacactctgtccactatccactattcgacaccaccacactctgtgcatccaactatttggccaaccattaatccttgggcgagaccagagcagccccatcgcataactgtggatagcagagcagccggagcacgaggacgactcatgttacaaaaatgaaaaagttcacattcaaaggagttctagatggatttcgacaaagcgttcagccccaagccacacgacaggagcaggagattcaggagcaactcaaggccgatcactttacgttaaagaaaacctttcgccatggctttccatactcgcccacatccttcgccttcgatccagtacaaaagctactagcgattggcgacaaatcgggctacattcgcattttgggacgacctggcgtcgatgcccatgccaaacacgagggcgaatccgagtgcgccgtgctctttgcccagttcctggtcaacgagggcgcattggtcaccgtcaccgccgatgacaccattcacttgtggagcattcgccaaaagacaccgcgcattgtgcagagtctgaagtttcagagggagcgcgtgacttgcatacacctgcctgtgggcagcaaatggctgtacgtgggcaccgagaagggaaacatacacgttgttcacatagatacatttgcacttagtggttatattattaactggaataaagcaattgaagtggttagaactagtcatccaggtgctgtgattgcgttatgtgataatccattggatgcaaacaagttgcttattgcatttgagtgcgggctgcttgtgctgtgggatctgaaggcgaaatgcgctgagctgcgatggcaggcggccgaggccgtcaagtccctggcctggcactacgagggcaaatattttgtgtcctcgcacacggatggctccatttgctcctggcccacgaagccgcaggctaagccgcagtcgcaggtctgtccgcatgctaaaatcaacaaggatggcaatgcggagaaatgcaagccgatatataaagttgacttgaagtccagcgcaactggggaaaccttcacaattttctcgggcggcatgccctcggagaagggctccaagtccaactgcatcacggtgatggtgggcaaggccaccacggtgctggagatggagcacgccgtttgcgatttcataacactctgcgagaatccctggccctgcgagacccaggagccgtatgctattgccgtgctgttgcaatacgacttagtattaatagacttattaacacccggttttccatgttttgaatcgccttatccaatggacttacacgaatcacctgttacatgttgcacatatttaaccgattgcccatcggatttggttcctgctttctattcagttggtcgcacaacgacaagtaaaaagagctgcttctcggagcgcgaatggccgatatccggtggcgagtggtcgccggcgtcgtgcagctattcggagatcgtgatcaccggacaccaggacggcagcctcaagttctgggattccggtgccggcacactgcagatcctctataagctgaagacagccaagatgttcgagaagccgcgctcccacgtcgcccactcgcatccggaaagcgacaatccgctggcggtgcacctaatcttcctttgctcggaatcgcgacgcctgtgtgtggccggcgccatgggacaggtgatgctcttcaagttccgcaaagtggagtccacgtcggaggtactggtgctggagatacccatactctatgagaattttgatgacatttatgggacaagtcccgagtgcgattttctaacgggccatcaagtgcagaaggctgagtcgagtgattcggataagacggccgagtgttcgctaaaggtgcgcaatggggcgcaacgcaagccgccgggcttccagtcgcagctggtctgcctcaccaccggaccaaatcgccggaacgtgcaggtcacctcgctgtgcatcagctccagttatggccttgttgcatgccccgatctgtatggcgcacatgatccttactcgcgaacaccaaaaagtccaaaacgtattgaaaacaaagaggagcaaagccgatcgcccagctcagatcagctgaacgacacgaccagtccggatagtccgtctctcgaatttgtaccggaggctggcgaaacatcggcccacgatggcgtggcgacggcaactagctcacgtcccagttcaccggacccggtggtgaacagtgctcgtgaaacgctgctcagcggatcggcagcggcaacggcggctgcggcagcatcggcggctgtcatgatggccaagagtccccagcgggatgatgcagctcccaaggagctgcaggacagacgaaagtccatgtcctggaaaacgttcaatttgaagcgtcaattatcgaaagtcaatatgaagatcggcggcctgaatgtcaataccgatatggagtcgctaaagaatagctccattttctacacgcccaaggaggtgtcaccggaggctgctacgccaccggcaacagaagaggaggcaacgccggagggcaaggaggacgagtccctggatgatggcgaaatggcgaccaacgcgggagcagcagcagctgcatcaccatcgccggcagttcgtggcaaatttcgctcatccaccacggattcacctgatgagggcgccagcagtagcattgccagcggcattcgtcgtgtggactttgaacagccggctggggtcgaggtggagcgaccaaacaacctgccactggcggatgcaccagctccactgaagcccgcccgtcaaaagttcaaggaaaagtcgcgcgatcagcgacttttatccgttccgaacattaagtatcagccgcgagattcgcgtggcggtgctcggaacctcaagaatgatgtctcaccgctgatgggcggtggtggcggtggaggaggcgttgttggtgccagcagcggcattggtggaagcgtcgctggaggcaagaagatacagactgcatgccaatattaa

SEQ ID NO: 26148 - protein, 960 aa, DROSOPHILA; identical to SEQ ID NO: 3159

SEQ ID NO: 26149 - DNA, 2823 bp, DROSOPHILA
cggtgcccagggacagcaccaaatgccaatgggtgtcaactggaatgcgccgatgggcatgcaccagaacccgggacagcccgtgggtgattcgcaattgcagcatccaatggctcacaacaagggtaagtaattgaaatgattacattttttggtaccgagaaaactgtttaatcaaattatttggattcgcaacagtttacaacaacagtgattggacttcaatggatccggctatactttcgtttagacagtattcttcttttccacaaaaccaaattcccccacatcctcagcagcaacaggatttatttttgcagcatttggctcaacagcaaaattcccagagtggtggtaagtggggcaaccaagagtttacatatcaacagtcgattaaaatgcatcggattgtgtacttgcaggtttcaacaaccaggcacagcaaatgcttcctatggggatgcccaatagtttgctgaacggacaacaaacgcagccgccacaggtcaatgccaatgttcagggcatgcttgagtttttaaaaagccgtcaattcgtttagctacaatacatataaataatacatttgtttacctgtactctttattaaatatttcttaaagtaaatataggcaaaataaaattcgaatataatgaaactacatgatacaaacaaacagacggtccagtgaaattcagcctactaaaagcatttgtgcagcaagcgaaacacttggatgccgtctccccgcgccggacgtgtccgcatgaatccaattatagtatccaataaaccccgttcagggtgtagtctgcttggcaatagtgaagcccccagtgatttttcaaacttgaaaccaactcattccaattgctcgctggataaaagacagattaccatggcaataagtagcaaagaaaacctcgtgatgtgaaattatcgagactgtgtaaaaatgtcaactttttaataataaatacgtgacttgaaatggttgaaaagaatttattactacgatccgaagaactatttcctatttttggcggcgtggggcagacggttcccttggccagcagcgccacccaggcgcatcgcgttgttagcagcacctccgtatccctggccgggacgattgccgacattgttgcggttgccgccaccaggacgtccgccgcgctgattttgcgacgagttgccgccgcggtttttgttcatctctgtgcgattccttgacttggcctgcgcgtcctccttgaccatgtcgattacttcgtcggggattcgcagatatttgatggtgctcccgcggatataacattcgggcatgcgccaaaaccgatcgccatcctgcaaagtacacatacacatattggtataaacaagctcttcatgttatcatttttccggctgtttacaaatcaatgcgattgtatttatgtatataccagttgtcgcatattttgcacaccggcaatctacatattaattacatatacatacatatttaattaaaatattacctttgaggtgcaaataacatcgcgcagattaatattcatccacgagtcgcaactaaccaggtgaccattgtatgtttcaccatttttcagctccaccaactaagtgaattagattaaacaattatgtgtatgactaatgtgtgcaaatccaaacatcttaccatgggatggctctgtgctgtttttaaaagtgaaagtggcagctaaaacacatgaaaattaatcatttttctctttatttaccataaaataatattgcttaccattttcgtgaagtaatcgattaatacagcgataacatgaaatcggaagagatgtcaatcactttgttggaacgaaatgaatatgaaacacatgcttataaagatagcgtgttctgtttttttttgatttcttataacataattttaaatggtaaccaagagagaatgctatagtagacttccccgactgtcagatacccgttactcagctagtgtaaatttcatcctttttctgggataataatagggagaaaagattttaaaattgttttgaaagtgtgggcgtgaccgccttggcggctttaaggcgctagattgagtatggcaaaaaggacagtcggcgggacagtcggattaaatacttcaccaaatggataaaaaaaacatgtaacttattttaaagccaaccggctttgcaatgactgcaattcatttagtaagagagcaatattatagcgcacttgttgaaacatggacagtggcaattctaaagttcgatattccttattttggagcttgaagtggaggactattgtaggtttatcaatttgcacggtactagaaaataaattagtaaagtgaagtaaaaataaaatagcggtaaggttaaatacttactttaatgataaggaaatgttgattctccattgcaactttgacattttgacacggtccattttagtatctgaaaagttcttgctcagtacgtctcgatggttaagcaaaactttgcagatatcttcaacatattcttctgttaaactattgacgagataaataacaattatgttagtgacggtcaagttttccaagtacgtatgcatttgaatacttactttaaatcgtccattaaacattttcgcagctcatgatgcttcaccacgcccttgggatatcttaaaaagatttgcattgtcaagaaaaccattgtaaaaagttcacaaaagttcggagggatttcgtgacctccatttgttagtttatttagtgccagggaaagcacttccgacgaagacttctttgattcaatgtagtgcac

SEQ ID NO: 26150 - DNA, 528 bp, DROSOPHILA
catgttatcgctgtattaatcgattacttcacgaaaatgctgccactttcacttttaaaaacagcacagagccatcccatgttggtggagctgaaaaatggtgaaacatacaatggtcacctggttagttgcgactcgtggatgaatattaatctgcgcgatgttatttgcacctcaaaggatggcgatcggttttggcgcatgcccgaatgttatatccgcgggagcaccatcaaatatctgcgaatccccgacgaagtaatcgacatggtcaaggaggacgcgcaggccaagtcaaggaatcgcacagagatgaacaaaaaccgcggcggcaactcgtcgcaaaatcagcgcggcggacgtcctggtggcggcaaccgcaacaatgtcggcaatcgtcccggccagggatacggaggtgctgctaacaacgcgatgcgcctgggtggcgctgctggccaagggaaccgtctgccccacgccgccaaaaataggaaatagttcttcggatcgtagtaataaattctt

SEQ ID NO: 26151 - protein, 154 aa, DROSOPHILA
MLPLSLLKTAQSHPMLVELKNGETYNGHLVSCDSWMNINLRDVICTSKDGDRFWRMPECYIRGSTIKYLRIPDEVIDMVKEDAQAKSRNRTEMNKNRGGNSSQNQRGGRPGGGNRNNVGNRPGQGYGGAANNAMRLGGAAGQGNRLPHAAKNRK

SEQ ID NO: 26152 - DNA, 2632 bp, DROSOPHILA
atggatctggctttatacacgagaatgagttccgtcagataatgactgaatatggcgatgaaatggaagaggacgagatcgaggaaatgatacgtgatgccgacgccaacacggaactgaaaatcgactacgttcgctttgtgaccatgatgatggagacgtaacactctctttgaaaaataaaaaacataaccgattgtagatctaatcaataaatttcaaaagcatggccaatggaatcgaagatcttgaaatatcggataccaccagtttggactattctttaaaaaaaaaaaaaagccaatatacaatagataaaatgataacaagagtaggcttttcttgttattaaattataaatatgaagttgtgaactaaagtttgtcgaaaatttgtagtgagtgttcagtgaccccaaaattttcccacccccaaccccttcctttggccatggatttcgaattccttactccgccgccagaggaacggaccattcgcacccacaatctgaccgaagaacaggtcaaggatttggagattgccttttccctgtttgacgaccaagacactaaggttattcctataacaaatctcaggcaactaatgctgtctgtggcccactatcccagtgatatggaattgcaggaaattcaggccgagatcgatgctgatggatccggtgagttatatctcagcgatttccttcacatcatgtctcagaggtacgcaaacatgtctaccgaggatgaaattatagctgcattcagagtctttgacaaagaaggaaccggcttaatatctgaatcggaatttcgtcacataatgcagaacatgggggagcaattgacggatgatgaggtggaggagatcatccgtgatgcaaattctgatttggaaggcaatatagactatgtgcgatttgtcagaatgatgtccactacataaggaaaaagcaggctttaggggttgggaacccgacctgtcagtatcagtatcatcaaaacagtttcggctcattccctttcgtaaattccaacagtctatagctctgcaagcatttaaaaatatctcgataaataccgaaaatctttgaaaatttatcaagatgtccgaactaacggaggagcagattgccgagttcaaggatgcctttgtccagttcgacaaggagggaaccggcaagatcgccacccgtgagctgggcacattgatgcgcaccttgggccagaatccaacggaggccgagttgcaagatttgatagctgaggccgagaacaacaacaatggccaactgaacttcactgagttctgcggtataatggccaagcaaatgcgggaaactgacactgaggaggaaatgcgtgaggcattcaagatttttgatcgtgatggcgatggctttatatcaccagctgagcttcgctttgtgatgatcaatctgggcgaaaaggtcaccgacgaggagatcgatgagatgattcgcgaggctgattttgatggggatggcatgatcaactacgaggaattcgtatggatgataagccagaagtagtacagctactttaaatgaaataaaaatatttggggtcactgcataaaaaaaatcgtgtatttctcttcaaaaaatacaatttacacttctctgcggtctaactattttcgaacactttttaatacgcccccaattatttcaattatatttttgcggtgtgctagtttttcctttgcctaattcggagaccgagaatttttcaagcatgtcctgctcttaaaaatgtttgatgaaggcaccccatttcggtaattgtggttggtttaaggaattttcgcctcgccttcttcaggtgaaaactttcagcatgaaacactcgacgtggttttagtccgccttttcgtttccctggcaagtggtttttgcttccacatgcggcacctttgtggccagacgaacaattttcctgttgcttaaattcaatttgcttatgcattaaaattaaattttactgtggcctcagcgggcccggctcgtactccttgctggaagcaacctcttggggtctttggggcttgtgtctgactttataaatatttcgtgtgtgttgtgtacgcgcatgtatgaattttcaattttttgaacaagtttcggtttcagttcagacatgtcaaaatgtcaacttgcttaattgagagtccgcaaaacatcgagcatcgcatcgcattgcatcgcattgcatcgaatcgaatcgaatcgagaccttaacttcaatgtgcattcgcatggaataagaacaaaagcccaagcagattccaatttcagatctgacatcaataagcacttacagtggcataaatattatatatactcgagagctggcaaatatatatgtctatatgcggttcaaacaccagaacgacatcggcacttcgccacctcgccgcatagacgagttggttttcagcttcagttttcagttagcagcaggcacaggacatgttcgatggactggctgcagaggaaattgaatttgtgggcaggacctccctccctagacggttcatccgatggtgtcggcgacggggcagtgggctctgcaatatcgaagaaggatatttgagtggcaagtaaatcaga

SEQ ID NO: 26153 - DNA, 632 bp, DROSOPHILA
aaacagtttcggctcattccctttcgtaaattccaacagtctatagctctgcaagcatttaaaaatatctcgataaataccgaaaatctttgaaaatttatcaagatgtccgaactaacggaggagcagattgccgagttcaaggatgcctttgtccagttcgacaaggagggaaccggcaagatcgccacccgtgagctgggcacattgatgcgcaccttgggccagaatccaacggaggccgagttgcaagatttgatagctgaggccgagaacaacaacaatggccaactgaacttcactgagttctgcggtataatggccaagcaaatgcgggaaactgacactgaggaggaaatgcgtgaggcattcaagatttttgatcgtgatggcgatggctttatatcaccagctgagcttcgctttgtgatgatcaatctgggcgaaaaggtcaccgacgaggagatcgatgagatgattcgcgaggctgattttgatggggatggcatgatcaactacgaggaattcgtatggatgataagccagaagtagtacagctactttaaatgaaataaaaatatttggggtcactgcataaaaaaaatcgtgtatttctcttcaaaaaatacaat

SEQ ID NO: 26154 - protein, 148 aa, DROSOPHILA
MSELTEEQIAEFKDAFVQFDKEGTGKIATRELGTLMRTLGQNPTEAELQDLIAEAENNNNGQLNFTEFCGIMAKQMRETDTEEEMREAFKIFDRDGDGFISPAELRFVMINLGEKVTDEEIDEMIREADFDGDGMINYEEFVWMISQK

SEQ ID NO: 26155 - DNA, 2514 bp, DROSOPHILA
tttccatttcacaaatttatcttactgaaaatgagtttaagaaccatgtcagaaaagagcgtggggcaactaacaaaaaaaaaattttaaaaaactaactagtaatcttttgttgtcaatgccttgaattttccacaatttcagtctaaatggaaaactgtcaatgaaaagacaatatttaaacacaactattttcgaaaaactaaattttaaaattcatcttttcgggaaatccaaattttagcccaaggtatacttacaatttgccatggatgactttgatttcagtagtccacctccggaggtacgaacagttcatacccacacgctgaatgatgaacagctcaaggattgtgaggcggccttcgccctcttcgacgacgataatgccaaggtcattccgatcaagttattgagagattgcctgcgagccgtggcccacaacccgccggaaaacgagatacaggattatataaccgaaattgatacggatggatccggcgagctttatctcagtgatttcctatacatcatgtcgaaacggtacgagaatttgaccgtcgaagatgaagttatcctcgctttcaaagtcttcgacaaagatggatctggctttatacacgagaatgagttccgtcagataatgactgaatatggcgatgaaatggaagaggacgagatcgaggaaatgatacgtgatgccgacgccaacacggaactgaaaatcgactacgttcgctttgtgaccatgatgatggagacgtaacactctctttgaaaaataaaaaacataaccgattgtagatctaatcaataaatttcaaaagcatggccaatggaatcgaagatcttgaaatatcggataccaccagtttggactattctttaaaaaaaaaaaaaagccaatatacaatagataaaatgataacaagagtaggcttttcttgttattaaattataaatatgaagttgtgaactaaagtttgtcgaaaatttgtagtgagtgttcagtgaccccaaaattttcccacccccaaccccttcctttggccatggatttcgaattccttactccgccgccagaggaacggaccattcgcacccacaatctgaccgaagaacaggtcaaggatttggagattgccttttccctgtttgacgaccaagacactaaggttattcctataacaaatctcaggcaactaatgctgtctgtggcccactatcccagtgatatggaattgcaggaaattcaggccgagatcgatgctgatggatccggtgagttatatctcagcgatttccttcacatcatgtctcagaggtacgcaaacatgtctaccgaggatgaaattatagctgcattcagagtctttgacaaagaaggaaccggcttaatatctgaatcggaatttcgtcacataatgcagaacatgggggagcaattgacggatgatgaggtggaggagatcatccgtgatgcaaattctgatttggaaggcaatatagactatgtgcgatttgtcagaatgatgtccactacataaggaaaaagcaggctttaggggttgggaacccgacctgtcagtatcagtatcatcaaaacagtttcggctcattccctttcgtaaattccaacagtctatagctctgcaagcatttaaaaatatctcgataaataccgaaaatctttgaaaatttatcaagatgtccgaactaacggaggagcagattgccgagttcaaggatgcctttgtccagttcgacaaggagggaaccggcaagatcgccacccgtgagctgggcacattgatgcgcaccttgggccagaatccaacggaggccgagttgcaagatttgatagctgaggccgagaacaacaacaatggccaactgaacttcactgagttctgcggtataatggccaagcaaatgcgggaaactgacactgaggaggaaatgcgtgaggcattcaagatttttgatcgtgatggcgatggctttatatcaccagctgagcttcgctttgtgatgatcaatctgggcgaaaaggtcaccgacgaggagatcgatgagatgattcgcgaggctgattttgatggggatggcatgatcaactacgaggaattcgtatggatgataagccagaagtagtacagctactttaaatgaaataaaaatatttggggtcactgcataaaaaaaatcgtgtatttctcttcaaaaaatacaatttacacttctctgcggtctaactattttcgaacactttttaatacgcccccaattatttcaattatatttttgcggtgtgctagtttttcctttgcctaattcggagaccgagaatttttcaagcatgtcctgctcttaaaaatgtttgatgaaggcaccccatttcggtaattgtggttggtttaaggaattttcgcctcgccttcttcaggtgaaaactttcagcatgaaacactcgacgtggttttagtccgccttttcgtttccctggcaagtggt

SEQ ID NO: 26156 - DNA, 514 bp, DROSOPHILA
tgagtgttcagtgaccccaaaattttcccacccccaaccccttcctttggccatggatttcgaattccttactccgccgccagaggaacggaccattcgcacccacaatctgaccgaagaacaggtcaaggatttggagattgccttttccctgtttgacgaccaagacactaaggttattcctataacaaatctcaggcaactaatgctgtctgtggcccactatcccagtgatatggaattgcaggaaattcaggccgagatcgatgctgatggatccggtgagttatatctcagcgatttccttcacatcatgtctcagaggtacgcaaacatgtctaccgaggatgaaattatagctgcattcagagtctttgacaaagaaggaaccggcttaatatctgaatcggaatttcgtcacataatgcagaacatgggggagcaattgacggatgatgaggtggaggagatcatccgtgatgcaaattctgatttggaaggcaatatagactat

SEQ ID NO: 26157 - protein, 154 aa, DROSOPHILA
MDFEFLTPPPEERTIRTHNLTEEQVKDLEIAFSLFDDQDTKVIPITNLRQLMLSVAHYPSDMELQEIQAEIDADGSGELYLSDFLHIMSQRYANMSTEDEIIAAFRVFDKEGTGLISESEFRHIMQNMGEQLTDDEVEEIIRDANSDLEGNIDY

SEQ ID NO: 26158 - DNA, 5668 bp, DROSOPHILA
accggcgtcagccttaagcacgtggccaccttcgaggcactgatcgacaagtacgccaacaacaacactgggagtactacggattccaactccactggctttaacgtcatcctgccaacattggcagacctgctgtgctaccagacgcctgctttcatatttggcttcctcaaccgcctacgccgctcggacaatgtgcgtcgggttttcctttgggcctccccgcagcacctgcaggatccgcatgccgactacatcctggctggctgcgagtacctggccgagctggtcctccgactggaatcggacaaactactctcgctgatatcacgcaagccgggcggaggggtgtccaacaggcgctactcctgcgaagtcagcaaaacccagttcaaggtgacgccgctggacggaggactgcctgcaggtgcctcccccaagcagccctcgcccgaggcggagcagaccacagagccggccagcagcaccttcaaaatcgagcttgacgaggatgaagtgttggcccgcaatgcactcaccctgccatacgaacggtgagtggtaaccattctctatgcgttacatctccttattgatatgttcgtatatatgatagcacatccgagccgtctgagggaaacataatatacacgcccgatgccgacgacgatttcgacgaggaggatccggacgaggatctgtgcatctaggctgcccgccagcagcgaacggcagtacaaatagccttggctttaagtctccttaagtctaacctactaaaaccataaaatacctggaattccggccccaaagttccgcctaggggtgtgttcaacctcgccagaggagcagaatgaatctttgaacgaccacttagtacacgtagaattgctcatttattttggataacttgatatgtgaatcaaaaaatcgaagaaacttgtgaatacatacaactgattcaattgctatctggtggtgccctagcttatgacttagttaaggaatttcatctagctaaccttatgtacagttaactctcgattacctccacgatatttggctgcaatgcgatcttttggtgtccagtgcgtggcgtatttacaaggcgttcaacctaactaacttaactagttccaaagtgctactatgctctattgatatgaaaatcaaatacaattggagcggcggagttccgcttccggtcaaaatggcgcttaaaagttcacattatcacaacaatctatacgaaaacatcgagaagaaaaaggagctatcaaaaaatcgttaattgcggttcgacatctaaatcttggcgagtatttacactagagaattaataacaaattaatgcatggcaatggctcatttgagcagggcatccacatcgctcttggggtcgggtgccagtgagctccagggcgcatcgctgcacagcggcagggaaacctcgctgtccgcctccaccacgcagctctcacgcagttgaaagaattggcccaccaatccgtcaatccagctgtgcagctcctgtcccagcattttccctttggccagggactcctcgcgcatggtgaactgctcgtcgtcggtttgaaggtgctgctgccactccacgggcatctcaaaatcttcaggcagagctacagtcaagccggcgtttagcgcctcagcatctgaggactttgctagcggatagcccttgtagtaggccagtggagctattaggaatttcaactgcgcatagatcgaattgcggcctattaacttggctgtccagatgcccggtgtgatcgggtgtttgagcagggttttcgagtggtttatcacatcgctggtggaatcctcaacatgcaattcattaaaatcttgcaatcggcccagcggatctatccacagcagggtgaggttgtacgaatgggaagcggcgcccgaatctgcgtttgcttggagtgtgtagctcaaaagcaagtcactttggggacccaagagctttccaaagttgcgggcaatctgctccttttgatcgaaatctgtagagacctcaaagttgcgtaatcgcttgctgaagcgagcattcctcgccagctttccttgctgcgtcggtcgcactctcgtctccaagtgcagcggctttccagtagatcctctggctctgtagcgcaccaggaaccccttgtactggtcccggtggaggtagtgagtgagttcaatcaactccaggggatacaatttcgcttgacgcgcagacagacgcattacgctatctccaatgcttctggccaagtcgtctcctgatccatggacatcctcgtggtgatacagcgactgccagtagccgtgcagattggcgtattcgctggtgtatggcccgtagagccactcctccagctggagcagcaccgcctggttgataacgggctcaaacttgcgggcgaagaacagtgatttctgctccgtggcctgcagcctgggccaatcttctggcttaaagtcgtttggactgcatccgcaccaatccaccacatgcttgtactggcatttgcaaccctgcttccgcttccagttggtgacgtgcaggttgttgtccacatagctcgtgcaatgcttggtattcctgaggaccgtgtggaaaaacgattccgccggcaggagcgtgtgtcggaagagctttagaagagcctgcaacaactcatcgtcttccctgggatgagtaacatagcccacaaaaggtcgtgatagcgccacccagtcactgcctccgtccacttgaatgccagctggcaacttccgatctcctattctccacatgtgcgtgtcgcactcgacgaacgtcttgtccaagccctgcttctggatgaacttctgtgtctcccggccgtggcccttaacaaagttcctgccaggattggcgctcaagaaatccaccaacttgtcgagggtcttcactggaaaatcactttcgctaaggttgatcacaaagtcccagtgccagttggactgcagtaggtcctccatgcactggagcagcatggtcaggagagaggctccaccccatatggtggagaatcgcttccgagccaaacgtatgttggggaactttgactccaactccagcagctttcggtacaggtaatcttggcgctaataaagaaacagactgttaaattgaagtaaaccaaatactacgagtatgatacgcatatctttttaaaagccgcacaacgcacaccagcaatttgtaagtgggctgggcaattagagtacaatgtaaattaaatgcagtgctgattgtgcacttgacaagccagttcaaataaccagtaactgtgtatgcagttcaaggcatgtctgaaatagcttgccgtcgacgtaccataaacatctcaatcagtggccaactattttggccgccagtgtgttaaattgtgcaaattagcgcaattaatcgcgcgcgctttaattgccgagttccggccaatgacccacctcgtccacatggatgtagtaaacgtgctccggtgcatagagcgccttcagaagtcggtgcacctgacgcagcgctcttccgttgagcgtcagcagaaatgcgatccgcacgcgcttcgtttcctccgaaggagtggtggccgccagttgagcggtgaactctgcaagagatgcaaaaattttcaaatatacaatttaaagattatgttaccaacttagcataagcataaatgaatgtagattcataatactccacactcactggctattccggtctcgtatatgttcatggcatagaatccgccgcagatttccttggcgttgcccaggcacttggtgttgcaactggagtccggcagcttcgacgctttaggaggcgggtcgtaaccgcagaagcactcgcgaccgtactgcacccctgcgtacgggtaaccgctttgcagacatagctccacgcatttggccggagaattggaggtcttggagctgctgtagtagccggccagaaggcggcgatctttctcatccttgaagcatcccaaagaaacgttcgccgtgtgattaccagctggacagctgctccggagctgcggcgcatagaagcgtccggcttggattgcgcaggcgatctgcgcgatatgttctcgacagtctttcgttttggcgcgctgcagggcggagatggcctctctggcgagaatgtcgcactctggctggaagcccagttgctgggcagtaagcttggtcctggcgggcggttggacccgtgcctgagcatgcggaggcggaggactggcaggcgcttcagccgcatcaaatccggaaccggaaccgccgcctacgatgtccagggacttgtaggccaggaacaactggatggccacgataagcagcaggatgaggaagaatgcgcgatagcgcttcagccagcgggcggacacagactgctccatggctagttgtatctccaggggcttttgctccaacctccgctgccaaagacgagatgctgctcctctggaatctggacgtgcgtgtgggctgtgatccgtgatgagctgtggagacgaggcggggacatgttttgctctctagtgctggcgggcaaagcatttggactggttcgtctggctaattaataacatttttccacggaaaagtctccccgctcgagcagtgtgaccgtactacggcgggaggctaaatactgcacccacatcgcagcgatgggcgccttcagcagtgatttgattcagtgatttcaagtttgtaaggcggtgcaaggaattaataaaattaatttgtagtcaccattaatatattataatttaataactctcttaacctgaattgattccgatatatgtgtgtgcttatgtgaggtgtatttatttcgatagcgtgacttgaccaaatcactgttacttcagaattgcagctgaacacataaacagctgtcgcagctgagctgtgttgaaaaattcagtcgaagggagtttatttgtataaataccgaaacaatggtggatcccaaccgaaagataaaccgtctggtcgaaagggacctgaacttcctggagtcctgcgagcttgagttcgcagaccgcttcactgacgacgacccagagttcatggcgcactgcagcaagcctgtgccggagccgccaattgtggagaactggatgggaggtggcggaggaggaggcggcttccagggcggaggaggcggtggtcatccctaccacaatcgctacaacggacatcgcagaggaggcggcgacaggggctggcagcgacgaggaggagctggctaccacaacaaccaggacaggggattcaggggtaatacccgggaagaagctcagtttctatttatagcttaccaacgcatttgttcccacagacaaccggcgcaacaacagatacgatcacatcgatcgccggaatcggtacgaaggaggcggagggtccggaggatctggaggctacaagcgctcccatgatcataaccagagaaatgatactcccaataacgaaccacccatgaaggtcagacgcgactatggaaactttgtgcctgcatccaaggattagttatcgaatatatcaaataagaatactctgcattacattgaaatattcacattgacgtttatttaatggacttaagactatacta

SEQ ID NO: 26159 - DNA, 3222 bp, DROSOPHILA
cactgctcgagcggggagacttttccgtggaaaaatgttattaattagccagacgaaccagtccaaatgctttgcccgccagcactagagagcaaaacatgtccccgcctcgtctccacagctcatcacggatcacagcccacacgcacgtccagattccagaggagcagcatctcgtctttggcagcggaggttggagcaaaagcccctggagatacaactagccatggagcagtctgtgtccgcccgctggctgaagcgctatcgcgcattcttcctcatcctgctgcttatcgtggccatccagttgttcctggcctacaagtccctggacatcgtaggcggcggttccggttccggatttgatgcggctgaagcgcctgccagtcctccgcctccgcatgctcaggcacgggtccaaccgcccgccaggaccaagcttactgcccagcaactgggcttccagccagagtgcgacattctcgccagagaggccatctccgccctgcagcgcgccaaaacgaaagactgtcgagaacatatcgcgcagatcgcctgcgcaatccaagccggacgcttctatgcgccgcagctccggagcagctgtccagctggtaatcacacggcgaacgtttctttgggatgcttcaaggatgagaaagatcgccgccttctggccggctactacagcagctccaagacctccaattctccggccaaatgcgtggagctatgtctgcaaagcggttacccgtacgcaggggtgcagtacggtcgcgagtgcttctgcggttacgacccgcctcctaaagcgtcgaagctgccggactccagttgcaacaccaagtgcctgggcaacgccaaggaaatctgcggcggattctatgccatgaacatatacgagaccggaatagccaagttcaccgctcaactggcggccaccactccttcggaggaaacgaagcgcgtgcggatcgcatttctgctgacgctcaacggaagagcgctgcgtcaggtgcaccgacttctgaaggcgctctatgcaccggagcacgtttactacatccatgtggacgagcgccaagattacctgtaccgaaagctgctggagttggagtcaaagttccccaacatacgtttggctcggaagcgattctccaccatatggggtggagcctctctcctgaccatgctgctccagtgcatggaggacctactgcagtccaactggcactgggactttgtgatcaaccttagcgaaagtgattttccagtgaagaccctcgacaagttggtggatttcttgagcgccaatcctggcaggaactttgttaagggccacggccgggagacacagaagttcatccagaagcagggcttggacaagacgttcgtcgagtgcgacacgcacatgtggagaataggagatcggaagttgccagctggcattcaagtggacggaggcagtgactgggtggcgctatcacgaccttttgtgggctatgttactcatcccagggaagacgatgagttgttgcaggctcttctaaagctcttccgacacacgctcctgccggcggaatcgtttttccacacggtcctcaggaataccaagcattgcacgagctatgtggacaacaacctgcacgtcaccaactggaagcggaagcagggttgcaaatgccagtacaagcatgtggtggattggtgcggatgcagtccaaacgactttaagccagaagattggcccaggctgcaggccacggagcagaaatcactgttcttcgcccgcaagtttgagcccgttatcaaccaggcggtgctgctccagctggaggagtggctctacgggccatacaccagcgaatacgccaatctgcacggctactggcagtcgctgtatcaccacgaggatgtccatggatcaggagacgacttggccagaagcattggagatagcgtaatgcgtctgtctgcgcgtcaagcgaaattgtatcccctggagttgattgaactcactcactacctccaccgggaccagtacaaggggttcctggtgcgctacagagccagaggatctactggaaagccgctgcacttggagacgagagtgcgaccgacgcagcaaggaaagctggcgaggaatgctcgcttcagcaagcgattacgcaactttgaggtctctacagatttcgatcaaaaggagcagattgcccgcaactttggaaagctcttgggtccccaaagtgacttgcttttgagctacacactccaagcaaacgcagattcgggcgccgcttcccattcgtacaacctcaccctgctgtggatagatccgctgggccgattgcaagattttaatgaattgcatgttgaggattccaccagcgatgtgataaaccactcgaaaaccctgctcaaacacccgatcacaccgggcatctggacagccaagttaataggccgcaattcgatctatgcgcagttgaaattcctaatagctccactggcctactacaagggctatccgctagcaaagtcctcagatgctgaggcgctaaacgccggcttgactgtagctctgcctgaagattttgagatgcccgtggagtggcagcagcaccttcaaaccgacgacgagcagttcaccatgcgcgaggagtccctggccaaagggaaaatgctgggacaggagctgcacagctggattgacggattggtgggccaattctttcaactgcgtgagagctgcgtggtggaggcggacagcgaggtttccctgccgctgtgcagcgatgcgccctggagctcactggcacccgaccccaagagcgatgtggatgccctgctcaaatgagccattgccatgcattaatttgttattaattctctagtgtaaatactcgccaagatttagatgtcgaaccgcaattaacgattttttgatagctcctttttcttctcgatgttttcgtatagattgttgtgataatgtgaacttttaagcgccattttgaccggaagcggaactccgccgctccaattgtatttgattttcatatcaatagagcatagtagcactttggaactagttaagttagttaggttgaacgccttgtaaatacgccacgcactggacaccaaaagatcgcattgcagccaaatatcgtggaggtaatcgagagttaactgtacataaggttagctagatgaaattcctta

SEQ ID NO: 26160 - protein, 876 aa, DROSOPHILA
MEQSVSARWLKRYRAFFLILLLIVAIQLFLAYKSLDIVGGGSGSGFDAAEAPASPPPPHAQARVQPPARTKLTAQQLGFQPECDILAREAISALQRAKTKDCREHIAQIACAIQAGRFYAPQLRSSCPAGNHTANVSLGCFKDEKDRRLLAGYYSSSKTSNSPAKCVELCLQSGYPYAGVQYGRECFCGYDPPPKASKLPDSSCNTKCLGNAKEICGGFYAMNIYETGIAKFTAQLAATTPSEETKRVRIAFLLTLNGRALRQVHRLLKALYAPEHVYYIHVDERQDYLYRKLLELESKFPNIRLARKRFSTIWGGASLLTMLLQCMEDLLQSNWHWDFVINLSESDFPVKTLDKLVDFLSANPGRNFVKGHGRETQKFIQKQGLDKTFVECDTHMWRIGDRKLPAGIQVDGGSDWVALSRPFVGYVTHPREDDELLQALLKLFRHTLLPAESFFHTVLRNTKHCTSYVDNNLHVTNWKRKQGCKCQYKHVVDWCGCSPNDFKPEDWPRLQATEQKSLFFARKFEPVINQAVLLQLEEWLYGPYTSEYANLHGYWQSLYHHEDVHGSGDDLARSIGDSVMRLSARQAKLYPLELIELTHYLHRDQYKGFLVRYRARGSTGKPLHLETRVRPTQQGKLARNARFSKRLRNFEVSTDFDQKEQIARNFGKLLGPQSDLLLSYTLQANADSGAASHSYNLTLLWIDPLGRLQDFNELHVEDSTSDVINHSKTLLKHPITPGIWTAKLIGRNSIYAQLKFLIAPLAYYKGYPLAKSSDAEALNAGLTVALPEDFEMPVEWQQHLQTDDEQFTMREESLAKGKMLGQELHSWIDGLVGQFFQLRESCVVEADSEVSLPLCSDAPWSSLAPDPKSDVDALLK

SEQ ID NO: 26161 - DNA, 3668 bp, DROSOPHILA
ctcctgcgaagtcagcaaaacccagttcaaggtgacgccgctggacggaggactgcctgcaggtgcctcccccaagcagccctcgcccgaggcggagcagaccacagagccggccagcagcaccttcaaaatcgagcttgacgaggatgaagtgttggcccgcaatgcactcaccctgccatacgaacggtgagtggtaaccattctctatgcgttacatctccttattgatatgttcgtatatatgatagcacatccgagccgtctgagggaaacataatatacacgcccgatgccgacgacgatttcgacgaggaggatccggacgaggatctgtgcatctaggctgcccgccagcagcgaacggcagtacaaatagccttggctttaagtctccttaagtctaacctactaaaaccataaaatacctggaattccggccccaaagttccgcctaggggtgtgttcaacctcgccagaggagcagaatgaatctttgaacgaccacttagtacacgtagaattgctcatttattttggataacttgatatgtgaatcaaaaaatcgaagaaacttgtgaatacatacaactgattcaattgctatctggtggtgccctagcttatgacttagttaaggaatttcatctagctaaccttatgtacagttaactctcgattacctccacgatatttggctgcaatgcgatcttttggtgtccagtgcgtggcgtatttacaaggcgttcaacctaactaacttaactagttccaaagtgctactatgctctattgatatgaaaatcaaatacaattggagcggcggagttccgcttccggtcaaaatggcgcttaaaagttcacattatcacaacaatctatacgaaaacatcgagaagaaaaaggagctatcaaaaaatcgttaattgcggttcgacatctaaatcttggcgagtatttacactagagaattaataacaaattaatgcatggcaatggctcatttgagcagggcatccacatcgctcttggggtcgggtgccagtgagctccagggcgcatcgctgcacagcggcagggaaacctcgctgtccgcctccaccacgcagctctcacgcagttgaaagaattggcccaccaatccgtcaatccagctgtgcagctcctgtcccagcattttccctttggccagggactcctcgcgcatggtgaactgctcgtcgtcggtttgaaggtgctgctgccactccacgggcatctcaaaatcttcaggcagagctacagtcaagccggcgtttagcgcctcagcatctgaggactttgctagcggatagcccttgtagtaggccagtggagctattaggaatttcaactgcgcatagatcgaattgcggcctattaacttggctgtccagatgcccggtgtgatcgggtgtttgagcagggttttcgagtggtttatcacatcgctggtggaatcctcaacatgcaattcattaaaatcttgcaatcggcccagcggatctatccacagcagggtgaggttgtacgaatgggaagcggcgcccgaatctgcgtttgcttggagtgtgtagctcaaaagcaagtcactttggggacccaagagctttccaaagttgcgggcaatctgctccttttgatcgaaatctgtagagacctcaaagttgcgtaatcgcttgctgaagcgagcattcctcgccagctttccttgctgcgtcggtcgcactctcgtctccaagtgcagcggctttccagtagatcctctggctctgtagcgcaccaggaaccccttgtactggtcccggtggaggtagtgagtgagttcaatcaactccaggggatacaatttcgcttgacgcgcagacagacgcattacgctatctccaatgcttctggccaagtcgtctcctgatccatggacatcctcgtggtgatacagcgactgccagtagccgtgcagattggcgtattcgctggtgtatggcccgtagagccactcctccagctggagcagcaccgcctggttgataacgggctcaaacttgcgggcgaagaacagtgatttctgctccgtggcctgcagcctgggccaatcttctggcttaaagtcgtttggactgcatccgcaccaatccaccacatgcttgtactggcatttgcaaccctgcttccgcttccagttggtgacgtgcaggttgttgtccacatagctcgtgcaatgcttggtattcctgaggaccgtgtggaaaaacgattccgccggcaggagcgtgtgtcggaagagctttagaagagcctgcaacaactcatcgtcttccctgggatgagtaacatagcccacaaaaggtcgtgatagcgccacccagtcactgcctccgtccacttgaatgccagctggcaacttccgatctcctattctccacatgtgcgtgtcgcactcgacgaacgtcttgtccaagccctgcttctggatgaacttctgtgtctcccggccgtggcccttaacaaagttcctgccaggattggcgctcaagaaatccaccaacttgtcgagggtcttcactggaaaatcactttcgctaaggttgatcacaaagtcccagtgccagttggactgcagtaggtcctccatgcactggagcagcatggtcaggagagaggctccaccccatatggtggagaatcgcttccgagccaaacgtatgttggggaactttgactccaactccagcagctttcggtacaggtaatcttggcgctaataaagaaacagactgttaaattgaagtaaaccaaatactacgagtatgatacgcatatctttttaaaagccgcacaacgcacaccagcaatttgtaagtgggctgggcaattagagtacaatgtaaattaaatgcagtgctgattgtgcacttgacaagccagttcaaataaccagtaactgtgtatgcagttcaaggcatgtctgaaatagcttgccgtcgacgtaccataaacatctcaatcagtggccaactattttggccgccagtgtgttaaattgtgcaaattagcgcaattaatcgcgcgcgctttaattgccgagttccggccaatgacccacctcgtccacatggatgtagtaaacgtgctccggtgcatagagcgccttcagaagtcggtgcacctgacgcagcgctcttccgttgagcgtcagcagaaatgcgatccgcacgcgcttcgtttcctccgaaggagtggtggccgccagttgagcggtgaactctgcaagagatgcaaaaattttcaaatatacaatttaaagattatgttaccaacttagcataagcataaatgaatgtagattcataatactccacactcactggctattccggtctcgtatatgttcatggcatagaatccgccgcagatttccttggcgttgcccaggcacttggtgttgcaactggagtccggcagcttcgacgctttaggaggcgggtcgtaaccgcagaagcactcgcgaccgtactgcacccctgcgtacgggtaaccgctttgcagacatagctccacgcatttggccggagaattggaggtcttggagctgctgtagtagccggccagaaggcggcgatctttctcatccttgaagcatcccaaag

SEQ ID NO: 26162 - DNA, 1668 bp, DROSOPHILA
atgctgctccagtgcatggaggacctactgcagtccaactggcactgggactttgtgatcaaccttagcgaaagtgattttccagtgaagaccctcgacaagttggtggatttcttgagcgccaatcctggcaggaactttgttaagggccacggccgggagacacagaagttcatccagaagcagggcttggacaagacgttcgtcgagtgcgacacgcacatgtggagaataggagatcggaagttgccagctggcattcaagtggacggaggcagtgactgggtggcgctatcacgaccttttgtgggctatgttactcatcccagggaagacgatgagttgttgcaggctcttctaaagctcttccgacacacgctcctgccggcggaatcgtttttccacacggtcctcaggaataccaagcattgcacgagctatgtggacaacaacctgcacgtcaccaactggaagcggaagcagggttgcaaatgccagtacaagcatgtggtggattggtgcggatgcagtccaaacgactttaagccagaagattggcccaggctgcaggccacggagcagaaatcactgttcttcgcccgcaagtttgagcccgttatcaaccaggcggtgctgctccagctggaggagtggctctacgggccatacaccagcgaatacgccaatctgcacggctactggcagtcgctgtatcaccacgaggatgtccatggatcaggagacgacttggccagaagcattggagatagcgtaatgcgtctgtctgcgcgtcaagcgaaattgtatcccctggagttgattgaactcactcactacctccaccgggaccagtacaaggggttcctggtgcgctacagagccagaggatctactggaaagccgctgcacttggagacgagagtgcgaccgacgcagcaaggaaagctggcgaggaatgctcgcttcagcaagcgattacgcaactttgaggtctctacagatttcgatcaaaaggagcagattgcccgcaactttggaaagctcttgggtccccaaagtgacttgcttttgagctacacactccaagcaaacgcagattcgggcgccgcttcccattcgtacaacctcaccctgctgtggatagatccgctgggccgattgcaagattttaatgaattgcatgttgaggattccaccagcgatgtgataaaccactcgaaaaccctgctcaaacacccgatcacaccgggcatctggacagccaagttaataggccgcaattcgatctatgcgcagttgaaattcctaatagctccactggcctactacaagggctatccgctagcaaagtcctcagatgctgaggcgctaaacgccggcttgactgtagctctgcctgaagattttgagatgcccgtggagtggcagcagcaccttcaaaccgacgacgagcagttcaccatgcgcgaggagtccctggccaaagggaaaatgctgggacaggagctgcacagctggattgacggattggtgggccaattctttcaactgcgtgagagctgcgtggtggaggcggacagcgaggtttccctgccgctgtgcagcgatgcgccctggagctcactggcacccgaccccaagagcgatgtggatgccctgctcaaatga

SEQ ID NO: 26163 - protein, 555 aa, DROSOPHILA
MLLQCMEDLLQSNWHWDFVINLSESDFPVKTLDKLVDFLSANPGRNFVKGHGRETQKFIQKQGLDKTFVECDTHMWRIGDRKLPAGIQVDGGSDWVALSRPFVGYVTHPREDDELLQALLKLFRHTLLPAESFFHTVLRNTKHCTSYVDNNLHVTNWKRKQGCKCQYKHVVDWCGCSPNDFKPEDWPRLQATEQKSLFFARKFEPVINQAVLLQLEEWLYGPYTSEYANLHGYWQSLYHHEDVHGSGDDLARSIGDSVMRLSARQAKLYPLELIELTHYLHRDQYKGFLVRYRARGSTGKPLHLETRVRPTQQGKLARNARFSKRLRNFEVSTDFDQKEQIARNFGKLLGPQSDLLLSYTLQANADSGAASHSYNLTLLWIDPLGRLQDFNELHVEDSTSDVINHSKTLLKHPITPGIWTAKLIGRNSIYAQLKFLIAPLAYYKGYPLAKSSDAEALNAGLTVALPEDFEMPVEWQQHLQTDDEQFTMREESLAKGKMLGQELHSWIDGLVGQFFQLRESCVVEADSEVSLPLCSDAPWSSLAPDPKSDVDALLK

SEQ ID NO: 26164 - DNA, 4177 bp, DROSOPHILA
gattctacatgcaactttcgtagcatacttttcagggttaagtgcactactcagatttgtttcgaacttttcgcaaaaagtttcattgaatgcccttttgttgttatttaattgtatgagtcataaaaacaattgtgccacgaaaatcactcatttcacttggacgaggtaaaagcttctggaagaagtccaagaagaaaataaaaaaaaacaaggtggcctgacttaatgccgcgaaacgcagttcaaacaatgtaaggaaaatgcaaataatccgattctgtataattgcacacttttgccgagaacacttaataagatgcgacagcggatacatttacattttctgggaaaacagttcgtgttcatttaagttacttctttaatatggcaatttgtagatactttttatatcctctgctaaaattgttactcattaaatacctaagcaaatgtatgcaaatatatattaagcaaaagtgttattttttaataagtaaatcacttttcatcgagttcgtagctagagtcatgatttttcattcttcagcacacacaataaaatcgaaccataaaatcggtttaatagagtgatacccttatcgccttatttactgcctttccacgctgacaatcccgtcaatgaaccatattcagttaaatttcataggaatggggacattttacacgatgatgatcaaatttaatacgctcttttattacattacactttgtatgtgatgctcgtctggcattcattgattttggagtgcgaaatcaggccacacaagaattttgctagaacaaaggacttcaaagttggacaatggctgcttcggacaatttttgacttttgcacagcagggcaagggatttttgctttgtcggttttgccaacataataaaacttgttggtgtagtgtacaatttagttggcttttatatcaaacttatatatatatataatacatatattttgcggctagttgttagattgtactcacatgatgcggtggtaggcatcgagctggttgtgcgcacaggtcacggactgctcagattcggtggaatcatcgcgcagcgttgcaacgccgagcggcagaatcggtatgatcgcagctgtggcagctgcggccgttgccggcggccccgccaatgtcgccgattgtcccgctcccgctcctgctactgcaaccgctatcgctgtcccgcttccaggtaccgctgctgacgctcctctgcccgccccgactgcgctgccagggaaggtctgctgtgtggaggatgatgatgtcgtactatcgagctcctgttcaaagtgagttcccaaagaaagtatatttagctaagcggctcatcattgaaaaggtggacaaaagcggtgtatcaaaggatctaaaatagaggggttccttgagtttcttaagctacaaagaaaactataacgtttatttaaagagtaaagtgatcacccaaccaatcataaatgaagatagcttatcaaaaacatttataaattaattcaattgaactaaatctataaaataaatgaaattcatgccaatagcaaaagtttgaaggctttaacgggctcttttgtccaccttccggtcatggaaaagttgcagctggcaggtgcgaaatgaaatggatgggtgggcgtgggttctaaaaaggggttaaggcagtgggggttttagtggtggttagtgatgaaaaaccttgatctcgccggtttccggctgcgagaatcgcttccgctcgtaaagaatctcccgctcgatggagcgactccggaaggcggggggcagcgatcgatcggggggaggtgtctgcaactttggggtcactggtgtgttgctgctgccgctgcccgttgactgttgttgctgctgctgttgctgctgctgcagatgctgttgctgcagatgcaaatgctgccgctgctgttgctgctgcgaatgcgaatgtgtctggtgggcggcggctgcggtggacgaggtgggcggacttttctcgctggactgctgctgatcgcgatgctgctgctgcagatgctcgcggtgctgctgcagttgttgctgctgctggcgctgctgctgctgctcgtcccgcttctgctggcggcgtatctcaaagtccagcagacgggcctcgcgttgctccttgtcgcgctgtttgcatgcaattgtcgcaaagtgcattcttactatcaggtttaatggattatcgcatggccatcgttattattgctgttgcattttcaattactgcttcatttggatttgctttcttttcttatctatacttttttttataatttttcttggtactcttttctttttctttttttcttttgagggattacattggctttatcaaattgttaatttgtttgcacgcgcggtagacacacacacgcacaccgaattggccgcgacagaaagagatagggagaaggcagacagagagaggcacacacacacacactcaccttgtagttgatagcgtcctgctcttcctttttcgcctcgcgctcgtttcgctgtcgatcgcgttgcttctcttcgtcggtctgcgagttcttgctgtctatataatttaaggaaagtattaaaaaatgattaacaaataagggaaataatagtaaatcaatcaaaaaaaattcaagttaaatggatcaacgttaaagaacatatcaaaatatatttaaatcaaaggatagattaaaacatgacagagaaaatgtagaaacataaatgttagaaatatatgaaaaacatagaaataatccaagaaatccataagaatagaaagagagagagagagagagagagacgggggagaaaaagaggccatgttcaaactgtttcaatcgattctcattattgtatttcaatttgcaattattttactgtcatcctctactcaagcactaagcatgcaagttgaaaagttctaaatggtcggataaaacaacttgcagcatgcacatctacagctcgcactcttatacacacgcacacacacgctctcaactacaaatatatgtctttatatataaatatatatatatatatatacacagttcaaggccacgcccccctacttacgctgctccccatcgcgcccaccacgcactgccatcaaatagcgactcagccgaggcggtgtcatactaattcgcacctttcgacaggtgaaaagcccacacggaatcaacagtcgtcagttgcggccgaagagccaggcgaaactgacactgagcaccaacatgcggcccactaaaaacataaagctaaacactgaacccaaaacactaaacacaaccaaagttgaccgcggcccaattagtgtcatcttctcgggaggattaatgcccagctgcgagtgttcgcggcaaccagacagatatgcattttgcggtagtgtgaccaagtcacgcacgtaatttggaattgcggtgggcacactgattgcattaaagttaattcacagtcaatatcaatttcaatatctacacatcaacacgattgccatttgtttgcatttttgtatttctcacgttcgttaattatttgacttatttaaattggtgtttttttcctctttttattattttttcggagcattcccactttgaggagcggcctctactcgactaacactcaacatttggtttgctgccgtcgttttgcttgcctcgtacatttatgcttcccatgaatatttgagctttgagctttggccttggcttcaaccgattcaacccaccacaagagcacaagagttcaccaagtgcgtcacaagcggtgagtaaacacttatttgagtcactgtgttgtggtggattaaaattgatcataggaaagttgtaattgcaagcgaattttttaagttatatttaaagccatttttcacttattatttttcacttatttacctgtgtgtgtataaaacatcattttctatgcaaaacgaagaaaaccggtttactttccatagcatatgtatatactttttagccccaagccttggcaaatactcaaattgccgttacacagtttactcattttatattctagttatctgtttaaccttttcgcaagcttcaagcgtatgcaattatcttgttctacccttttgatgacttcaaagaggcccgagtgccgctagt

SEQ ID NO: 26165 - DNA, 924 bp, DROSOPHILA
atgacaccgcctcggctgagtcgctatttgatggcagtgcgtggtgggcgcgatggggagcagcacagcaagaactcgcagaccgacgaagagaagcaacgcgatcgacagcgaaacgagcgcgaggcgaaaaaggaagagcaggacgctatcaactacaagcgcgacaaggagcaacgcgaggcccgtctgctggactttgagatacgccgccagcagaagcgggacgagcagcagcagcagcgccagcagcagcaacaactgcagcagcaccgcgagcatctgcagcagcagcatcgcgatcagcagcagtccagcgagaaaagtccgcccacctcgtccaccgcagccgccgcccaccagacacattcgcattcgcagcagcaacagcagcggcagcatttgcatctgcagcaacagcatctgcagcagcagcaacagcagcagcaacaacagtcaacgggcagcggcagcagcaacacaccagtgaccccaaagttgcagacacctccccccgatcgatcgctgccccccgccttccggagtcgctccatcgagcgggagattctttacgagcggaagcgattctcgcagccggaaaccggcgagatcaaggagctcgatagtacgacatcatcatcctccacacagcagaccttccctggcagcgcagtcggggcgggcagaggagcgtcagcagcggtacctggaagcgggacagcgatagcggttgcagtagcaggagcgggagcgggacaatcggcgacattggcggggccgccggcaacggccgcagctgccacagctgcgatcataccgattctgccgctcggcgttgcaacgctgcgcgatgattccaccgaatctgagcagtccgtgacctgtgcgcacaaccagctcgatgcctaccaccgcatcatgtga

SEQ ID NO: 26166 - protein, 307 aa, DROSOPHILA
MTPPRLSRYLMAVRGGRDGEQHSKNSQTDEEKQRDRQRNEREAKKEEQDAINYKRDKEQREARLLDFEIRRQQKRDEQQQQRQQQQQLQQHREHLQQQHRDQQQSSEKSPPTSSTAAAAHQTHSHSQQQQQRQHLHLQQQHLQQQQQQQQQQSTGSGSSNTPVTPKLQTPPPDRSLPPAFRSRSIEREILYERKRFSQPETGEIKELDSTTSSSSTQQTFPGSAVGAGRGASAAVPGSGTAIAVAVAGAGAGQSATLAGPPATAAAATAAIIPILPLGVATLRDDSTESEQSVTCAHNQLDAYHRIM

SEQ ID NO: 26167 - DNA, 6412 bp, DROSOPHILA
gggttaccacttgtcttacttgtcgtaggtatctgcaatctttccatatttgatttcgcggtaaaagcaattatagtccttgtctgtgaaattaagcaatttttgagcgacttcatcgtcgatgtgcagaatatgccgtttgataatttcattgtatgttgttgatatgagatcggtctcattcgagcaggtgattagtgtttgcggtttgtacaactccatggcttcgtcgttgaaaggatccacatagggtatatggcacttggatgttttcacaaagaatttctgcggttcagcctttaccgaaactcgagaaaatcgcgtagtaggcggatataaatcatgatttgtattcgaagaagtattcgatgaatatattagaaaaagcacgatggtcaaaaagcagcacagggcgagaaacttgtagagcgaatagctggaacaaattctcaactccatggtgttccttcgaccacattaacgacgctactgagacgaagtggaagagaataccactaaataagaatagcccgggctttgttatcatttcttatgaatgaaccacgtagttattctcgtaaatttgttcccgagcccactctcgaacttcttcacccatcggctgtcaaaaactggaatgtcaagcagcacgagcagtgatagagggcaggttcgggaattttgggcaaacaccacgtagaagtgcagtgcagttcgatgagttcagtcaattctttttgtagaaaaaaaaaaaaacaatgtttaaagttagattagctttaagttctaatcctttatgagctgctcgctaaagcgaacgtacgtttttaggtctataaacctgttgacggaagtcattatcttacaagtatttgcaacacaattgaaatagcttccgcaaatatacttcaaagtttatagtttagtaaattagtaaaaagaaactgcaagttgaaatatatatatatatatatattacatacaaatattactggacaattcatgtgctttcattgtttcttaactttgataggcatatgcagaataacttttgaatattatcgtctaaacagctcgcatccggtctgtatatattaattcggctgattagttccacattgatctgaagctcttcggtttttctgtcgtagagaacggtggcaaagaactcagccaaattctgatgaacctggaatttggtatgataatgtcgcaatccctttcccagacttacgtgttcgtcgctctctgttattcttacttcggtgatgttgactaacttcagggtgagactgctacatagattctgtaggttatgatattgaaggaattggttaatgcgatcgaccaccagttcggccatgcgccacgtcccgtggtcctcctggacttcctcgtagttgtggcaggtacagtaagcctccggtatggcagcctctgagcagcttcgactttctggcaattcgtagaatagcgactgacactgggggcagtcgtaggaccacttggtatcctccaccaatccttcaatgtttataatgtgtttcaaggtattgtagatgtcgaaattggaactcaaccgattctgattctgggccagagcctccacatatcggggatatttctcacggaaccagggtggtaagtaaataaacattatgggttgtctctcctccagaaacgattccctcgtcctcattaggggaccaaagcgagatccgtgatccgagaagaatatcataatcgtatgctcgaatgatccatccttctcgaaattaagcaggtcgccaacgattttgtgttgcatggccgagagcatagaaaagtcatcgtgactgatgtgatttgaccaaaaaaagccccaaatgggacgatcggccacatagcgttgcataaactggcggcagtaatcgaagatatagctattggcaagtcgacgacccaggcaatataccattttacaacctggacaatacagtttaatagtttccttttccagggcatccaaaaggggacgaaagtagtagtctgtgggcctactcaaaaatcctggtttcatataattaaaaatattgctaaacactgtatcctccgcgtaggctgttaaatagccgttctttttcatatccttccatatgaagggtattttatctaaacatcctggttgagttgtatcgcatatttgatttttcgccgaatttggggagtatcctgttaggatggaaaatatgttcggatacgtattatcagctacctgtaataaatcgtaagtcataaaataacttttcgactattggttttcattagtttcgaaccttattatagcccatcatttcgtaccatcctggagactttagaaacccgaacaccacgggcatcagccgtcgaagattcgtgcgagagactgtatctatgccgtacattattacactagcctttcgatctatatccaagttcggagaagtcttctggtattgtacaaaagagaaagcgtcctcttgcaggatgcgcttctcgtcccctgacctacactccaccagcattccttggacattcaagggtactacatagtcgtgagtgaatttagttttttttcccatcctattcagcataagaaaaccatataaaaactcaaactaactttatagataacatttacctatcgtagtgatccgcggactgtccgtaggtaatgttctgatagaagcaagcaaatttattgctctttgactgcgacaacttgtgaagcacttcctcatccacatgcaggacatactgttttaaaatggaatcaaagtgtactgtaaccagatcactttgattggagcaacgtgtgaagttttttggcgtgtacaattttgtgaactcggcattaaagggctccacgtaagccatttgacaatttgagctatttacatagaaacgtttttggttttcattgtatttaattgtcagcacatcgttcaccccgtaagacgttatcttccacacaattaagaggaacaaaataaatatgcacaaaatacattttttatatgacaccgaagtaaaagtcttcattttcaacatcatctcaatttgaaaacgtaagttaaatgctcaattgggactattaggacaggaaggtaatgactgtattttttaattcaatataaattcctgaaccgagtgcgaagaactatgcccaacaactgacttggatcggctcccagagatcgcaatcgataaacaaggtatactatatataaacaaggcatagtattgtagaatgaaaacgaataaacatgagatgaatatccatcgacttagataataaatgtttactttttttatactcgttaatggggcaatagctttgtttaacacaatgtaagttttgaagtaattaatatagtctcagcttgttttattgaacttccaagtatatttttactttattatagctcgcagctttgacaagcaaacgcaatataacttttgaatcttattgttaacgcactctgaatcggtaccatacatattagttcgactgatgagctccacattcatttggagctcttctgtctgcttatcgtacagaacggtggcaaagaactcagccaaattctgatgaacctgaaatttggtatggtagtgtcgcattccattcgctagatcgacgtccttatcatccattcttacttcggtgctgttgattactctcagggtaagattgctacacagattctgcagattatggtaatgaaggtatttgttcatgcgatcaacaaccagattggccaagcgccaagttccttgatcttccttgatttcctcgtagttgtggcaagtacagtaagcctccggtatggcagcctctgagcagcttcgactttctggcaatgggtagaatagcgactgacactgggggcagtcgtaggaccacttggtatcctccaccaatccttcaatgtttataatgtgtttcaaggtattgtacaggtcgaagttggaactcaaccgattctgattctgggcgagagcctccacatagcggggatatttcttccggaaccagggtggcaagtaaataaacatcatgggcagacgctcctctagaaaagcttctttcgtgtacataaggggaccgaaacgagctccgtgatccgagaagaatatcattatggtatgctcgaaaaccccatccttttcaaaactgagcagatcttctaggattttgtgttgcatggccgaaagcataaataaatcatcgtggctgtaatgattcgtccaaaacatgccccaaataggtcgatcggccacgaatcgttgcataaactggcggcagtaatcgaagatatagctgctggcaagtcgacgccccagacaatatttcattacgcaacccgggcaatattggataaaagtttcattttccagggcggttagaaaaggtcgaaaataataatcggtgggcttcactgcgaagcctggctttgcataattgaaggtattcgagtgctcctcatcttcagcataagccgtcaaataaccgtctttcttgaaatccttccatataaaaggtattttatccaaacatccatcaacatccgtgttacaaatttgagtctctgccgactcgggtgaaaagccagtgagcatagcgaatatgttgggaaatgaattatccgcgacctaaattatgaatatttgaaaaaacttttaagtaatattatcatataaaataatacatttaatgaccttattgtagcccatcatttcgtaccatcccggagactttaggaactcgaataccatgggcatcatgcggcgaagattggtccttgagacggtatctataccgtacataataacactggcctttttaactggcttcacattctgtggtggatccttgtattgcacaaacacgaaggcatctctttgaaggactctcatttcgtcagctgtcctgcactccaccaacatcccttcgacatccaagggcaccaaatgattctgactgatttttgtttttacacctttcctgtatttaacgaaacaaaattgtatagcaaccgcatctcatgtaaagcactcacattacccgtcgtaatgctccgctgattgaccataaataattttctgataaaaacaagcaaagtcattcgtttttgactcggagagctcatgtagtacttcctcatttgtatggagcacatattgattcaatattttatcgtagtgtacagaaataagatcactttcatttgtgcacggtataaatgcctttgggtgattgattttcaaaaactccgcattaaagggattcacataacgcattttacactttccggattcgacataaaatagtttttccacttcctgagaatcccgtgcactaaagttttcatcgactcttgaggaattcatgctccacaagcatattaaggttacagccaaaaaactcacaataagtcttttaaatgagtatgaaatagaccgggccattgtaagtatttcagtcaactaatattttaatatacactcaaaaactggctaggctaccgtaaagaaattgatttcacggttagttttcgttttttatcctatttaaatcaacttggaaggaaaacgttaaaaccaactggcatgcaaattatgtgtgaaataattagttcagttagcagttagaatgaaaacttcgaagacgctgattttcattatagccatatttctaataagccatttgtctctgagtaagaagagaaactcgcaatttaatcaagtccagcatgagcactatatcaagacatcagagtgccatataccatatatcaataaaccattggaaaatgaaaaaggaaacataaaaaaacaacacacaatttgttccaaagatgaaagtttgataaaccttcgtttcgacgagaaatcccatcaatatttattgtatgtaaatgatcatgtggcccagctaaaactaagatctatgaaaaagaaatctcccaacctgattggatacaattgcagttatcgtgagctcaaaaggttaaatcgcgactatatcgttgatgcacctgttgtgtatgtatgctatttaacagatcgaagtcttaaatttgaagatcaatttttatacagccttggcgaggaagttaaattttggaatggctatattgttcccccttctgtggaggggatgcgtgcaacttgccgaaatgaactggcagaggatctacaatcagatacttttgtcttagtgcaacctcctaagacatatgcaccacttatttcttggcaccgcataccgaatgttttattgattggattcgatggcatttcccagatcaactttcgtcgcaactttccccttgtattcaatcaattaaaaatgcaggactggttcagaatggacggatacacaggaatt

SEQ ID NO: 26168 - DNA, 3519 bp, DROSOPHILA
atgaattcctcaagagtcgatgaaaactttagtgcacgggattctcaggaagtggaaaaactattttatgtcgaatccggaaagtgtaaaatgcgttatgtgaatccctttaatgcggagtttttgaaaatcaatcacccaaaggcatttataccgtgcacaaatgaaagtgatcttatttctgtacactacgataaaatattgaatcaatatgtgctccatacaaatgaggaagtactacatgagctctccgagtcaaaaacgaatgactttgcttgtttttatcagaaaattatttatggtcaatcagcggagcattacgacgggaaaggtgtaaaaacaaaaatcagtcagaatcatttggtgcccttggatgtcgaagggatgttggtggagtgcaggacagctgacgaaatgagagtccttcaaagagatgccttcgtgtttgtgcaatacaaggatccaccacagaatgtgaagccagttaaaaaggccagtgttattatgtacggtatagataccgtctcaaggaccaatcttcgccgcatgatgcccatggtattcgagttcctaaagtctccgggatggtacgaaatgatgggctacaataagtcggcagagactcaaatttgtaacacggatgttgatggatgtttggataaaataccttttatatggaaggatttcaagaaagacggttatttgacggcttatgctgaagatgaggagcactcgaataccttcaattatgcaaagccaggcttcgcagtgaagcccaccgattattattttcgaccttttctaaccgccctggaaaatgaaacttttatccaatattgcccgggttgcgtaatgaaatattgtctggggcgtcgacttgccagcagctatatcttcgattactgccgccagtttatgcaacgattcgtggccgatcgacctatttggggcatgttttggacgaatcattacagccacgatgatttatttatgctttcggccatgcaacacaaaatcctagaagatctgctcagttttgaaaaggatggggttttcgagcataccataatgatattcttctcggatcacggagctcgtttcggtccccttatgtacacgaaagaagcttttctagaggagcgtctgcccatgatgtttatttacttgccaccctggttccggaagaaatatccccgctatgtggaggctctcgcccagaatcagaatcggttgagttccaacttcgacctgtacaataccttgaaacacattataaacattgaaggattggtggaggataccaagtggtcctacgactgcccccagtgtcagtcgctattctacccattgccagaaagtcgaagctgctcagaggctgccataccggaggcttactgtacttgccacaactacgaggaaatcaaggaagatcaaggaacttggcgcttggccaatctggttgttgatcgcatgaacaaataccttcattaccataatctgcagaatctgtgtagcaatcttaccctgagagtaatcaacagcaccgaagtaagaatggatgataaggacgtcgatctagcgaatggaatgcgacactaccataccaaatttcaggttcatcagaatttggctgagttctttgccaccgttctgtacgataagcagacagaagagctccaaatgaatgtggagctcatcagtcgaactaatatgtatggtaccgattcagactcaaattgtcaaatggcttacgtggagccctttaatgccgagttcacaaaattgtacacgccaaaaaacttcacacgttgctccaatcaaagtgatctggttacagtacactttgattccattttaaaacagtatgtcctgcatgtggatgaggaagtgcttcacaagttgtcgcagtcaaagagcaataaatttgcttgcttctatcagaacattacctacggacagtccgcggatcactacgataggatgggaaaaaaaactaaattcactcacgactatgtagtacccttgaatgtccaaggaatgctggtggagtgtaggtcaggggacgagaagcgcatcctgcaagaggacgctttctcttttgtacaataccagaagacttctccgaacttggatatagatcgaaaggctagtgtaataatgtacggcatagatacagtctctcgcacgaatcttcgacggctgatgcccgtggtgttcgggtttctaaagtctccaggatggtacgaaatgatgggctataataaggtagctgataatacgtatccgaacatattttccatcctaacaggatactccccaaattcggcgaaaaatcaaatatgcgatacaactcaaccaggatgtttagataaaatacccttcatatggaaggatatgaaaaagaacggctatttaacagcctacgcggaggatacagtgtttagcaatatttttaattatatgaaaccaggatttttgagtaggcccacagactactactttcgtccccttttggatgccctggaaaaggaaactattaaactgtattgtccaggttgtaaaatggtatattgcctgggtcgtcgacttgccaatagctatatcttcgattactgccgccagtttatgcaacgctatgtggccgatcgtcccatttggggctttttttggtcaaatcacatcagtcacgatgacttttctatgctctcggccatgcaacacaaaatcgttggcgacctgcttaatttcgagaaggatggatcattcgagcatacgattatgatattcttctcggatcacggatctcgctttggtcccctaatgaggacgagggaatcgtttctggaggagagacaacccataatgtttatttacttaccaccctggttccgtgagaaatatccccgatatgtggaggctctggcccagaatcagaatcggttgagttccaatttcgacatctacaataccttgaaacacattataaacattgaaggattggtggaggataccaagtggtcctacgactgcccccagtgtcagtcgctattctacgaattgccagaaagtcgaagctgctcagaggctgccataccggaggcttactgtacctgccacaactacgaggaagtccaggaggaccacgggacgtggcgcatggccgaactggtggtcgatcgcattaaccaattccttcaatatcataacctacagaatctatgtagcagtctcaccctgaagttagtcaacatcaccgaagtaagaataacagagagcgacgaacacgtaagtctgggaaagggattgcgacattatcataccaaattccaggttcatcagaatttggctgagttctttgccaccgttctctacgacagaaaaaccgaagagcttcagatcaatgtggaactaatcagccgaattaatatatacagaccggatgcgagctgtttagacgataatattcaaaagttattctgcatatgcctatcaaagttaagaaacaatgaaagcacatga

SEQ ID NO: 26169 - protein, 1172 aa, DROSOPHILA
MNSSRVDENFSARDSQEVEKLFYVESGKCKMRYVNPFNAEFLKINHPKAFIPCTNESDLISVHYDKILNQYVLHTNEEVLHELSESKTNDFACFYQKIIYGQSAEHYDGKGVKTKISQNHLVPLDVEGMLVECRTADEMRVLQRDAFVFVQYKDPPQNVKPVKKASVIMYGIDTVSRTNLRRMMPMVFEFLKSPGWYEMMGYNKSAETQICNTDVDGCLDKIPFIWKDFKKDGYLTAYAEDEEHSNTFNYAKPGFAVKPTDYYFRPFLTALENETFIQYCPGCVMKYCLGRRLASSYIFDYCRQFMQRFVADRPIWGMFWTNHYSHDDLFMLSAMQHKILEDLLSFEKDGVFEHTIMIFFSDHGARFGPLMYTKEAFLEERLPMMFIYLPPWFRKKYPRYVEALAQNQNRLSSNFDLYNTLKHIINIEGLVEDTKWSYDCPQCQSLFYPLPESRSCSEAAIPEAYCTCHNYEEIKEDQGTWRLANLVVDRMNKYLHYHNLQNLCSNLTLRVINSTEVRMDDKDVDLANGMRHYHTKFQVHQNLAEFFATVLYDKQTEELQMNVELISRTNMYGTDSDSNCQMAYVEPFNAEFTKLYTPKNFTRCSNQSDLVTVHFDSILKQYVLHVDEEVLHKLSQSKSNKFACFYQNITYGQSADHYDRMGKKTKFTHDYVVPLNVQGMLVECRSGDEKRILQEDAFSFVQYQKTSPNLDIDRKASVIMYGIDTVSRTNLRRLMPVVFGFLKSPGWYEMMGYNKVADNTYPNIFSILTGYSPNSAKNQICDTTQPGCLDKIPFIWKDMKKNGYLTAYAEDTVFSNIFNYMKPGFLSRPTDYYFRPLLDALEKETIKLYCPGCKMVYCLGRRLANSYIFDYCRQFMQRYVADRPIWGFFWSNHISHDDFSMLSAMQHKIVGDLLNFEKDGSFEHTIMIFFSDHGSRFGPLMRTRESFLEERQPIMFIYLPPWFREKYPRYVEALAQNQNRLSSNFDIYNTLKHIINIEGLVEDTKWSYDCPQCQSLFYELPESRSCSEAAIPEAYCTCHNYEEVQEDHGTWRMAELVVDRINQFLQYHNLQNLCSSLTLKLVNITEVRITESDEHVSLGKGLRHYHTKFQVHQNLAEFFATVLYDRKTEELQINVELISRINIYRPDASCLDDNIQKLFCICLSKLRNNEST

SEQ ID NO: 26170 - DNA, 2555 bp, DROSOPHILA
ttgttagtcatctgctgtgtggagggttgggaatattgtgggtaacttggtcgatattgaacttgaacatttgtattgaatttttgtgctttcgaaatctgattagaatttaaatttttaatacgatattctgagttttattaaaattcaaaatgaatgtgttcttcataaatttcctaattttgtgcaatggtaattaaggatcttatgtctgtaatatcgtgatgagctaaaatattaaataattgtattggtagtttccttatcagtatcttaatagagtctttaatagcctgaataaagaagaaaatccgattggttaccttccaggtgtggttttaaaattaataattgacgtcgtcttcgcgcttcttcgcagaaagctcttaggtttcctctgtatggtgtttccctgaagttcgccagaagtttgtagtttggtgtttgagttttagattccgcgatgagtcttgctttaagggtaggccgatctgcgatggtcggaagtcccgaagatcgtaacctgtccgtccaagttcctttcgatagctccaagtagaatcctctgttgtcggacatcattggtttggtagagcgaaattacgtaatacactctgctgacgaaggtgtgaagggtttctggatcacccttgaatggcataatgtctttttagctgccgacgggcagtagccagcctgaacagtaatcacaattatccggagatcccttaggatagcgttattggagacgtgccaaggaagccctaacgcacgtcgagcagcacttgtttgaatagttttcagcctctccagttggtgtttggatggtataggtgacatgtgggacgcaagcatagctgtgttgtcagtgttcgtttagaattcgttcaaagacttttgaaaggttggaagcaggctttttaggagaagcataagcagaatttgtactagggccagaactccattgcgtgggaggtatttggctgcacggttgtcgatgtcataaggtcctgataggctgattgagtaggaacatccaaaaagatgcaactgcctctcgatgggtgtcgtccgtcagatgcaagggggttaaggtggagaacaattggacaacaaaacctttcgctttgtcactatcctttttgagccctatgccattgttttcatatacgggcgatttgcagagcggctgcttttttattcctgtcgttaatttacagactgagaagtcgctgaccagaccagatccttcgaacagggtgtcgaggttttcctggcgatttttggcaagcatccgatgcaatctgcttgtgacagttgacagggactgtttagttgcaggatcccctggttctatgaactgcctactgaggtgccttttgtggtttaaaggagcttttgcctcaggatttaggtggagttttttaatagttcttgggcctacttgtagcggtggtggcgtagcctcaaagacaatagcagtgaagcagtcaacatacacttcatcgctatcgttgataggcgtattcagcatgacggcatcctcgacgtgtgtcttaaaaaaagagcaatatttgcatgtagaggcagcctgaaagtattgagcctcctggtctagatcaaagagcagcgaaagatagtcagacaaaagctcagtaagaactcttacttgctgtctgaagccccttgaaatgccaaagtgctgggagtggtggccacacggaatgctctcgtacgctaaagcagaaaacaaaatcctgcctctggcacacgttctgtggttgtcccatcacctatgctgagcgttccaatcacctccagcaaggtattttctgccgaggtgagagagaaatgtcaaatgtgcctccgcccacctgtatgctggcggtcagtataccgagacaacatttaatgatcctctgctgcaggcagcttgatgtcgactgcttgtatgtagtcttccaaaagtataaaggaggtttgttgggatattgtagtgtcaggttgtattaaaatatggctctcttaccgctgtgacacccgtgaaagataatttacggctgtgaaaaatcaagccaactgtgacaactaaagcgttggaagtccataatcgaagaatataattgtatattgacatacaaaccagggagatcaaatgtcggcgcagatgccttgtcgcgattgccctcgcaaatcacctatcttgttttcggcatagccaacgcgcctgaaggctatgccgattccgtggctaaagtctgaacccagaattcattcgcacccaatttcaatcgaatactccctcgacagccggcttgtagacgtgtcccacgcaattacaacccacacctgttacaacatatccgtgtgaaatactttgcattgatatcttctcattggaggaaaaggtgtataaacaatttcgaaatctccggtaaatctgcgcgaaggcgtggcaaaggctctccgctatttaactgtcccaaaatcggtattgtcggacaacgaaaggagacttttgtgcccagtcaaaagttaaaaggtttcactccacc

SEQ ID NO: 26171 - DNA, 555 bp, DROSOPHILA
acacacgtcgaggatgccgtcatgctgaatacgcctatcaacgatagcgatgaagtgtatgttgactgcttcactgctattgtctttgaggctacgccaccaccgctacaagtaggcccaagaactattaaaaaactccacctaaatcctgaggcaaaagctcctttaaaccacaaaaggcacctcagtaggcagttcatagaaccaggggatcctgcaactaaacagtccctgtcaactgtcacaagcagattgcatcggatgcttgccaaaaatcgccaggaaaacctcgacaccctgttcgaaggatctggtctggtcagcgacttctcagtctgtaaattaacgacaggaataaaaaagcagccgctctgcaaatcgcccgtatatgaaaacaatggcatagggctcaaaaaggatagtgacaaagcgaaaggttttgttgtccaattgttctccaccttaacccccttgcatctgacggacgacacccatcgagaggcagttgcatctttttggatgttcctactcaatcagcctatcaggaccttatga

SEQ ID NO: 26172 - protein, 177 aa, DROSOPHILA
MLNTPINDSDEVYVDCFTAIVFEATPPPLQVGPRTIKKLHLNPEAKAPLNHKRHLSRQFIEPGDPATKQSLSTVTSRLHRMLAKNRQENLDTLFEGSGLVSDFSVCKLTTGIKKQPLCKSPVYENNGIGLKKDSDKAKGFVVQLFSTLTPLHLTDDTHREAVASFWMFLLNQPIRTL

SEQ ID NO: 26173 - DNA, 7959 bp, DROSOPHILA
atgccgcaatgcgctagcggtgcaactgaagacaagcctcaaaaatggattgcttcggacattacgttacgttttggtcaagaaagtgcagcggaaatgcaaataaagcaaataaaagaacgatctaacgaatgaggctgcgggggggtgctgcagcagtggttccaccggaatgataatatcccggatgcactgcactgacttttttggaccccccggggccttcagatcttttcagagcttctggttgttgtgctcttatcgtattgtagttgttttttacaaggatttgccttaaaataatactatcaaaaatagtaccatagttaaatgttacgttttatgtataaatatataacatttgtatatatttgatataaatatatatggtaggtatattgacgtatggtgcatacgaaaacatatgcattgcaaagaacgtgaatattatcccgttgccggaataataatatgtatctaaaaatatatttatatgctatatataaggtatatatatatttaaatagacattgaatcaaagctttgattacgcgtttcgtgtgttttgttttttgtttgtttgttgtcgtttctgttctggttgcttgttgtttagtgttttgttaaacaaaacaaaaggtgaaactatttaaataactattttatgggattgctggcgggaaagtgggtgtgtgtgtgtagtgtgggtgtttgtgtgtttcaacagattttgatttcagtgtgttcaaacaataacagtttagttaacaattaaaaaaaggcacaagttgcaattgcgcaaaaggccaaaaacactggcgtttcacacagtttcacataattggcacatgctcctctcttgtgtttcatgtttctttgtttgttgttatgtctggggtttctttctgttcttctggttgtttgtttgctgcccttgcgtttgaggtatttgtcatctttggaaagtctgttgaaggcaaccaagttgttgttgatgttgttctggttgttgttgttgtttgttggttggtccggtctggtggtggtcgcatataaatggcaggatggtagcattatatatgcctcgacttgaacgtcacgtctacttttctcatcgctccttctcactctattaacaacacatctttttttttacacacgcttcgtcagttttatgtttaaatgctactcaactaataattggtaattaaatgtttcgtttaaatgaattctcgtttaaaaggtacgctttaaaattttaaacatcaattatatgcctttaaaattatacgtaggtttatatttaataagatagatataaatgtgtatataaaaattgcgattttgcttgttattattaaatgatgaaaattgtctgtcaaaatacacatttttttcaatataaaatgaacgattagattaaaatttatatgttagcattaaagaaatgtttcttgttttctctctttcaaatctacaatttttaaaagttttcttgtttttagcgacgttgctttcgtagttgttcttgttcttgttgttgtttttgatgttgttgttcattgacatcatataccaacatgatttatatgcaaatatgcatatagacaatgcatgcggtatataagcatatataaatatatatatatatatatatatggtactatatatcgaaatgcagctaaactttttgtttttgtttttctctcagttttgtttgaatgggaaacacaacaacgtggaaattttggatcagatcaggtctatggcaaaaattagaaggtttttatattctgcggttgttgttgtttgctttgtttgattatttctttctgattttgttgctggccaggccagctctatgcggctaaggctctacttagaactgctgatagttgttgctattgttcttgttttgatggtaattactcgacgtgttgttattgtaataattgttttgagcactactttgttgtttgttgtatttaccataaccgtagtcatatccattatagtagccgccggcatagtagtcgccataaccaccggcaccatatccgccgtagccgccgccatagccgccgtatgatccctgtccgtcccactggttgttgtagcctatgggatggtgtgaaatatatagtttagagccggtttccataagaagcaaaaatgcactgcttcgttagcggctgtactaaccacctcgtcctccgtagccaccgcgtccgccgcgcataccaccgcgtggtccaccacgcataccgcccatcatctggttctccggcttgggcgtcgcacgcttaacatcgacctccttgccggcgatcttctgcttgggcgtcttcagcaaatctgtcaccacctgctccgaatcgaaggtgatgaagcagaatcctttgcgctgcgacttttgcttgtcgaatggcatctccacctcgacgatctttaaacaaaaagaatttaagtaaatcattattggcaaattccaaaaggtctaccgctttagggttacttacattgccgaactgtccaaagtaggtcttaatctcctcatcgctgatctctgtggtgaggccgccgacaaagatcttgccgtgcctggccttggccttcttgggatcgaccttcttgctgttgattatgtgctcatccgcggcgctgactttgtcaatggcctcggtgtttgtaaacacgatgaaggcgaatcctcgggaccgaccggtctggggatctgtcttgacattgatgctctcgatctcgccatatttgccgaagtgatcgcggagttcctctgaaataatagaaaagcaacttgttagcatttgtttatttacttcgttttagttttatacttactctcagtcgtttcccagctcagaccaccgacaaacagtttcctgcgaaagtttaaagattaattggttagattgatggtatcttaaaacatttcaatatagatttagggaaatattttggtaggaaaaggtttatctgggaaaatcaggcacgaaaaataggttgtgtttgatgcgcgaggcaaatactttcttaatttactttaaattttttcttctcttactgattttcgtattggctgcaaaagaatttgatgactgggcaagaatacaaaacgaataaaaaaaactcaccaaatttgaagtgaaaaattgctttagttactgtattgcaatcaaagaattgatcggatagtgtcaaaatacttgcaaactcggaatgagcgaaagagttcgaggagcgagcgagcgatcgatcgagagacacaaaacgagcgaaagatatagatatatagtatatataagatatgcaagagtgaattattaagtttttgttttgggtatgcttaagagtctttgtctgtacaaataacaattaacaattagtctttattcaataggatgagagaaaagaatgcaaaggtttttatgctggattgtggttagttttactttctttatttggctgtttattttattttatatttttttttttttataaaaaggaatgttgaaaaaatatgcagacacttatagtttactatgatgtgtacgttactcattgatttctggactttttggaaagatatctcatcgttctcggcggattcccggcaaatttggaacagtctcatcacacggcggcggaatttcgattgcaatttagtgatttgtgcttcttttttgtggcaattcgttacgttacattcgttcattgtgtttctttcttcgggcgatatataatgtatagtttttgagcttcataaaacaaaacgaaaaaactgcgagtctctttttcactcggtctctctctgtctccgattacttggtacttttttgtttttcttttttttttaggtaatttacaagttatacgttaagagatacaatacaatatatactcgtatacagtttacatatggatccaattttaaatcgagattatttcttgataattttgtgtgttgatagttctatatattggctgactgactgattgtttgtttgttttagttttggatagataaataccatcagcatcagtatcggcggagcggagacttttggagactggagtgtggagagggttgcatatcctccaagtataagtccgccgaatccgaatccgaatccgtaaccgtttgccgggggcaggaatacgaatccaaatccatatccgaatccatatccgtcttgagcatagcttaaaaccctgacctggggcatttcacttctctcaaaacctgccggagaggaacaaggttagttcgctcacaagacaacaggataagctatgattttcgatttaatttctccatttcgtccttcttcctttacggggaataatctgcatctgcttcgtcagcgctggtttcgtattatcgtttaaatgtacagtatcgtgtgacttaagattaaacttagatataaaatgatcataaaggatgggcaaatgaagtgtacgctagacctaaaaaccaaaacgcaggggagcaaacaagaggaccattctacttgatcatcattatctctatgctttaatccatcaaaattatttatcatttataatttacattaattgttcgttaaattaatattttggcgccttggcaactccaaacaacgccggctgtcgctctctgagagtaagagcgcgcaaaagaggtggcgagcgagcgaagccggcaagcaagagaataagtgaaaactgcaaaacacgcacacacctacagaacagcgggcgttaggttggtatgtatgcctgtatgcagccgccattttgggtacaaaactggaagagcacaaaataacaacgaaatagccgaaacaaagagtaatgcgaattaaaaagaatacactgacaaatacaaacataactttttccaacgttttttttcgccacattttttgcaagtgaaaggcaaccgtatgatttgtgttcgtatgcgtcacagtgtgtctgtggggcaacgtgggaaacaaacataacctcacaaaggggagaaaatgtgctcctagcttaagaaaactctggttttcattgcggaaagtgcgtgtgtgtgcaggggaaaacgttgaaaattttccatgtctcccgagactgtgatgatgcattttggcccgaagattctattaatatgactgaagtacagtcgcaccgacacctcacacacacacacttaaacacactccgacgcacgagcgcaagcgagagagaacacaaaaggggtcagacttcccccgcagaaccccgtaaaatccaatgaaactcgaccaacgacgttagctttgcatttacgtaacagagtaggcaatatacactatgtagaagcagaaaatctatggggggcacatgatcatcggttgcccgttgcaaaaataaaaaagaacaaaaaaaaaacgtatccgccggataatggacatacctgtcgtcgtcccgctggccggatgcggccgattggttgtccgaactgccgttggtcgagccggcggcgcccgcatcaccattttcagatcccggaccgtcggcagtcacgtccttggtgaaatcctcgccgtttatttctgtatccacttgcttgttctcggccattttgtgtgttttcgactgatctactaatttcgggggctaggcagcacgatattcgttttttacgcagagccggagatttttatacacactcgccaaaaagtcgcgcgtacgaatgaaatgacgaccggaaaatgataaatgcaaacgacagcgtgtgtatatgggtgcggcgttgccaccttgatgttttcccagtcaagtcgatttggtattattttggtaaatatttgtattgtatttgcttgctctacctggagattgttagctatacatttgccaaggattaaattgggattttctgtacgataccaccccaaataagcctatataaggagctaaatgggcgcgtgacttgtctgcttgcagtatggcagctttgatttatacaatgtacacacacctatgaagagaaaatgaaaagaataccaaaaattttatacaaatattttaaagcccagtttacacaatggacaagttacttggtttataaattcattttagttgtattaaaggtttaaatatttaaataaatattaagtatttcataaacatttataattttataaatataaaaaatacaatgttcattatttactatgtgttgggaacgaaaacaacatttacatacaaagaattgtttaaaatcgaattttcatattaacttcttataggctgaaacatcaacaatattttaaatcatttaattggtttatattaaatatttttattttttgcaaaaatttatacaattttcatattcggatttcccaacaggttataatataacgttattatggtttttatttatttgctatataaaatgtttcctttaaagaaaggtgtttcatgagcttactcaaaaaatcggaaatggctaaaatgaaaataagttttataaaactatttaaaagaaacttagcgcccctaaaatgagcttaattgagctcaaatatgaaaatatcaaattcatcaaaatattctatggaacatactagattaaccaccccaaaaaaagaagtgtgtgcacacccttggaaaagccgccatcattcacacaccaacacacgcgaaaccaagaataaaactgtgcagaggcaaaaaagaggaaaagaggaacgaacgtcggttctcttctcgattcaacacacttgtccaatttcattgcgtttgcgattattttctactcaaaagccacaacatatgcatcgtaacttaattcaacaacaactgtgatcgccaaacatcagaaagcaacaaaaaatacacgtcaagaattgccaagttagttattctcaaaaaaaaagacaaaaagaattgcaacaaactagactagtgtgtgtgtgtgagcgagtgagtgcattggtgtgtgtggctgtgtgttttgtgtgcagcttgcaattttatactgcatttcatacgtttcgactatcgttttgtaaattaaaaaaaccgcataatttcagcgctccactaagaaatccaactctccccgccccccgcaggaagataacaaagaaaagtgctacaaaaagtgccgatttttcggcaaacttcaacccaaaagcaatacacactgtgcattacaaaaaggaaaaataaaaacgaggaaaaatatcgcttaaaaaaggtgagccggcgacggcctcgtgtgcgcggtctagaaaaactagcattttccattttcaaaggggtggcgcatactaggaaaaaatcaacataaaaaatgctaaatgggcgtatattttattattgcggcagggctctatctcttaaatttttttttttaccattttagcggctttttttattatcgcttgtgcataacctaaaaatgtacgaaaaattttgtttttgtacatttttgtttaaatgctgctcttcaactatagctttctttgttcttcctacacacgcggttcgcaagcagaaatagagtgggaaagagagaacccgaaagagcggcgcgttcataaccgaatatgtgtgcgtgtgggtttgccgcaactcattgtgcattttttgttttatcggcaaatgtttatggctaaaatggggcaaaggacacctgcaaacattgatatttacttacaccttttaacgctatttcaagtgtttttgcaaggcagcaatttgatattttggccaagctggagttcattgtatgcggcgccacaaccttgagacccgaacataacctcaatttaattcatgctcctcgcttggcggcttcttttttttctttgccaaattgtatgaggtcatttactcgcgcacacacacacacgtgcaaagttcagtcagccaggatcgcaggcataaaagctggagcacgtgcagggttaaatgtcc

SEQ ID NO: 26174 - DNA, 3365 bp, DROSOPHILA
cgctcacacacacacactagtctagtttgttgcaattctttttgtctttttttttgagaataactaacttggcaattcttgacgtgtattttttgttgctttctgatgtttggcgatcacagttgttgttgaattaagttacgatgcatatgttgtggcttttgagtagaaaataatcgcaaacgcaatgaaattggacaagtgtgttgaatcgagaagagaaccgacgttcgttcctcttttcctcttttttgcctctgcacagttttattcttggtttcgcgtgtgttggtgtgtgaatgatggcggcttttccaagggtgtgcacacacttctttttttggggtggttaatctagtatgttccatagaatattttgatgaatttgatattttcatatttgagctcaattaagctcattttaggggcgctaagtttcttttaaatagttttataaaacttattttcattttagccatttccgattttttgagtaagctcatgaaacacctttctttaaaggaaacattttatatagcaaataaataaaaaccataataacgttatattataacctgttgggaaatccgaatatgaaaattgtataaatttttgcaaaaaataaaaatatttaatataaaccaattaaatgatttaaaatattgttgatgtttcagcctataagaagttaatatgaaaattcgattttaaacaattctttgtatgtaaatgttgttttcgttcccaacacatagtaaataatgaacattgtattttttatatttataaaattataaatgtttatgaaatacttaatatttatttaaatatttaaacctttaatacaactaaaatgaatttataaaccaagtaacttgtccattgtgtaaactgggctttaaaatatttgtataaaatttttggtattcttttcattttctcttcataggtgtgtgtacattgtataaatcaaagctgccatactgcaagcagacaagtcacgcgcccatttagctccttatataggcttatttggggtggtatcgtacagaaaatcccaatttaatccttggcaaatgtatagctaacaatctccaggtagagcaagcaaatacaatacaaatatttaccaaaataataccaaatcgacttgactgggaaaacatcaaggtggcaacgccgcacccatatacacacgctgtcgtttgcatttatcattttccggtcgtcatttcattcgtacgcgcgactttttggcgagtgtgtataaaaatctccggctctgcgtaaaaaacgaatatcgtgctgcctagcccccgaaattagtagatcagtcgaaaacacacaaaatggccgagaacaagcaagtggatacagaaataaacggcgaggatttcaccaaggacgtgactgccgacggtccgggatctgaaaatggtgatgcgggcgccgccggctcgaccaacggcagttcggacaaccaatcggccgcatccggccagcgggacgacgacagttttgtacccaaaatggcggctgcatacaggcatacataccaacctaacgcccgctgttctgtaggttttgagagaagtgaaatgccccaggtcagggttttaagctatgctcaagacggatatggattcggatatggatttggattcgtattcctgcccccggcaaacggttacggattcggattcggattcggcggacttatacttggaggatatgcaaccctctccacactccagtctccaaaagtctccgctccgccgatactgatgctgatggaactccgcgatcacttcggcaaatatggcgagatcgagagcatcaatgtcaagacagatccccagaccggtcggtcccgaggattcgccttcatcgtgtttacaaacaccgaggccattgacaaagtcagcgccgcggatgagcacataatcaacagcaagaaggtcgatcccaagaaggccaaggccaggcacggcaagatctttgtcggcggcctcaccacagagatcagcgatgaggagattaagacctactttggacagttcggcaatatcgtcgaggtggagatgccattcgacaagcaaaagtcgcagcgcaaaggattctgcttcatcaccttcgattcggagcaggtggtgacagatttgctgaagacgcccaagcagaagatcgccggcaaggaggtcgatgttaagcgtgcgacgcccaagccggagaaccagatgatgggcggctacaacaaccagtgggacggacagggatcatacggcggctatggcggcggctacggcggatatggtgccggtggttatggcgactactatgccggcggctactataatggatatgactacggttatggtaaatacaacaaacaacaaagtagtgctcaaaacaattattacaataacaacacgtcgagtaattaccatcaaaacaagaacaatagcaacaactatcagcagttctaagtagagccttagccgcatagagctggcctggccagcaacaaaatcagaaagaaataatcaaacaaagcaaacaacaacaaccgcagaatataaaaaccttctaatttttgccatagacctgatctgatccaaaatttccacgttgttgtgtttcccattcaaacaaaactgagagaaaaacaaaaacaaaaagtttagctgcatttcgatatatagtaccatatatatatatatatatatatttatatatgcttatataccgcatgcattgtctatatgcatatttgcatataaatcatgttggtatatgatgtcaatgaacaacaacatcaaaaacaacaacaagaacaagaacaactacgaaagcaacgtcgctaaaaacaagaaaacttttaaaaattgtagatttgaaagagagaaaacaagaaacatttctttaatgctaacatataaattttaatctaatcgttcattttatattgaaaaaaatgtgtattttgacagacaattttcatcatttaataataacaagcaaaatcgcaatttttatatacacatttatatctatcttattaaatataaacctacgtataattttaaaggcatataattgatgtttaaaattttaaagcgtaccttttaaacgagaattcatttaaacgaaacatttaattaccaattattagttgagtagcatttaaacataaaactgacgaagcgtgtgtaaaaaaaaagatgtgttgttaatagagtgagaaggagcgatgagaaaagtagacgtgacgttcaagtcgaggcatatataatgctaccatcctgccatttatatgcgaccaccaccagaccggaccaaccaacaaacaacaacaacaaccagaa

SEQ ID NO: 26175 - protein, 378 aa, DROSOPHILA
MAENKQVDTEINGEDFTKDVTADGPGSENGDAGAAGSTNGSSDNQSAASGQRDDDSFVPKMAAAYRHTYQPNARCSVGFERSEMPQVRVLSYAQDGYGFGYGFGFVFLPPANGYGFGFGFGGLILGGYATLSTLQSPKVSAPPILMLMELRDHFGKYGEIESINVKTDPQTGRSRGFAFIVFTNTEAIDKVSAADEHIINSKKVDPKKAKARHGKIFVGGLTTEISDEEIKTYFGQFGNIVEVEMPFDKQKSQRKGFCFITFDSEQVVTDLLKTPKQKIAGKEVDVKRATPKPENQMMGGYNNQWDGQGSYGGYGGGYGGYGAGGYGDYYAGGYYNGYDYGYGKYNKQQSSAQNNYYNNNTSSNYHQNKNNSNNYQQF

SEQ ID NO: 26176 - DNA, 2458 bp, DROSOPHILA
aaagcgtgccaaattggcggaggctgtgggctggctaaacacaatcttggagggcagacagttttccgccgccgatcacttcaccatcgcggatctcacgcttttggtgaccgtttcccagctggaggccttcgaatttgaacttcgaccctataaacatatccgccaatggctcgatcgctgcaaggatcacatggcaccgtttgactacgaggaactcaatgccaacaaggccaatatgttggccgatatgttcaaggccaagatgaatcaatcggcgggctaacagttctttaaattagtgttacagtagcgaaaaaatatttaatatttaatatcagttgtgtaagtgttgtattaaataaataaattgttctgaaaacaaggttgtatgttctatatagataaattccttattttattacctaacttagtagaagacttactgcatatcctttcagatctatttttcctaaaatcagttaaaatcagtcccctccagttagatgcacaaagttaataggtatcccttagcccggcctctacgagatatcaaatgtaattttcgtgtggattggcagttaacttaattgagtttcagtctccgaagtgtgacaatctagatgaattgactggttcaaagggggccaaaatgagctgctaactggtggccatagacggacggacgttcacaaaaagatgacatgacacacattttaaaaataccgccacccaaaaaggacgctgctccgaatgtcctcaggcaaatggacgatattaacgtgtgtttggcactttgtttggccaaaaggacggaggaaaaaacgaggtggcagcaaactagcggatgctgatggccgcatcggcacctgtaaaaccccaactgaaatttaatggcacgccaacacaaaaaggcagagaagctcggttttatgcgaggagcgggctatttttataccagacatgggacatcggcagcgctcagctagacgacaggataatggaatccagcttcacagtctcacattggccgctgacaatgccggccgcatccttggctctgggattaaccgtggtcctgctggccaccggaaatggacaatcgcagcaggcagtgaccaacagcaagcagtcgcatttctggctaggtgggttaaaatcaatcactttggagttcaagaagttgcttgatttatattttatgctactagtcttgagtggattaataagagacttttgttaccatccctccgcagattgctcctgccttcacttgtccgagcggaatgccacccaatggggcaggttggccattaatgccagccattcgctgggagccaagaacaactgcctgatgatcttcatcgccggaatggacgacgagctggtggcctttcagctcgagcagttgcagctgcgcgccgggtgagtggcaatgcttccggcgagattccgtgatcgattggacggggtagagggattcgattcgatctcaaatcggcggacagctgccagagacagccatcaaaattgaatccgtcgatggataaggctggcgtccgtcgcggaaatgccgtggccaaatgtggaatggcccaggagatggcagcgagtggccaaatccccaacgcagcccccacctatgcaatgcaatgtaattaaaataccttgcgaaggccatgtgggcggtccgtctttttggtggagccgtggccgccggcacgcctggttatttatataaatcccgcaaatttgtgtcaatttatgcaaaatcgtatgcatccacatttgcgccataaaaataacgcacacaatatttcggaatcgatttgtcaataaaattggagagcactggccaagcacatttcagtggatcttgccgagtggccgagtgctccgccaaacgtatgagtaatatttaagaagcatccgtcgctgggaaaacgcgtccgaatcgctttgaaatcgcgagcaagtcgagtgtcctagtcggtggttgatagtgttccgtgttgaaagtcgtttgttcaatccgtcggtaaatcgattttaagaacgtacttaaatccccaacaaaaaagtggcttaaactctgagaaaaaaaaacaggaaatcctagaataattaggctttcgaaaacaaaattttgataaatttaaaaaaaaaagccagcttcaagattttgtggcattgatatcaaataatatggataagttttttctctgagttaaggtccttaatataaagtattgaaaatatatcaatattttaaaaaaaaaaagttttttaacatagaaagctatttgtaagtgatcaaaagagttggtagtgcaaaaactccgtcaaaatgtcgatggatccatcggtttctctagaggatctggagcgagtgagtgaaagaagttgtggtggtgaaaagctgtcgagaaactacggcaatacaattttcaatacagcg

SEQ ID NO: 26177 - DNA, 350 bp, DROSOPHILA
atggaatccagcttcacagtctcacattggccgctgacaatgccggccgcatccttggctctgggattaaccgtggtcctgctggccaccggaaatggacaatcgcagcaggcagtgaccaacagcaagcagtcgcatttctggctagattgctcctgccttcacttgtccgagcggaatgccacccaatggggcaggttggccattaatgccagccattcgctgggagccaagaacaactgcctgatgatcttcatcgccggaatggacgacgagctggtggcctttcagctcgagcagttgcagctgcgcgccgggtgagtggcaatgcttccggcgagattccgtga

SEQ ID NO: 26178 - protein, 106 aa, DROSOPHILA
MESSFTVSHWPLTMPAASLALGLTVVLLATGNGQSQQAVTNSKQSHFWLDCSCLHLSERNATQWGRLAINASHSLGAKNNCLMIFIAGMDDELVAFQLEQLQLRAG

SEQ ID NO: 26179 - DNA, 7116 bp, DROSOPHILA
cgtcaacggttgtgcactggaaaaataaacagccaatgcaataacaacaacaatgtagtcccctttgctgggggccatcaacatgtgccacatacagccgaggttgtgcgactaccactcaaaagctgaaatgttatggataagtaatgaaccattttttcgtcatattcaaattgaaatatccagattgttagtaaaatctttaaattgtcataaattctccagcgttaaaacgttttaactctttattggccatacttttttgagctatactgtaagtattgttgatatgcaaaaatgaaatgaaaacacgtcattcgcgccgaccatagcttttctgttgctatcgcactggaaactcgggcatcgctgctagctgcgacgccggcagagagttgtttaactttttcccccctgacaaaatcgtaacaaagggtaaagttttgctgtcccgccccatcaaaggtaattacaattgaaagccctgctctgcgttatcgccgagttcgttgcacttgcgaattaacaaaagcagtggcggcggcatgcaagcgaccaacgttgtgtcctgacaggcacgcctccatcgaaacggaagccatatccctattcctgtcgcaagggattcgccggcgaaacgcaacagtttcgattgtaatccgagtctaatgcgctgatttaggtcaacaggcggagtcggcaacagcagcaaaacaaatgctgcttatgccgagggattgcgcccaaaagtacactcgcagaaaaagtcacaagtaggaaaatatgtatatatcttgcgttccacatatgatagatgttaaatatttttttgaacgaaattcccattgttatgtaacccaagaaaatttctctctgtgtccacgtgtgggcttgcatctgctgaatcattggcgatggcaatagcaacaatgattggcttgattgcatgtgcagcgtttcccacacagcgaaatagacaaagccaaaagccaaagtagggtttaatcgagcggcatcagataatcaaattgtttgcacaccgctttcgcaacgctccattaagttcgcaattctcatttaccaatttcagagcgttttaaccacatacacaagcttagtgccgtacacggggtccaaaagaacaatcggggtgcagcataatggtggaattccgcttcgatattaagccgctgttcgcgcagccaatcatcaaggtgacatccaatctcctgccgaacacctttcgcggcgatcggcgtcagtgtttgtgagtattgaaattgtacgcggagtatgatcttaatggctttgatccgactaaccgttacactttccacactcacccacgtatgcacgacgcagagatgccaccagcaaaatgaccgagatcattgaccagctgggccagctgtcggccacctcgcagggactcagcaaaccggtgacaacggcccagcgcctgaggatgtccgacaatcagaccatctatctgctggcagataatgaggcgggtcacaagtaagtaatgccaagtaggaaatatacctcttgatgatgagaattgccttcaatatgattgcaccttagggaacctaagttatgttattatagttaacgcacgttttgaccttttccagtggcgccgtcttaggtctgttgaaggtgggcaccaagaatctctatttattcgacgaagccggaaagacgcgcatggtggagcagactccatccattctggacttctatgtccacgagtctcgtcagcgtgccggactgggcaagcgtctcttccaaacgatgctcaacgaagagcagtggaccgcacgcaagtgctcggtggatcggccgtcggaaaagctactgtccttccttagcaagcattacggattaaagcgaatcattccgcaagcgaacaatttcgtgctctacgagggattctttaacgatggggaatcggggaatggaggtggtaacggtcatgctaacggcaccccgaatggcctgcacatcacaaacaggtgagcagcggattgggagcacaggaggcgtcgcccatactggcgcagtccgcggtaattaaggcgttgctttcgccgctgcaggaaacatttcactttcgggccccagtgggccatttcttttggccccatttgcatatcgtttggaaatcggactaaagatttgtttctttgtttgtttgtttgtttgcctaaatgaagcccgccgatcgataaaacgcggtcggatttgattgataacattgcttaaatggtggcctgttgcttgctttgcttcttaaattctctgtataccatttaaatatagaaaattactaacagaaaagaattcataatgtaaatcttatagcttaggttttcattatgatatggttataccaagctgcttcattgatatatatagtatatacagagataataatctaggccattccttattctaaatgactaatgatgcttaactctttctccacatgaaacgctaactgttaaccaatgataaccaacgataacatcacatcgacaacagtcctaacacacacctctttggcgctacttacctgggcgaggattctaaccagcgacgtggttcgcagcagcagacaacaccgaatgcacgactgcagcagataacacagatctctccgtccggacgatatggggctaaacgtcccacctgcagcatggccgaggtactgagagatgctcctcaagcgtaaggatagccatgagggttatatttcgatattgttggcttatatcattccgttgaaagctaaatataattatttgttaatataataatctagagttagggaaatcaagggaattgccagttaattggttaattgggtgacccatttttttgttgctagaaatcaaaaagcattcggatggaaaaacataatcctagttggccaagctctccaactttcaatctgtcagagtcaagatccccaagcgactgtggatttagctcagtttaaatttatacatcccagcggtcggatagctctttcgacttccttcctgtatacaaaaatatatttgtattttgtacacttttttttttgtaactgaaaaaaaatcatcaactactttcctcgcgatttgtgctgaatttttcgtgcggcttgctaattttcagtgatttaatttatggatgccaaacgtggtaatgccaccggggcacgccaagtcggtggtggtggtggtggtggctatcatgcctccaagacgagcgttgctgtaagttggtcgactaactaacactcctcgagatgatgactgaataacttggtttacagtcacgccatgccgctggtggtggagtagcaccggcagtgggtcgcaagcaggtcagtcaggtcagcctgacgcccagccagtcaaggaataccaatgccaccgaaaatgtaagatgctgctttccgcattcggaatcattaacccaaacgataaatcacagccactcaagagtccattggacgctttaagccgcagcggccccgtacgcaatcagaatcccttccagcgtcgctctggcttgcaggatgtcgatgaggcttttctggcatccaacatttttgctcgaccgtcccgtgtccgccattctggacttgatcgggagatcatgccacaggccgcagtaggaggagcagtagctggtggacagcaagcatcgcctcccattcccacccagcagcagcatcatcaacagcagcagcagcagcagtatcagcagatacccccagtggatgccgtgccacagcagcagatggctccgccggcagtggtgccacagcagcagcaaatgcaacagcagtacgtgcaacagccggctgccggtcagccgacacgcatggatccaccaccttcgggacgagctcatgtccatcaacagcaagtaccacatcagcagcagcagatgcagcatcagcaacaaatgccaccgcaaactggctacgagcagcagcagcagcaagtgattcaaccagatgcacaaatgcagaataaatatgcaaaccagcagcagcagcagcatcagttgcagccgcaacatcagtctcctctgaatggatatgtaaatattactacgttcatagacaattttcgaagaggttaaccaactacacacacctgacccacagccctctcagccgccgaatgcggttgctccgcaggcaactatgccaaccaccggaggaggagcagcaccagctccaggagcaactggcggcagtaatgcacccagagaaaacgctggtggctctgctgcaccggcggaagccgagatgtgcaccacatgccccaactgccagaccacgatctatttagtacggtccccggaacttggacacggcgatgccggtttacctgtccagtaaatgattaaatctccgccgagtgaaatgcaccaaattctaagtgcatacttctgttgtttcatcatgttttgttttaatgtatcgacattttctgaaggaatcgcaacttcaaagaagctccttttaaactggaccgtaatataatattgggacgaatgtgtgtaaattgaacaattcccaataaaacaaattagagagttgtaatttagccggttaaatagagtgggtggtcaaatggggtggttatatcagcaccaaaatcttaggggttgatattttggctgcgtgccaagtggtttttttttttgtttggggtaacaaaaagtatattatatatagtatacatattaagttgtagagctggcaagtaatagagaaactcgttgaattttaggtcccacgaatgggctattaatataagttaataggccgatcttatctgaaattattttcacctcgaatttgacccaataaatttctctatttccagataattcatgccggcaactcgaagggcggaaatggcaatggcagtgcagaagcgaacaggtaaaagcgcttaattatttaattaattaatatcaatttccctggcattatcattttgtgtgtttggtcttcatttgggtttcattttgttctttttcgtttgtctttcagaatcaaatagacaaagccagtccacaaaaattgcacacggctgcttcacataaaagaatataaatagaaatcgacactagataaactgatatatcaactaaataaccattgtacaaagctttgattttagccaattatttatattttcgcctagttaatttataaacaaccgatgaatttacttaatgtacaagtacaaacagaagaagctgcacttgccgcatgccaccacccaccaccaaccacccacattgcaacacaagaaataaagaaaaatatgaagagtatcagcccactaaatcggatccgttacacaagacacacgaaaatacctgacaaattgtgattacaacatatataacttatcatttaacatttaactacatacttgttggtcgtaacttatttcgttttttctcgagcaataaaatcaattgaattcaatgaattcaggtgtttctcagtgctgttattatattgtagttgttaagtaaagactagttttaaccgctttgaaaactcttccaacagtggcaatggtaatcacgatattccagagattgccgagcaactgcagcgccagagcctggccgacttggaagccaacagctatgagccggagccagaagttgaaccggagccagagcctgagccggaacccgaacccgaaccggaggtgattacgccaccatcaccgccgccaaagagccacactccgactccaccatccgtgcgatcgcccgaggtggccgagagcattgtgggcgacaaccggagagctccggctttccagctgagcaagcagcacacgggcatgaagaatcgctcgtttggcgtcggaatggccgtgatgcccagcagcaagatggagttcgatcagatggagcgcgaagatttcggcgtagtgaagatcaaccgtccgccgggtcatgaagtcacctcgccgggccaggacaatacggatgccatgtccaccgtgtcctccggcggcggcggcctcaccgatcagggctactacgatctaaagttctatcacaataagttgtggtgaagtcgaagtcacaaaccagaaggcacgcaatatttgctaacatcttttgtacgtgtggcataagcataattaaacaaaaatctaatctagtctgtaagattgtattgtctaatcaaaataacacaccaaacggttcctgtacttcagttcgatgatttcgttgtgagcttcttctccgacttttgttgatttgttcatttgttacaagccacgcacaccgaagagcatccgtaaactaaactagagcctcacaattaaacgttaacaatagcaaattgaaatatacgtagattaattgccgccggtactgagctagataattttacaacacatactcgtctttggttgaaaagatcctttattaataatttcgctttgtactgtgaatttgcaatagcccttaatgttatccagcccgtgtgtatcttccaattacagaaaacgagaatatttcgaacaaatctatgccgagtacatgctatagggatagcgccagttggccagaatgcatcttcataaccatacttaaaatttcttaaacattgtctaacatttagttgatagaacaaaacccccaaaatgcaaatagatattaaagatgaagatatacaaataaagcacaaaattttgtcgactctatttgccaagtgaaagagactggctttccattttatctgcaatacaattatgtacgtttacacacacacatgaaatggaaatctacgggctgatctgtggtgctgaaatcagttaggtagcgctatcgttggtgctgctgctgctgctgttgatgcttaactattgctggacgtgggcccctcctccgtctgcccttacatgtagataaagttgaatctgcagtgaggaagcgtatgtatatgtaagtggggcggcaatctataaacttcgatatgcgttacgaacttacctgcagagggcctgcggcagagatgagataatgggtccatatccttgcgagttgtcgtatagctcgaataat

SEQ ID NO: 26180 - DNA, 1552 bp, DROSOPHILA
tttaatcgagcggcatcagataatcaaattgtttgcacaccgctttcgcaacgctccattaagttcgcaattctcatttaccaatttcagagcgttttaaccacatacacaagcttagtgccgtacacggggtccaaaagaacaatcggggtgcagcataatggtggaattccgcttcgatattaagccgctgttcgcgcagccaatcatcaaggtgacatccaatctcctgccgaacacctttcgcggcgatcggcgtcagtgtttagatgccaccagcaaaatgaccgagatcattgaccagctgggccagctgtcggccacctcgcagggactcagcaaaccggtgacaacggcccagcgcctgaggatgtccgacaatcagaccatctatctgctggcagataatgaggcgggtcacaatggcgccgtcttaggtctgttgaaggtgggcaccaagaatctctatttattcgacgaagccggaaagacgcgcatggtggagcagactccatccattctggacttctatgtccacgagtctcgtcagcgtgccggactgggcaagcgtctcttccaaacgatgctcaacgaagagcagtggaccgcacgcaagtgctcggtggatcggccgtcggaaaagctactgtccttccttagcaagcattacggattaaagcgaatcattccgcaagcgaacaatttcgtgctctacgagggattctttaacgatggggaatcggggaatggaggtggtaacggtcatgctaacggcaccccgaatggcctgcacatcacaaacagtcctaacacacacctctttggcgctacttacctgggcgaggattctaaccagcgacgtggttcgcagcagcagacaacaccgaatgcacgactgcagcagataacacagatctctccgtccggacgatatggggctaaacgtcccacctgcagcatggccgagataattcatgccggcaactcgaagggcggaaatggcaatggcagtgcagaagcgaacagcaacagtggcaatggtaatcacgatattccagagattgccgagcaactgcagcgccagagcctggccgacttggaagccaacagctatgagccggagccagaagttgaaccggagccagagcctgagccggaacccgaacccgaaccggaggtgattacgccaccatcaccgccgccaaagagccacactccgactccaccatccgtgcgatcgcccgaggtggccgagagcattgtgggcgacaaccggagagctccggctttccagctgagcaagcagcacacgggcatgaagaatcgctcgtttggcgtcggaatggccgtgatgcccagcagcaagatggagttcgatcagatggagcgcgaagatttcggcgtagtgaagatcaaccgtccgccgggtcatgaagtcacctcgccgggccaggacaatacggatgccatgtccaccgtgtcctccggcggcggcggcctcaccgatcagggctactacgatctaaagttctatcacaataagttgtggtga

SEQ ID NO: 26181 - protein, 463 aa, DROSOPHILA
MVEFRFDIKPLFAQPIIKVTSNLLPNTFRGDRRQCLDATSKMTEIIDQLGQLSATSQGLSKPVTTAQRLRMSDNQTIYLLADNEAGHNGAVLGLLKVGTKNLYLFDEAGKTRMVEQTPSILDFYVHESRQRAGLGKRLFQTMLNEEQWTARKCSVDRPSEKLLSFLSKHYGLKRIIPQANNFVLYEGFFNDGESGNGGGNGHANGTPNGLHITNSPNTHLFGATYLGEDSNQRRGSQQQTTPNARLQQITQISPSGRYGAKRPTCSMAEIIHAGNSKGGNGNGSAEANSNSGNGNHDIPEIAEQLQRQSLADLEANSYEPEPEVEPEPEPEPEPEPEPEVITPPSPPPKSHTPTPPSVRSPEVAESIVGDNRRAPAFQLSKQHTGMKNRSFGVGMAVMPSSKMEFDQMEREDFGVVKINRPPGHEVTSPGQDNTDAMSTVSSGGGGLTDQGYYDLKFYHNKLW

SEQ ID NO: 26182 - DNA, 4585 bp, DROSOPHILA
actcattgattcattcttatgtttgttattttgttattaaattccaattgatgatgccagtgtctaaataaaaacgaagacctaattttcaaccaaaaatcaggttttctgggcttgtccgtattaaacatttttgataattatttataatatattgttattttttgctggcttcaaaacatcaacaaattgtgtatgataaatgacgatgacgttgttgttgatggcgatcgcgctgtgggaatcagatgaaatgtcaattaagtttgcatttatatctttgattgaagctctaagatttgctttgccattttatgcggaagttaagctcggtcagttcttgaaaaagttcccatgggagcaagttatttgttttttgacaataagaagcgtttatttaaaatggcttattatggcctcaatgattcctaataggcgtaacttactggttataaacttgtttaatatcgtttcattttaaacctggatgacagaaaatgaatttcggttcaaatacaaatattacaatagaaagtatgatatttagctccgataaacatttaacaattttagtattttaatggtgaaatggtaaattccgcgcatgaaaagagatagaagagatgacatatatggaaaccttaaaaacgtaacggttgcttgggttttataacaatcagtcagtgacaggcatttccagagttgccctgttcaacaatcgatagctgccttcggtcgctcgtcactaactttcctttaggcaacggccacactgtctggccaccaaaatcccaaacttaattaaagaattaaataattcgaataataattaagcccagtaacctacgcagcttgagtgcgtaaccgatatctagtatacatttcgatacatcgaaatcatggtagtgttggagacggagaaggtaaggcgagaaacggcgagccgcatggtttcgatttcggctgagccgtggcaggaacaacaaaaacagggttgttgcacaagaggggaggcgatagtcgagcggaaaagtgtgcagttggcgtggctacatcatcattgtgttcaccgattattttttgcacaattgcttaatattaattgtacttgcacgctattgtctacgtcatagctatcgctatctctgtctgtctctatcaagctatctctctttcgcggtcactcgttctctttttctctcctttcgcatttgcatacgcataccacacgttttcagtgttctcgctctctctctcttgtcaagacatcgcgcgcgtgtgtgtgggtgtgttcttctttagctacatatacataaataggagagcggagagacaaatatggaaagaatggaaaaagagtgaattactgcaattaaccagtcgcgaacagttaaatcatatttttgtcggccattgcagtaaataaaccgttggctttccctcttcactttccacctcctttctttgacgttaatttttttcagttaatcgcgccgctgctttgaactcgaacacgaattttagccgcaacataaaataaaatcaagtaactcttttaactcaaatataaaacaacaattccaattctttcaacaggcaatctgtgtttttatgtcagatacgtgcgcgtgtgtgtgtgtgctgtaattccatcgcccctttcgattccgagttcgttaggaacagcattagttcgcctattttagtagtagcctagtccgattttaagtgaaacaggatactccaacaccatatactcaataattagttacaacacccactcaaccatacagcaacaacaagtttaacgagttttttgtattatcattacttagttttttggttaataatacacaagtgaagagcgaactgcaggggagcgagatatcacgaaacaatccaaaatccacacacactcaaacagaaatcaaaagcttcgctctctcgcacacacacgcaccaaccaactatcaactatcacaaacaccgcgacagagagagagcggcaagtgaatcacggcgaatcgaaaccgatccgaacccactccggagccgaaaaagaactgatcctaccatcaaacgcatccaataaacacggccgccaacatgcagagcgactttcacagaatgaagaactttgccaatcccaagtccatgttcaaagtaatactctcagtgcgcctgtcgctaagccaagctaatctaatcttctgattccccttcccatccattgccatcttctcccgcagaccagcgcccccagcaccgagcagggtcgtccggaaccaccaacttcggctgcagcgcccgccgaggctaaggatgtcaagcccaaggaggacccacaggagactggtgaaccagcaggcaacactgcaaccactactgctcctgccggcgacgatgctgtgcgcaccgagcatttatacaaacacccgctcatgaatgtctggacgctgtggtaccttgaaaacgatcggtccaagtcctgggaggacatgcaaaacgagatcaccagcttcgataccgtcgaggacttctggagcctatacaaccacatcaagcccccatcagagatcaagctgggtagtgactactcgctattcaagaagaacattcggtgggtttgctgtttattgcaattctgccaagataacctttactaactgatatctcatttgcagtcccatgtgggaggatgcagccaacaaacagggcggtcgttgggtcattacccttaacaaaagctccaagaccgatctggataacctatggctcgatgtggtaagtgcacaaagaaacgagtggtgagcggatggtctatttatagtgaatgtacattcttgaaatgcaaaaatatagaaataggtgtatgattttgcaatataaattataacttatagaaaatatcagctaaaaatacgctagtgctagcttttgtcttaggaacattcaatagtgagcttatatcataaatatttttcgcatatgagtaactacaactgttttgccttccagctgctctgcctgattggtgaggccttcgatcactctgatcagatctgcggcgctgttataaacattcgcggcaagagcaacaagatatgtaagttttcacgcacacccaacttcagcggaattcctttgtttaacgattaatgctttccagccatctggactgccgacggaaacaacgaggaagctgcccttgagattggtcacaagctgcgcgatgccctgcgtctgggacgcaacaactcgctgcagtatcagttgcacaaggacacgatggtcaagcagggctccaacgtgaaatcgatctacactttgtaggcggctaataactggccgctccttattcggtccgatcccacactgattattttgtctttcatttatttatcgttataagcaacagtagcgattaatcgtgactattgtctaagacccgcgtaacgaaaccgaaacggaaccccctttgttatcaaaaatcggcataatataaaatctatccgctttttgtagtcactgtcaataatggattagacggaaaagtatattaataaaaacctacattaaaaccggatacttttgatctttgattttggagatattttaaaatagaaaaaagttaacctatattgtttttgggataattacttgttgtattactaaaacgagcttgtatcctaatatgggcacctaaagcaaaacttccaaatttggaattcaatttgttgctaaaaatacgttagcaatttctagggtggccaaaaaaaaatgtgtatcgatatatcgataggtttcctaaatagacattaaaataattttagctttttacttatattgttagagtaaatacgtttgtatttaaaaaataagtcagtattttttttttattaacctattattgaattttatatgagtgagagcttttccattcagccaagaacggtcacactgcatgtgacatgtttcaattgtgtaggcgcagtcacactggtcgcgtcgctcgtagatatcgtgtaaggatatgtctccgtgtttagctaaataaaatacataaaatatatgtgcaattctaacaagcatagccatttagcgtagagtagtggaacgaacagctcgtaccgggccagtaacaacaaattaacaagcaaacgcactaaagtttgtcgcggaataaagatataataatagaccagctaaccaacacaaacaaacacacacacggccagaagttcgttggcgttgaaagggaaaaatgaaacgaaatgaaaggagaataacagtgcaatagattcggtttacattgtgcaaaaaatcgaagtagcccctgccaacagggtcgctaaaaataaagaaggcgacagcctctgtttatcgttgggaataaacaaatatatggccagcggaggagaatcataacaaaggcgcaagactagccagcataaaagacaaaggagctctcctcccccgcgtccgccacccccctccctttttggggttgaaaaccccccacgcgttgcggtgcagcatcgccccgactatgcgataccctgcaatcgagtttatagtgctatag

SEQ ID NO: 26183 - DNA, 1407 bp, DROSOPHILA
cacaagaggggaggcgatagtcgagcggaaaagtgtgcagttggcgtggctacatcatcattgtgttcaccgattattttttgcacaattgcttaatattaattttttttggttaataatacacaagtgaagagcgaactgcaggggagcgagatatcacgaaacaatccaaaatccacacacactcaaacagaaatcaaaagcttcgctctctcgcacacacacgcaccaaccaactatcaactatcacaaacaccgcgacagagagagagcggcaagtgaatcacggcgaatcgaaaccgatccgaacccactccggagccgaaaaagaactgatcctaccatcaaacgcatccaataaacacggccgccaacatgcagagcgactttcacagaatgaagaactttgccaatcccaagtccatgttcaaaaccagcgcccccagcaccgagcagggtcgtccggaaccaccaacttcggctgcagcgcccgccgaggctaaggatgtcaagcccaaggaggacccacaggagactggtgaaccagcaggcaacactgcaaccactactgctcctgccggcgacgatgctgtgcgcaccgagcatttatacaaacacccgctcatgaatgtctggacgctgtggtaccttgaaaacgatcggtccaagtcctgggaggacatgcaaaacgagatcaccagcttcgataccgtcgaggacttctggagcctatacaaccacatcaagcccccatcagagatcaagctgggtagtgactactcgctattcaagaagaacattcgtcccatgtgggaggatgcagccaacaaacagggcggtcgttgggtcattacccttaacaaaagctccaagaccgatctggataacctatggctcgatgtgctgctctgcctgattggtgaggccttcgatcactctgatcagatctgcggcgctgttataaacattcgcggcaagagcaacaagatatccatctggactgccgacggaaacaacgaggaagctgcccttgagattggtcacaagctgcgcgatgccctgcgtctgggacgcaacaactcgctgcagtatcagttgcacaaggacacgatggtcaagcagggctccaacgtgaaatcgatctacactttgtaggcggctaataactggccgctccttattcggtccgatcccacactgattattttgtctttcatttatttatcgttataagcaacagtagcgattaatcgtgactattgtctaagacccgcgtaacgaaaccgaaacggaaccccctttgttatcaaaaatcggcataatataaaatctatccgctttttgtagtcactgtcaataatggattagacggaaaagtatattaataaaaacctacattaaaaccgg

SEQ ID NO: 26184 - protein, 259 aa, DROSOPHILA; identical to SEQ ID NO: 7869

SEQ ID NO: 26185 - DNA, 4819 bp, DROSOPHILA; identical to SEQ ID NO: 7867

SEQ ID NO: 26186 - DNA, 1132 bp, DROSOPHILA
gccacactgtctggccaccaaaatcccaaacttaattaaagaattaaataattcgaataataattaagcccagtaacctacgcagcttgagtgcgtaaccgatatctagtatacatttcgatacatcgaaatcatggtagtgttggagacggagaagaccagcgcccccagcaccgagcagggtcgtccggaaccaccaacttcggctgcagcgcccgccgaggctaaggatgtcaagcccaaggaggacccacaggagactggtgaaccagcaggcaacactgcaaccactactgctcctgccggcgacgatgctgtgcgcaccgagcatttatacaaacacccgctcatgaatgtctggacgctgtggtaccttgaaaacgatcggtccaagtcctgggaggacatgcaaaacgagatcaccagcttcgataccgtcgaggacttctggagcctatacaaccacatcaagcccccatcagagatcaagctgggtagtgactactcgctattcaagaagaacattcgtcccatgtgggaggatgcagccaacaaacagggcggtcgttgggtcattacccttaacaaaagctccaagaccgatctggataacctatggctcgatgtgctgctctgcctgattggtgaggccttcgatcactctgatcagatctgcggcgctgttataaacattcgcggcaagagcaacaagatatccatctggactgccgacggaaacaacgaggaagctgcccttgagattggtcacaagctgcgcgatgccctgcgtctgggacgcaacaactcgctgcagtatcagttgcacaaggacacgatggtcaagcagggctccaacgtgaaatcgatctacactttgtaggcggctaataactggccgctccttattcggtccgatcccacactgattattttgtctttcatttatttatcgttataagcaacagtagcgattaatcgtgactattgtctaagacccgcgtaacgaaaccgaaacggaaccccctttgttatcaaaaatcggcataatataaaatctatccgctttttgtagtcactgtcaataatggattagacggaaaagtatattaataaaaacctacattaaaaccgg

SEQ ID NO: 26187 - protein, 248 aa, DROSOPHILA
MVVLETEKTSAPSTEQGRPEPPTSAAAPAEAKDVKPKEDPQETGEPAGNTATTTAPAGDDAVRTEHLYKHPLMNVWTLWYLENDRSKSWEDMQNEITSFDTVEDFWSLYNHIKPPSEIKLGSDYSLFKKNIRPMWEDAANKQGGRWVITLNKSSKTDLDNLWLDVLLCLIGEAFDHSDQICGAVINIRGKSNKISIWTADGNNEEAALEIGHKLRDALRLGRNNSLQYQLHKDTMVKQGSNVKSIYTL

SEQ ID NO: 26188 - DNA, 8005 bp, DROSOPHILA
gcgtgcctccgatggattgctcacgatgcagagcttcatctgcttcatcagctcgtacatttgctccggcggcaaggaagccaccgttttggtgatgagctcgggagcatcctctggttcgcagggctcgccatagggattctccacctggggtccctgaagcagctgctgcatctccatgcgcgacttctccgtacacgcgttgtccactcgcagtgttctgccgccgatctcatagccattcagattccgcatggcacttaaagccgtctcctggtccttgtactcgcagaagccaaagcccttgggtttgccactttcccgatcaaagaccagtctgggggattgagaataggaggtttacagtgagatattgcatggctctaagtagggaactcacttcagtgacaagaccgggcccacttcgctgaaaatctcctttagcttctcctcggtggcctcgtagggtatgttccccacaaaaaccgaccgcatggacttgtccattatactttgttcctgcgccttatctgccatatctgttgtttgttattatttactgcacaaactcgacaaaatcttagcaaacgttgacaaacttgtctaaaaaattccctgcgttccggcttgctgtttcttcttcttccttgaataatttcccttaccagggattcatacttttcatatactttttgggaaataaagcggtatgggacgcaaaatattaaacaaagtgtaataacagatacgcaagccattttattttattttcttatctaaacacctgagaaaataattaacagtattggtctaatttttgggattctcatccattgccatcacttagaaacgtagtatttagcaagaaaatagctaaatgccctgcttagccaaaaataccaccactgctagtgctggtaagttcccgcagcccgcatacgttttgcagcactccaacgcctggtgttgtaatttttcttgtcgcaaggtgaaaacgatttaaacggtttttgatagtgaaaagtgcaccaatatgcacgaattgtacaccaaattgtagatgaaagtggcgtttattcgttttctatgcggcaatagacaaaaaacggctcgaagtgcatgaaaaacgtgcttgaaaatattactttgtgtgtagccacacgcactccaacacacacaaacgcacacacacacagacagagggagataaacgcagcgatggcctcgcagtcgcactcgcacatataaaaagctcgcttgtatattggaagaaggagcgcacaaagcggaagacgagaggaaagatttctgtgtcattgaacgagaaaaagaagagaagagagcctcctggctcctggtcctcctgttccagttcctcctccaactccacttcctcttcatctttaagcggccgcaggtgcaccacgctctttacatttccaaggatacgctctcagccgctctctctctcgatcgatactggtaattagctggcgtcctctctttgtggaagtgtcattccattccatggacgaaacgaaaacgaaatcgatggcaatggctggtgaacaaaagcggaaatatgtgcatttttaaattgtgtgtgtctgtaattatgtgaataataatcagcagaaaaaaatcgtacaataagtggcaagatcagcgacattaacgcacacaaacaagcgcgcgtgtgtgcacactggaaaaaaggttggctggcgattgttgtcgctgcaaactgggatactggaataaatcataatgcatttacgcaccgtgtgctcctcaatttttcgacagtctgtgtgtgcatgtgtgcatgtgggtgttgtgtgtgcgtggtgtgtgtaacctttggcaaaggaaaaatcaatagcaacagacgtagacatttgtttgccgctgtttatgtgcagccctcgcattgtccttcgcccccaaaacaaagagccacccttgcagagatggccaaatcccaaaaaagaaacaagtgaatgttggtctgcagacagactataaataaaagcaaaagttatcgcaaaaggcaagcagcaaaaggcaaaccagatgaacggccaataactcgtcagcaggctgggtctgggtcgttgcctctttttttccgattctgattccgtttcttcctgctgctctggctccccgagagaaaaaagctgctccagaagttgtctcacccatctgcaaccggcattccaatccgccatttccattgcccaaacaggaccttctaatcagaattcttatgttgctctactcagagaatgtggttaatatgaacggattcgaatataagacatggctttactaaatcaatagaatcgatttaaaatggcacctctgatttcgaaaatgtggaatcgactttaagggtgactgtgttgaggttgggtctgctttgtgctagaaaagtttattgactcttgttctctcattttgatcctttgcgatcctcaattattaaatatgccttgtatgtttaattgtacttatttggtagctttctaaagaacaaaataattactggtaaaccaaaatcattataatcatcatattagaaatgcactcgctgttgaaacaattttatttttatcatgcttttattttgttggcttttaaagaaattactcactacaagaaacttccaacgaacgtttttttactgattatttgtgctacccccgatagtaaaacatttgtggttttaattgagttactttcaacagttaggatgcacgatgtgcgaagggttcttccagtccaaatcacctttctataagaaaagtagggtttattattaaattatcagctttataaatttggattggttttgtaaaaagacgcgtttgttaagattaaacattacgcattccgtggatacttgatcacttggatcgccggacggcgcattcttcgcatatcgggtatcgtttcaccgaagacgttgatatcggagcgcagaatgtgcccagggactggtacagtaatttctggcaccaacattctgacattctttatattctccaatgcagctcacccgcgtcgaatcagaggattgagcaagatggacgccaagccaaggagatacgctgttttatgactctgaagggcaaccacgccagtcatccgtcgcactagaaagctagaagccaggctcccagagagcaggagcagccagtgagcaggagtaggagtaggcaggagccacacatagaacaatctaaaatcgtcatcatggtcgacaacagtgtccaatgccccgtgtgcacattgtacctgcatgcgggcatgaatctctccgatcacttggagacccatcccaaggagcaggtgatcaaggcgctggtgcagatgacgatcgttgggaacggtggcaacagcatgggcagcgttctcgctgccgccatgttgacaggaggatctggaggaggtggatccagcggcggcgaagccagtgctgatgagaaaccggccgtcttatcacccccttctggcggcgatgtcaaaccagtcgtggtcaataccatatcagcagcaacagcgcctgtgctgccaccagcaccaccaccgctatcctcctccctcgtggcggcctgctccaacggagccgcctcttcgacaaccagctccacacccacctccacctcagcaagcaacagcagcagcctcagcagcagcaaaccgagcaatccaccgatgaaagcactgaaatgctcaccgcccacaactgaggcgcgagccagcacatccgcacatcccaccacgagcagcgtgtccactttgtaccagccagcgcaggtcactccggattatcgcttcaaccagcagcagcagcagccgcagacgtcgggctttgggcgtggtgtcaccacctcaacagccgcgctggtgattccgcaggtgcctcagcagcacttcctcgccagccatcaacagcaggctcactttccacaccagcagcagtccccgcagcaacagcagcaacattcgcagcatcagcctgctctgaagttcagctacgccacagctttgcccccacctccgccgttgcaggtgagtccgagtcccagaagttatttgtcccgtcttaaagggtgcaatcaagatttaatgcagtacacctttgaaaagaaaggggtaatattatttacgaaaagtattaagaaacaaaattaaaatgtatacccactgtaccctttatgcttatataaatttagtatttattttcgaattgaattccgttcttaagcaactcgaatttctttacagctatttacgcagcaacagcagcagcaacagcagacggttgttccaccgcagacccagcagcaatcgcaccagaaaccacctcccgcctatggagccgccattagtcaaatacgatctcagcacaaccaaaacaaacagcagccacagtcccaaagcgtggccatgcaacccaacctagccctggcaccaacgacgacatcagcggcttcaacttcacacgcaactgcagctgttaagcagcccagtaaacctcatacggaagtattcctgaatcccccaccaccgccatcggcacagcaacagttgcagatccacagtttagtgcaaaatcaaggtcaacaccatcagcattctcacccgcagcagtcgcagccgagccagcagagtcaccaacagccaccgagcttgcagacctacggattaggggtcagcaatagctgcagttcctccaacaacccctcgacctcgggatctggtcatcgtgcgaatcgtcagacaaactcaccgtttggagcactgcttaatgctgcagcggcagtggcctgcgcatcgccggcctgtcccaccacctcatcttcggtattgaggtttgcagaatcaccggtggcacactaccttgagcgggaaaatggtgacttcattgtccaggagacaccgaagcatattgtagagtgtgtggagaaggaagacggcgagttttccgtgatcgaacgcatttatcaatccccgccgagtgttctgcacatacacgatgatgatgaggatgacgaggatgaagaggaggaggacgagcatgatgctccgcccgaggaagaagacggggacgatgagcgggaggagaacagccacagccgtaatatgagcaagacaacgaaaaaggcccgtaagacgaagccgaagcgaggctccaagcgcatgtcggacgaggaggagttcatgagccttagcagcggatgtgagagtgatttggaaaaggagggtaaacaggagcagctaaatgcagcggcatcactaccacctccattgtgcacggctccttctacaagtgctgcggctggagcttccacctccaatctggcggacaatcattccaattccgcgtccaactctgcctccaattcgaactccaccgccactacaaagtccaagaagaatcgaattaccgtactcagcgatgttccgctcaatatgaatgagtacctcgatttgatgggcaacatcgtagcctccagtcgcattggggcaagtcgaccgtttgccgctgtggcgcccataccactcgtcaaggtggagaaggaagaacctctggatgattacgacaacgtggcaatggccgctaatgaagagctggagcaaaagcccagccttgagcatggcaccactagcgtcattcgaatggcaagcacggctgcagcatcgacttctgcaacggcgaccgaaacatctgccgaggatctcactcagccgccgcccatgaaagtcgaggttgaggcgaccaccacattgttgccgcaacgcttttcaactcccgcccagcatcgcgggcctaagaaattagtcatcaaaccaaaacaaacagcaccagcgacagcgacgacaacaaaaaagactgacaccccatcttcccccagcaacaacccatccatatcaagagatctggtgcaagtaaagagtgagacactggaggcgccagcgacgagcagtagcagtagcattctggagaagcacctaaccaccagccgaaaacttttgcatcatcactcggcggtgaacgatgacgatgcccgggtgctgctggagtttgcgaactcgaagcagccgccgccactggccgcgtcgagcacaacgtttgtggttaatgccagtgtaggctttccctcggctggctcagttttcgccagcagcagtaccagctgttccaaagcaccggccaagccgggagaggagtacatcctgccggacaacaacatggacgtggatgagattgtgatatcctcgtcgtcttcctacacctcctctgcagcccaggtgcagaacacgttacagccgccggactttaactttctgtaccaccaggccactacaacggccacgacggccacatacttcaatcccttttccaggcagcagcagcatcatcatcagcagcagcacggcgtcagcgatgccaccaatgcggctactttggcttcgtcgtccagtaattcgttggaccacgagtcgatgaatgctacattccgggtggccaagacccaatcgctgcagtcatggtatcagcaagagccggatcacgatccacagaatcagggtggtgcggaatcgggaactgtcactccctccaatcagagccaggatgtggttagccaccagccaacaaactttaacgccgccctagcggccgtcgattgctgtagcgttgccttggacgaggacgcaaaatatcttgatctagacgcctgcaagcgtgagcagctgagcagcagtagcaatctgccctccgcttccgcgtccacaacgtcgtcgtcgttcgctggcgctggcacggagagcagtttggtgggtggtctgaatatccgaaccgatgaaaagatgcccgccaagggtgaaatttccgaacaggaaagcaactgcgacatcgagaactcctggagtgagtcggtaagttcaatttcatttcggtcattttataacgaaaactaagtataattttgattctttacaggtttatggggatatttcgcagcggtacttcagaaaccagttttctggcggctaccaccctgattggcgacaggactattatccggctcaagatctcagcgctcagctgagagagcataaacggtaagcattgaaattgtattctgtgacgacaaggtataatagtttttaaatctcttaaacactaacagttttgactttaatgctgtcgatgatgaggcttcatccagctcgagaaggagccatcttacagatctcccgacagcggccacctcctccgcatgtacgtcatcagctatgctggcgggtccaccaatagcttcgacatcacgggctgctgctgaggcggcagcggaggcggctgctcttgcccagcggaaaccgcagcgccgcaagctctacaagtgtcctcactgcgaggcgatcttcgaaaagcttaaggagcgtaatgcgcacatgattggcgagcacaactacgtacggcaaaatcgccgtctaatttgcactcagccgcaaatcaatacttcgatgttaacgctacagcaacagatgatagtgcagtcaggtgaggttgaggattccaaggatggcattgtgaagataaaacaggagcagtgccaggaaaagcaggatgttgagcaaatgcacgaccattccgaactattggctgatgtcaaggactctgagctgatgggcatcggcggtgatggtgacggtgatgtagatgacgacattaagccacccaaccagctagatgaaaagcccacgctgccgccattagccatgacgaccccagcggctaaattagcagctttgtatcgaatgctcatcgcctacaacgaatccaagctcggacaggagcgcaacaatcttagcgagctggagcagaaggctatggaaaaatccatatttctctgctatgtctgtcgtaccgacttcccgtccgtaaagctctatgacgcccatctcaccgagcatcccgctgaatgct

SEQ ID NO: 26189 - DNA, 4215 bp, DROSOPHILA
taaacggtttttgatagtgaaaagtgcaccaatatgcacgaattgtacaccaaattgtagatgaaagtggcgtttattcgttttctatgcggcaatagacaaaaaacggctcgaagtgcatgaaaaacgtgcttgaaaatattactttgtgtgtagccacacgcactccaacacacacaaacgcacacacacacagacagagggagataaacgcagcgatggcctcgcagtcgcactcgcacatataaaaagctcgcttgtatattggaagaaggagcgcacaaagcggaagacgagaggaaagatttctgtgtcattgaacgagaaaaagaagagaagagagcctcctggctcctggtcctcctgttccagttcctcctccaactccacttcctcttcatctttaagcggccgcaggtgcaccacgctctttacatttccaaggatacgctctcagccgctctctctctcgatcgatactgctcacccgcgtcgaatcagaggattgagcaagatggacgccaagccaaggagatacgctgttttatgactctgaagggcaaccacgccagtcatccgtcgcactagaaagctagaagccaggctcccagagagcaggagcagccagtgagcaggagtaggagtaggcaggagccacacatagaacaatctaaaatcgtcatcatggtcgacaacagtgtccaatgccccgtgtgcacattgtacctgcatgcgggcatgaatctctccgatcacttggagacccatcccaaggagcaggtgatcaaggcgctggtgcagatgacgatcgttgggaacggtggcaacagcatgggcagcgttctcgctgccgccatgttgacaggaggatctggaggaggtggatccagcggcggcgaagccagtgctgatgagaaaccggccgtcttatcacccccttctggcggcgatgtcaaaccagtcgtggtcaataccatatcagcagcaacagcgcctgtgctgccaccagcaccaccaccgctatcctcctccctcgtggcggcctgctccaacggagccgcctcttcgacaaccagctccacacccacctccacctcagcaagcaacagcagcagcctcagcagcagcaaaccgagcaatccaccgatgaaagcactgaaatgctcaccgcccacaactgaggcgcgagccagcacatccgcacatcccaccacgagcagcgtgtccactttgtaccagccagcgcaggtcactccggattatcgcttcaaccagcagcagcagcagccgcagacgtcgggctttgggcgtggtgtcaccacctcaacagccgcgctggtgattccgcaggtgcctcagcagcacttcctcgccagccatcaacagcaggctcactttccacaccagcagcagtccccgcagcaacagcagcaacattcgcagcatcagcctgctctgaagttcagctacgccacagctttgcccccacctccgccgttgcagctatttacgcagcaacagcagcagcaacagcagacggttgttccaccgcagacccagcagcaatcgcaccagaaaccacctcccgcctatggagccgccattagtcaaatacgatctcagcacaaccaaaacaaacagcagccacagtcccaaagcgtggccatgcaacccaacctagccctggcaccaacgacgacatcagcggcttcaacttcacacgcaactgcagctgttaagcagcccagtaaacctcatacggaagtattcctgaatcccccaccaccgccatcggcacagcaacagttgcagatccacagtttagtgcaaaatcaaggtcaacaccatcagcattctcacccgcagcagtcgcagccgagccagcagagtcaccaacagccaccgagcttgcagacctacggattaggggtcagcaatagctgcagttcctccaacaacccctcgacctcgggatctggtcatcgtgcgaatcgtcagacaaactcaccgtttggagcactgcttaatgctgcagcggcagtggcctgcgcatcgccggcctgtcccaccacctcatcttcggtattgaggtttgcagaatcaccggtggcacactaccttgagcgggaaaatggtgacttcattgtccaggagacaccgaagcatattgtagagtgtgtggagaaggaagacggcgagttttccgtgatcgaacgcatttatcaatccccgccgagtgttctgcacatacacgatgatgatgaggatgacgaggatgaagaggaggaggacgagcatgatgctccgcccgaggaagaagacggggacgatgagcgggaggagaacagccacagccgtaatatgagcaagacaacgaaaaaggcccgtaagacgaagccgaagcgaggctccaagcgcatgtcggacgaggaggagttcatgagccttagcagcggatgtgagagtgatttggaaaaggagggtaaacaggagcagctaaatgcagcggcatcactaccacctccattgtgcacggctccttctacaagtgctgcggctggagcttccacctccaatctggcggacaatcattccaattccgcgtccaactctgcctccaattcgaactccaccgccactacaaagtccaagaagaatcgaattaccgtactcagcgatgttccgctcaatatgaatgagtacctcgatttgatgggcaacatcgtagcctccagtcgcattggggcaagtcgaccgtttgccgctgtggcgcccataccactcgtcaaggtggagaaggaagaacctctggatgattacgacaacgtggcaatggccgctaatgaagagctggagcaaaagcccagccttgagcatggcaccactagcgtcattcgaatggcaagcacggctgcagcatcgacttctgcaacggcgaccgaaacatctgccgaggatctcactcagccgccgcccatgaaagtcgaggttgaggcgaccaccacattgttgccgcaacgcttttcaactcccgcccagcatcgcgggcctaagaaattagtcatcaaaccaaaacaaacagcaccagcgacagcgacgacaacaaaaaagactgacaccccatcttcccccagcaacaacccatccatatcaagagatctggtgcaagtaaagagtgagacactggaggcgccagcgacgagcagtagcagtagcattctggagaagcacctaaccaccagccgaaaacttttgcatcatcactcggcggtgaacgatgacgatgcccgggtgctgctggagtttgcgaactcgaagcagccgccgccactggccgcgtcgagcacaacgtttgtggttaatgccagtgtaggctttccctcggctggctcagttttcgccagcagcagtaccagctgttccaaagcaccggccaagccgggagaggagtacatcctgccggacaacaacatggacgtggatgagattgtgatatcctcgtcgtcttcctacacctcctctgcagcccaggtgcagaacacgttacagccgccggactttaactttctgtaccaccaggccactacaacggccacgacggccacatacttcaatcccttttccaggcagcagcagcatcatcatcagcagcagcacggcgtcagcgatgccaccaatgcggctactttggcttcgtcgtccagtaattcgttggaccacgagtcgatgaatgctacattccgggtggccaagacccaatcgctgcagtcatggtatcagcaagagccggatcacgatccacagaatcagggtggtgcggaatcgggaactgtcactccctccaatcagagccaggatgtggttagccaccagccaacaaactttaacgccgccctagcggccgtcgattgctgtagcgttgccttggacgaggacgcaaaatatcttgatctagacgcctgcaagcgtgagcagctgagcagcagtagcaatctgccctccgcttccgcgtccacaacgtcgtcgtcgttcgctggcgctggcacggagagcagtttggtgggtggtctgaatatccgaaccgatgaaaagatgcccgccaagggtgaaatttccgaacaggaaagcaactgcgacatcgagaactcctggagtgagtcggtaagttcaatttcatttcggtcattttataacgaaaactaagtataattttga

SEQ ID NO: 26190 - protein, 1172 aa, DROSOPHILA
MVDNSVQCPVCTLYLHAGMNLSDHLETHPKEQVIKALVQMTIVGNGGNSMGSVLAAAMLTGGSGGGGSSGGEASADEKPAVLSPPSGGDVKPVVVNTISAATAPVLPPAPPPLSSSLVAACSNGAASSTTSSTPTSTSASNSSSLSSSKPSNPPMKALKCSPPTTEARASTSAHPTTSSVSTLYQPAQVTPDYRFNQQQQQPQTSGFGRGVTTSTAALVIPQVPQQHFLASHQQQAHFPHQQQSPQQQQQHSQHQPALKFSYATALPPPPPLQLFTQQQQQQQQTVVPPQTQQQSHQKPPPAYGAAISQIRSQHNQNKQQPQSQSVAMQPNLALAPTTTSAASTSHATAAVKQPSKPHTEVFLNPPPPPSAQQQLQIHSLVQNQGQHHQHSHPQQSQPSQQSHQQPPSLQTYGLGVSNSCSSSNNPSTSGSGHRANRQTNSPFGALLNAAAAVACASPACPTTSSSVLRFAESPVAHYLERENGDFIVQETPKHIVECVEKEDGEFSVIERIYQSPPSVLHIHDDDEDDEDEEEEDEHDAPPEEEDGDDEREENSHSRNMSKTTKKARKTKPKRGSKRMSDEEEFMSLSSGCESDLEKEGKQEQLNAAASLPPPLCTAPSTSAAAGASTSNLADNHSNSASNSASNSNSTATTKSKKNRITVLSDVPLNMNEYLDLMGNIVASSRIGASRPFAAVAPIPLVKVEKEEPLDDYDNVAMAANEELEQKPSLEHGTTSVIRMASTAAASTSATATETSAEDLTQPPPMKVEVEATTTLLPQRFSTPAQHRGPKKLVIKPKQTAPATATTTKKTDTPSSPSNNPSISRDLVQVKSETLEAPATSSSSSILEKHLTTSRKLLHHHSAVNDDDARVLLEFANSKQPPPLAASSTTFVVNASVGFPSAGSVFASSSTSCSKAPAKPGEEYILPDNNMDVDEIVISSSSSYTSSAAQVQNTLQPPDFNFLYHQATTTATTATYFNPFSRQQQHHHQQQHGVSDATNAATLASSSSNSLDHESMNATFRVAKTQSLQSWYQQEPDHDPQNQGGAESGTVTPSNQSQDVVSHQPTNFNAALAAVDCCSVALDEDAKYLDLDACKREQLSSSSNLPSASASTTSSSFAGAGTESSLVGGLNIRTDEKMPAKGEISEQESNCDIENSWSESVSSISFRSFYNEN

SEQ ID NO: 26191 - DNA, 5956 bp, DROSOPHILA
ccgactatgcggagaaagtagatcccatgatcatggctgttaaggaaccagtactccacttggattgggaaccaggacccttcgattttttcggcgcatataggagaacatacaattagagttacattttatttataaatatatccgagaatatcagaatgtttgtagctttgttaaccgatgaagttcatgaccaccagatgaaggatcacatgagcgaagatgaagtcggcgaaaccgcgttccggcgaaatgccggcaaacacgctcttgttctggggattggcctgcaggcgtaggcacactgccaggacgaaacagctgacggtgctgatgaaaccagataggaaggagttgaacgggaaggttccaaccaggcagcagtaaacaaactggatgatgccggtgagcagaatgtagccgaggtagatgtccaccagcttcagtttcttgggcgtattctgcacgtagtcgttgtagaacttggaaatgacgctcgacagctccaccattttgctattttatgtgatatttgtccggatatttaaggataaaggcgctttttaacaaattaatcgcagacacgtcacaaattgggagagaactcaaaagtaggaccgttcgtctagtttgaaaataatactgatagctttatcgatgaaggcgcaagtacagtgggcactcaataccttgaagtttaataaagaataggtttatatattaaaaaatttttgtgttttagttaaaactaaaacataacaaatcttatagattaatgaccgctatcgattcttttttaatgttgcatatgtttgagaggtaatgttataatttaatttatataaaaagaaacacaaattctttttctaacccgttaataaagttttctatccgattttcactgtaccgccaaatcagcgaattaatcgatagatacggaaagtcatcctcgattgttgtgtcttgctttgcttcttcagtgcttgttttggggtgagaggcaattgttattgcgagttgagttcgaagaaattagtaacgtatgtatttaaaacaccacaaaagggtatgatgtgcgttgcaacgttacaataaacatttgctatccaatgtgcaacagtgatgcagcgtgttatcaaacttcttttatatgaacacaacatgattcattgctgatgttttctctgttcgattcgcagactgggagaagataattgccatagcctcctcccaccacgcaccccaaactcagcaataaatgaactttataatttgattggctcttcgcattgataaaccagcgttgtgaccttcgcaggagcacccatttcattgtcagtgtcaagcgggaaaaaatcaatggaggacctgacacctttgaccaaccttcaacaggtagagcagagccagacacatctggtcatcaaattgcgcatgctgaatgggtttattttgatttcgtatccgtacatctgttaattatgtttttgtttcagttttagtttcaacattatcatttttccaactgcccaaaagacgcgttcctacaactcaaccatctccagttgagatacatctaatttccgatacagtcagtgtaagtgaaaaagatatagttatgtatctttgtaatgtcgcaccttgttgtgcaagtctgtgatgcaagataaaacgaaaataagttcgtaatgctttgtttgatttctttatggctctcaaataaagatttcttgacataagtcggctgcttgtctggatttaggtagactttacgatttaagcactattaattcctcgctaaataaatagcacacattctatgaccatgtagcacttatatgtaggtcttctaaaagcaagcacactggaattattaaatctattttttaaagctagtgttaaagtaagaaaagcatgattacttgtcaaaatggcaatataaccagaatactgcatgcatgatacataaatatgcaaatgatatcaacgctagaatgattcgaacctatgtatcatttatgtattatgtatatctctcattataatttgtatttgttaagttaacactttgatttcacgtttatttgcgaaaactttcttctcgccttatatgttcattcaagaaatttatcagtagtattaaatatcacaataatgcaacttgagtaattccgtttgctgactcaagtcaataatctgaatataatgggtggatatttgattcaccgtctggatacacattatataattgtgatttatggtatgctcgctggcttcgcaggagatatgcgggtcttatctctacgtatggattgtttttcgcgacttgttggtgttttcgactttaaagctatactctagtgggagacgaactcgtcaatatgatatcgacttccgaagcacgcgtaatcagacccatatgcaaagtaatgaaatgatcacattaatcgtactttgagtcaagtccaaggctaacttggactatcagcatggtcgaaattttccactctactccgcccggcacgcgatcactgtccactatgcaacgcactatctgcacctcctattgttataagcgtggaaaactgagtcagcggaaaatttccgaggcgaaaagcgggcgtctcaagttgcactcttagtttgtttcgtgcagccggagagggcgcatcataaaatccaacgctcttagttacttacctacccctgtttccagattcccgagggagcgccgcgcaagaaaaagatgacggaacgacagccgttgctcctccagagcgatgcctctgactacgagggcagtcgaggatcggcagcacgacccgtgcgcagctctccgccggacaacactctcgtcaacgtgcacagcgaggacagcttagcaggtgagtttgtgaccaggtcaaaatatgttattacaaagtaaattgaggtatgacgagaaacttataattttttcgcttttttctgtgagtgcacgcagcagcctctggatcgggagatgatgaaattggatcgacggataagtcctataaccccacccatcatcgcgacctggagcatccgacgtccaacttcgataccctggttcatctgctgaagggcaacattggtacgggcattctggcaatgccggatgcctttaagaacgccggactttatgtgggactctttggcacaatgatcatgggagccatctgcactcactgcatgcacatgctggtcaactgctcccacgagctgtgccggagattccagcagccatcgttagatttctcggaggtggcatactgcagttttgagtcgggacctttgggactaagacgatactccatgttggctcgacgaattgttaccacgttcttgtttatcacgcaaatcggtttctgctgcgtctacttcctctttgtggcgttgaatatcaaggacgttatggatcactactacaagatgcctgtgcagatttacctgcttataatgcttggacccatgatcctgttgaatctggtgcggaatctgaagtatttgacacccgtttcgctggttgccgccctgctcacagttgccggactggccattacattctcgtacatgctggtggatctgccggatgtgcacacggtcaagccggtggccacttgggcgacgttgcctctatattttggaaccgccatctacgcgttcgagggaattggtgttgtcctgcccttggagaacaatatgcgcacacccgaggactttggcggcaccacaggtgtcctcaacacgggcatggtgatcgtggcctgcttgtacacagctgtcgggttcttcggctacctgaagtacggcgaacacgtggagggcagcattaccctaaatctgccgcagggcgacacgtaagtccttaaactttccattgctaatcggttttagttgtaagacagagggatttaatatttctcatgctgatatacataatctacatgctcttgctatttgaaaagcgctattcgaaatattgatagttcagatagttaagatcgttattaactttactgtctaaataattttaaattacatgataataaagctagcaaaaggtgttataacaatttttaatgatattcccagactgcaatactaatattttaattgtcttcctctttacatatttagactttcccagttggtgcggatttcaatggcggtggccatcttcctctcgtatacgcttcagttttatgtgcctgtgaacatcgtggagccctttgtgcgaagtcatttcgatacaacgagggccaaggatttgtcagcaactgtgctgcgagttgttctggtcacttttacctgtacgcatagatagtcaatatttaaaatgttccaattatcatcgtattttatttcacagtcctgctggccacctgcattcccaatctaggctccattatctcgctggtaggagccgtcagcagctcagctttggccctaattgcaccacccataattgaagttattacattttacaacgttggctatggacgcttcaattggatgctatggaaggacgttttaatcctgatctttggactctgtggctttgtgtttggcacctgggccagcttagctcaaatcctgaacgacagaacccactgagtttaatcgaaataagcgaatcgaaaacagaacctggctagttctgcctacaaatgtgtgcgaatttatgacgaaggctttatgtagttacactcagactacgaatatgtttaccattagttgtttaccatttcccaactggtatcggtccagtccagtggcggtgctttagtgtgattaatttatatttatggcaaattagttgcatttttttttgttgttatcagccagctgcaatcgtaccagacaataactagcattttaagtagaaagtttttcaacatttgttcagtttgtcagttggagattatttctgtgttaactcgatgaccgcacaatgccaaacgtgattttacgtagtattcttaactaaattattatttagcttttactatgtagtctaggtcggggcagatcattccaaagcaactgctaagaatttcccaaaaaccgaaattagctaatgttatctgcatacttttatcgttcgattatttgtaattatacaactataaatacatatatatgtatacccctagccgtactggtcccgaaatgggaccttcgataaagttttgtaaatacatcaattcggtgtatcaacaaatgttctttaatagttcaatcggtaacaaagacaataattaatataatgtttataaaaatcagtacaattgatgttatttagtattcctaccacagggcttgaatggtcactgggaatgggattccattggaattagccactctcaatggactcgatgagagcagaatcagtccttgagctcgtggaccgttcctaatctgcttggtcaggcgagcgggtgcctgctggacaggctgaacttcctctgcatccggatcgggtgtaaagtcttgcggctcctcatcgctgggtagctgctcaactgcatcggtaggcggtgggccgtaggtcagatccggtggtccatatgtctgatccggaactccttcctcgaatggcacctccggcttcagttcgtcggcggatggatagggtgctgcctgctgtttctgaagttgctttgccagccgtgctggctgagctgaaaccgctccaagtgccaggaccagaaccagcaaggaacaggatgacttcacgtagctgcgcatattggctttgacgcaagagatacacgaacttatgagggaaccgttgttgattgattgataactttgctgttcattacctgtctttttatatgtttttcgggtactacgtggatggattaatcaatttttggtggtaaaacgtggtcgtttggttaatgactgggtcatccagtggcccttgtggtca

SEQ ID NO: 26192 - DNA, 2140 bp, DROSOPHILA
gcaattgttattgcgagttgagttcgaagaaattagtaacactgggagaagataattgccatagcctcctcccaccacgcaccccaaactcagcaataaatgaactttataatttgattggctcttcgcattgataaaccagcgttgtgaccttcgcaggagcacccatttcattgtcagtgtcaagcgggaaaaaatcaatggaggacctgacacctttgaccaaccttcaacagttttagtttcaacattatcatttttccaactgcccaaaagacgcgttcctacaactcaaccatctccagttgagatacatctaatttccgatacagtcagtattcccgagggagcgccgcgcaagaaaaagatgacggaacgacagccgttgctcctccagagcgatgcctctgactacgagggcagtcgaggatcggcagcacgacccgtgcgcagctctccgccggacaacactctcgtcaacgtgcacagcgaggacagcttagcagcagcctctggatcgggagatgatgaaattggatcgacggataagtcctataaccccacccatcatcgcgacctggagcatccgacgtccaacttcgataccctggttcatctgctgaagggcaacattggtacgggcattctggcaatgccggatgcctttaagaacgccggactttatgtgggactctttggcacaatgatcatgggagccatctgcactcactgcatgcacatgctggtcaactgctcccacgagctgtgccggagattccagcagccatcgttagatttctcggaggtggcatactgcagttttgagtcgggacctttgggactaagacgatactccatgttggctcgacgaattgttaccacgttcttgtttatcacgcaaatcggtttctgctgcgtctacttcctctttgtggcgttgaatatcaaggacgttatggatcactactacaagatgcctgtgcagatttacctgcttataatgcttggacccatgatcctgttgaatctggtgcggaatctgaagtatttgacacccgtttcgctggttgccgccctgctcacagttgccggactggccattacattctcgtacatgctggtggatctgccggatgtgcacacggtcaagccggtggccacttgggcgacgttgcctctatattttggaaccgccatctacgcgttcgagggaattggtgttgtcctgcccttggagaacaatatgcgcacacccgaggactttggcggcaccacaggtgtcctcaacacgggcatggtgatcgtggcctgcttgtacacagctgtcgggttcttcggctacctgaagtacggcgaacacgtggagggcagcattaccctaaatctgccgcagggcgacacactttcccagttggtgcggatttcaatggcggtggccatcttcctctcgtatacgcttcagttttatgtgcctgtgaacatcgtggagccctttgtgcgaagtcatttcgatacaacgagggccaaggatttgtcagcaactgtgctgcgagttgttctggtcacttttaccttcctgctggccacctgcattcccaatctaggctccattatctcgctggtaggagccgtcagcagctcagctttggccctaattgcaccacccataattgaagttattacattttacaacgttggctatggacgcttcaattggatgctatggaaggacgttttaatcctgatctttggactctgtggctttgtgtttggcacctgggccagcttagctcaaatcctgaacgacagaacccactgagtttaatcgaaataagcgaatcgaaaacagaacctggctagttctgcctacaaatgtgtgcgaatttatgacgaaggctttatgtagttacactcagactacgaatatgtttaccattagttgtttaccatttcccaactggtatcggtccagtccagtggcggtgctttagtgtgattaatttatatttatggcaaattagttgcatttttttttgttgttatcagccagctgcaatcgtaccagacaataactagcattttaagtagaaagtttttcaacatttgttcagtttgtcagttggagattatttctgtgtta

SEQ ID NO: 26193 - protein, 483 aa, DROSOPHILA
MTERQPLLLQSDASDYEGSRGSAARPVRSSPPDNTLVNVHSEDSLAAASGSGDDEIGSTDKSYNPTHHRDLEHPTSNFDTLVHLLKGNIGTGILAMPDAFKNAGLYVGLFGTMIMGAICTHCMHMLVNCSHELCRRFQQPSLDFSEVAYCSFESGPLGLRRYSMLARRIVTTFLFITQIGFCCVYFLFVALNIKDVMDHYYKMPVQIYLLIMLGPMILLNLVRNLKYLTPVSLVAALLTVAGLAITFSYMLVDLPDVHTVKPVATWATLPLYFGTAIYAFEGIGVVLPLENNMRTPEDFGGTTGVLNTGMVIVACLYTAVGFFGYLKYGEHVEGSITLNLPQGDTLSQLVRISMAVAIFLSYTLQFYVPVNIVEPFVRSHFDTTRAKDLSATVLRVVLVTFTFLLATCIPNLGSIISLVGAVSSSALALIAPPIIEVITFYNVGYGRFNWMLWKDVLILIFGLCGFVFGTWASLAQILNDRTH

SEQ ID NO: 26194 - DNA, 2774 bp, DROSOPHILA
taactgccttaactgttcgctggatgggatgaaactggaagtcggcataccaacggtcctcatcttctttgggatcgcccacttcgttagggatctgaatctttaacagcggcgaatccgacaaaaactgattagaccgacggggagtggttttgggacgtggttgcttttgaaagtagtagcttttgcgcgaagacgatggtttctttttagttgtatgcgaggaaagaactttgtccagagctcgaaatgtagccggtagatccagtggcatttcttcatctatattttgtggataggtcttagaattcggtattatgatggaaggccgagcagagcgattctgaaagagggcaaaagaccaaaacttctttttaatataatagttttaactctaattagcagcttacattattaatctgtcgatttttcatctgtatcttggtttgcccacataaaacaccgggtagaggtagcactttgtctagagctcgaaaagttgcaggcaaatccagataggcgatggccgagagcagaagttgtccattaactgagtactttccgcacgaagtgccggtgtcgtagtgctcctggaatagaaagtagagaaaggccagtttctggccacgactgaaacgccaaattctatggagttcacgatttctgatcaaaggttgcactcccaggcgcagcagacaatcccgaatggacctaatatcgaattgcagtgccgttcccagctcatcggccgcctgcatctgatcgagcgatagaccacgataccaactagccacgggtagtcccaaatcaacacctgtattctttaccatgttcctagcaagtggataaattcacaagtaaaacgaagaacaaacaatttaagaaacttggtaaattttgtgggtgttgcaaatagcttgaatgagtgaatttggaaataatactcagtgcagacctgtctacactgtgttcatatacaataaaatcattaaacgagctgtttttttttattcaagctacaaaacaatattttctttatgtttaggcccactggtctgcttggcaaacgaaagattttttttcaaaacactcatcataggacatctctttagcatagatgtaaacgcattgattctttttttttgtatcctgattactcttccatttgacaaagaagggttctcgtccggttagggtggagacgaatgtgccgccattttcaaccagtttggatatatctatccagtagctattgttgggtgctaacgccaagatgccatccagctccatctcatcctggatgttcgccagatgaccgttcattttacgacatgtgacatatgcctcaaaccaagtttgcattagattcttctcgatgtgaaaatgtctggagccaactttctcgaatcgtctcatcttgatgttgttagacgctttgatgttggatgcatggtgtcgcattataatctttaacggctgaagctggatttccatctgggccttaaactccagcaagctacttgctatgcgcatttccattgtatcaataattgccaatgtttcgttttgtttaagcgcgttgtatgtaaaccaataattctggttaataccaatctgatcgattgtattttgcggcgtttgtggacttggcaatgtagcctttccgttcggaatgtcctgctgcccaccactgagatcccaaaggttccataatgccaacaggtataagaggttagatgcgtacatgtccagtttggaagatttcaagcgtgtgagatccaatctggctaaagaacttccaatgagctcaactaattttgtcacgctttttaatgataatgtaaccgttttaaagcatcactgtgaaaagcaaaaaggctggaaaaattaaaaaaaatgaaaatctactatggtgtattgaaaaaaaaaaatataaaatgcctaaagttaatagctttattattaaagacacattgcaattttgatgatttaaaaaaaatacatattaaagtttaaaggagttcaatttttaaacctttattatcaaagtcacatttaaagtttaaaatagttctaaaaatcaatgctcgatattcaggcccattgctcggcttggcaagcaaaatagttatcattggcacaattttcaaagtacatttcattggaattgatatacacgcaatggttatgtatatttgtggccagatttggcttccatttcagaaatggtacatcccttccggatagtgtagaaatccaggacgctccatcgttggcacggctgttgatatctacccagtacttttttttggtttcctctgagaatatttcattcagctccttctcatcgaggatattcgccaggtgaccgcccatttgacgacacgtgtcgtatgcgctatcccagggcatcttcttttgcttttctaagtaaaagtgccgggagccaatcttcttgaatacggacattttgattttgttggacattttaacgttttccatgtagggttcaatttgttgctttagagcccgaagtttagtttccatctggttttgaaaggactgcaatcgcatttctaagcgttgctccatattaccaattctccacaaagttccattttgtcttagcgaattgtaggtaaaccagtgctgctggtgcatatcaatattctcgattgtataatacggcattggtgcttttggcaattcatttgttcctgtggaagtatcctgctttttggcactgacgccccaaaagttccataaagcgaaaa

SEQ ID NO: 26195 - DNA, 774 bp, DROSOPHILA
cacacgcttgaaatcttccaaactggacatgtacgcatctaacctcttatacctgttggcattatggaacctttgggatctcagtggtgggcagcaggacattccgaacggaaaggctacattgccaagtccacaaacgccgcaaaatacaatcgatcagattggtattaaccagaattattggtttacatacaacgcgcttaaacaaaacgaaacattggcaattattgatacaatggaaatgcgcatagcaagtagcttgctggagtttaaggcccagatggaaatccagcttcagccgttaaagattataatgcgacaccatgcatccaacatcaaagcgtctaacaacatcaagatgagacgattcgagaaagttggctccagacattttcacatcgagaagaatctaatgcaaacttggtttgaggcatatgtcacatgtcgtaaaatgaacggtcatctggcgaacatccaggatgagatggagctggatggcatcttggcgttagcacccaacaatagctactggatagatatatccaaactggttgaaaatggcggcacattcgtctccaccctaaccggacgagaacccttctttgtcaaatggaagagtaatcaggatacaaaaaaaaagaatcaatgcgtttacatctatgctaaagagatgtcctatgatgagtgttttgaaaaaaaatctttcgtttgccaagcagaccagtgggcctaaacataaagaaaatattgttttgtagcttgaataaaaaaaaa

SEQ ID NO: 26196 - protein, 234 aa, DROSOPHILA
MYASNLLYLLALWNLWDLSGGQQDIPNGKATLPSPQTPQNTIDQIGINQNYWFTYNALKQNETLAIIDTMEMRIASSLLEFKAQMEIQLQPLKIIMRHHASNIKASNNIKMRRFEKVGSRHFHIEKNLMQTWFEAYVTCRKMNGHLANIQDEMELDGILALAPNNSYWIDISKLVENGGTFVSTLTGREPFFVKWKSNQDTKKKNQCVYIYAKEMSYDECFEKKSFVCQADQWA

SEQ ID NO: 26197 - DNA, 2711 bp, DROSOPHILA
cataggacatctctttagcatagatgtaaacgcattgattctttttttttgtatcctgattactcttccatttgacaaagaagggttctcgtccggttagggtggagacgaatgtgccgccattttcaaccagtttggatatatctatccagtagctattgttgggtgctaacgccaagatgccatccagctccatctcatcctggatgttcgccagatgaccgttcattttacgacatgtgacatatgcctcaaaccaagtttgcattagattcttctcgatgtgaaaatgtctggagccaactttctcgaatcgtctcatcttgatgttgttagacgctttgatgttggatgcatggtgtcgcattataatctttaacggctgaagctggatttccatctgggccttaaactccagcaagctacttgctatgcgcatttccattgtatcaataattgccaatgtttcgttttgtttaagcgcgttgtatgtaaaccaataattctggttaataccaatctgatcgattgtattttgcggcgtttgtggacttggcaatgtagcctttccgttcggaatgtcctgctgcccaccactgagatcccaaaggttccataatgccaacaggtataagaggttagatgcgtacatgtccagtttggaagatttcaagcgtgtgagatccaatctggctaaagaacttccaatgagctcaactaattttgtcacgctttttaatgataatgtaaccgttttaaagcatcactgtgaaaagcaaaaaggctggaaaaattaaaaaaaatgaaaatctactatggtgtattgaaaaaaaaaaatataaaatgcctaaagttaatagctttattattaaagacacattgcaattttgatgatttaaaaaaaatacatattaaagtttaaaggagttcaatttttaaacctttattatcaaagtcacatttaaagtttaaaatagttctaaaaatcaatgctcgatattcaggcccattgctcggcttggcaagcaaaatagttatcattggcacaattttcaaagtacatttcattggaattgatatacacgcaatggttatgtatatttgtggccagatttggcttccatttcagaaatggtacatcccttccggatagtgtagaaatccaggacgctccatcgttggcacggctgttgatatctacccagtacttttttttggtttcctctgagaatatttcattcagctccttctcatcgaggatattcgccaggtgaccgcccatttgacgacacgtgtcgtatgcgctatcccagggcatcttcttttgcttttctaagtaaaagtgccgggagccaatcttcttgaatacggacattttgattttgttggacattttaacgttttccatgtagggttcaatttgttgctttagagcccgaagtttagtttccatctggttttgaaaggactgcaatcgcatttctaagcgttgctccatattaccaattctccacaaagttccattttgtcttagcgaattgtaggtaaaccagtgctgctggtgcatatcaatattctcgattgtataatacggcattggtgcttttggcaattcatttgttcctgtggaagtatcctgctttttggcactgacgccccaaaagttccataaagcgaaaatggagaaaatgcaagttgcgtacttgtacatttcgagggctaatagtctgtgagatcaattatttaattcctcctcggactaacccttttttttacacttcccaacgagataatcacccggaacattaaccttttcaagcattaaatactctgttaaaaattcgataaagatccgagaaatctagagatatattctagacttcattcaagcccatcttcccagttaaataccattacaaatgaaccaaaaaaagttaatgaaaaacgtataaactgcaagagaagtttattgcttaagtggatgcttcggaacatggaggataccactgccaaacgctccaatcgacgcagcttccagttttcggatcgaatccagtgttctgctcgcaggcaactagctcggcctgtccggtgctagagcactgccagtagtgggttggatcccagaagtcacgggaaatctctccggagcgtcccacgcaatcgggctcaccattgccatcgggattgcagtcaaggtcggcgtagatggcaacgcagagggtcaggaagagaaggactaaagctgaaacagaattccgctattggcatctcaatggtttcagcgatgtgaggtcatcaatgaaactcacctgctttcattgtggtttgttcgagtgattaataccgaatgcgattggaacgcaacgttcgacattttatagccacctgctatctattccctgacatattgtctgagacaatcggagctatacattctatttcttaaagaacatgaaatcgtttaaaaataatctcatgatcacgattggtatctgtatctcgacaattcgaacatttgacgccgtcgtacaattcgttttcaaacaaagaagtatatttcaccaagtgttgtagtatacttagttatgatattaaaatattattgaacaaaaaatttgcatatgatttgtttgaattgaccggctcctatttagacaatttataccctgtaaaactttacacactgagacacagtgtttttgaaataa

SEQ ID NO: 26198 - DNA, 711 bp, DROSOPHILA
atgtacaagtacgcaacttgcattttctccattttcgctttatggaacttttggggcgtcagtgccaaaaagcaggatacttccacaggaacaaatgaattgccaaaagcaccaatgccgtattatacaatcgagaatattgatatgcaccagcagcactggtttacctacaattcgctaagacaaaatggaactttgtggagaattggtaatatggagcaacgcttagaaatgcgattgcagtcctttcaaaaccagatggaaactaaacttcgggctctaaagcaacaaattgaaccctacatggaaaacgttaaaatgtccaacaaaatcaaaatgtccgtattcaagaagattggctcccggcacttttacttagaaaagcaaaagaagatgccctgggatagcgcatacgacacgtgtcgtcaaatgggcggtcacctggcgaatatcctcgatgagaaggagctgaatgaaatattctcagaggaaaccaaaaaaaagtactgggtagatatcaacagccgtgccaacgatggagcgtcctggatttctacactatccggaagggatgtaccatttctgaaatggaagccaaatctggccacaaatatacataaccattgcgtgtatatcaattccaatgaaatgtactttgaaaattgtgccaatgataactattttgcttgccaagccgagcaatgggcctga

SEQ ID NO: 26199 - protein, 236 aa, DROSOPHILA
MYKYATCIFSIFALWNFWGVSAKKQDTSTGTNELPKAPMPYYTIENIDMHQQHWFTYNSLRQNGTLWRIGNMEQRLEMRLQSFQNQMETKLRALKQQIEPYMENVKMSNKIKMSVFKKIGSRHFYLEKQKKMPWDSAYDTCRQMGGHLANILDEKELNEIFSEETKKKYWVDINSRANDGASWISTLSGRDVPFLKWKPNLATNIHNHCVYINSNEMYFENCANDNYFACQAEQWA

SEQ ID NO: 26200 - DNA, 2219 bp, DROSOPHILA
gttagaggactaacaaaattgtgaaaaaatatccacacatttttcaaaagtgggggcgtgtcaattttgtgcggtttgtgggcgttagagaaggcgtggcaacatgggtcaacaaagttgcgctacgtctttctctctaaaatcgtttgctgaatctcagccttctagcctttatagttcctgagatcttgggtataatatattctttgaaaagtatgtaactggcagaaggaagcgtttaagaccataacgtatatatattcttgatcatgatcaatagcagagtcgatccggccatttccgtctctccgtatgaacgtcgatatatcaggaattataaaagctaaaaggcaaagacgcagcgcaagtttgttgactcacgttgccacgcccacctaaacgcccacaaaccgctcaaaactgccaacaatttttcataattttattggtcgtgtacatttctatcgatgtgccaaaaaactttttgcaacgcccactctaacgccctaaagctgccaagccggtcacaggagatattgcctagatgcacacagatgtcattgctttagcagaatccaattgcgtattaatgtcaagatacatatcaatcaaagagaagctatcacatctatgattttgagaaacttaaatcagtaggaatcgttttttttatgaaaacgacttaaagttttgatggaatactactactaatatcgtgcaccactcgctatagacaatcatgataatgcaattttaaatctttagcctaaaatagagtcgaaaccaagcaaaatatatgttcctgtatatttttagctttataaatgattacattttgcatttccatggcgaacacatatctaatgtgcgttatgtggtgatattccctaagattaatattatttctctcgatctatttaagtgttttaccaaaaataattatacatttaatacatttcttaataaatacatttatttttaggctttagaaaatcgacatgctttggcaaaagcattgtactcaaaaatgtttacatggctggtttcgaaaataaataactgtacaaatccaggacaagatgacgctaaatttcttggagttctcgatatatttggatttgaaaatttttctcataactcatttgagcaactatgcattaactataccaacgaaaagcttcataaattttttaaccattatgttttcgccttagagcaatcaatcgtaagtacaaatgtttatatatcttaaccaagtaatacgataaaatacaaattttaagcttaatagttgttgctgagaaagaacccggagctaaactcctacaaactaaagtcgttaagtccattgaaaagttatgagcaagtaatgacaccactactatttagaccttgatgcttgctaaggagtgtgagaaggatttttcaattattttttgtcatgccgaatgaaattgggatgtaatcgaaatattttatcttccttacggtgaatgcaatagtcgagtttcccgactttcagataacttagttagtgagtagtcagtaccaatgtgaaatgtaaatatacaatgtcaattaaaaaattgttcagaagtgtgggcatgacagttttaggcgtggccaaagtggttttggtacaccggtaaaaattggaaaaataaacaataaaacgaagaaaaatcaaaacattttccaaaagcgtaagtgtaaagttttggcagcgaagacggttggaatgcaataagagtcaaggacggtaagttcgaacgctaattgatggacattggtccccggcaaagcggagagccgtgaactaacggtaacgcgcagagaagtcagtgaaaagcgaactgtgaaagtgtcgggcagtgaaaaacgcgtaggacacagaagaaaggacgagcaatacaagtgagatcaatccttggagtggagaaagaaggaccagggacagtggagtcagtggtcggcaaaggtggtcccaggccgagcgttgccttaacccgtggacgataacatcctaaacctattcgatccggaacgtgttccgttgtcaaggacacacaggacacagagggcaaggcgtcgcagcagacggccatcatcggaagaatccactgtaaaatactcgaataaagctacttaagtcttaagctctttcttttccttggtcgggcaatcacacaaatcatatatttggtcggacgaacacacaa

SEQ ID NO: 26201 - DNA, 219 bp, DROSOPHILA
gctttggcaaaagcattgtactcaaaaatgtttacatggctggtttcgaaaataaataactgtacaaatccaggacaagatgacgctaaatttcttggagttctcgatatatttggatttgaaaatttttctcataactcatttgagcaactatgcattaactataccaacgaaaagcttcataaattttttaaccattatgttttcgccttagagcaa

SEQ ID NO: 26202 - protein, 64 aa, DROSOPHILA
MFTWLVSKINNCTNPGQDDAKFLGVLDIFGFENFSHNSFEQLCINYTNEKLHKFFNHYVFALEQ

SEQ ID NO: 26203 - DNA, 3181 bp, DROSOPHILA
ttgatgcaggcttgccggaaggcaatggcgctcttcaggctcagcaggcagcaggagcacatattccggggcatcttcgagtggtcggtgagcttgaaaaccaaacgagcattagcggtttaaatttgccaatttaatttacacactcacccaaaggcccgtgaccaatgcgatttgcctgaccattttgctgttctcatcgaatatgttaactggattttgcgtgtatattaaatctccacacaaccggcattgtggcgtcatttttaagagttatttttcgagccaaaattccttgctttattaacagctgctgcttcattttgggccattcgcagcgaactgttgttgttgtccgcgtctctgggtgactgccaagcggtggcgccaaaatttgaaaatggcgccttttattcaagggtcgttatggaatatactccaagcatttgcttttcgtggcaaataggaattaccaaatatatttaccacttcaaaaaaagaattaaaaatatatattatacataagttttctgtttttaaatgaaaacgattaattaaatagtaaggtatttaacatttcgaaatgaatggctgtccaaatattacactcttaaagaaactacttcataataggaaaagcaaatgacaaaaatgtaatacaaaaaagttatagcaaacgaagggcaatccagtgccaaaacagtgagaatacgttcaaacatttatgtctaatagatatcctgagcctcagaattatccaagtcgtgctttcatctacatatcccgcatcttataagacggaattaaaaacgatctctaattctttggcgaatcaatgctcttcggattccaggatggcgctggctcttttctggtgagcaaccgaatcgaagtgactccttagcgttgcctttcgggcaaagttgatttggcaaataacgcagctgagagggaaatacacgacttgtattaaatatgcgcaaatttcatatcatttcacttactcaaagggcttaagacctgagtgcaggaacttgtgcttattcaagcaggtcttggtattgaatctcttggtgcactggtcgcattggtacctcagatctctgatgtgccgtattctgtcatagtgttaggaaattgtttatgtcagcgcttttaaagttaaatacaattgcagtaaggacttaccgctcatggctcgacttagctgtacttgtgaaaaacgttgccgagcagaagttgcactcaaacggctgttcgcccatgtggcgcactcgttcgtgtagacgagccagatacttggtgacgaaccgcttgtcgcagaacgtgcatggaaagttcttctcacccgtgtggcgcaccatatgcgtctttaggttgtatggagtcttaaagacccttccgcacttagggcacaccagggattgcattttccgagctgtcctttttgcagggggtacattctcagctgccacatcttctggagctaatgcaaggggctttactaccttaatagagggatacgttgtaagtagtctcagatcggttccaatttgtataaagtttcccttttttgggctttttgcatcgactttgttaggcaagttttcatttgcaaatgaaggagtctcaattaatggatttttatgcttaaatattaagggggtttccgaatcataaggattatgtggttcgtttctcctatcctcatgggcgagatttaaatcaatatcggattcctctgcttttttgtcaaatggatagttttctgaatcatatgattcctccgattccaagtcactggaatccccttctggctctatatcggatacagtgctttctagatcctcatcaagcccagattcccgcctcagcgttgcttcattgtgaactcgttgaatgcgcttctttaacttaatcgatgtgttcaagtcatttaaacaagatgggcaaatatgacgcggctggcgttcattctgttctaactgtaaatggagtaaatgggttatgccattcacgcacacaagaaaccatcaacatacccatattccagtgagatccttgatcttggccagaacttccaggcaaaaaattatcgtgggattcaggtgacagaaacacgaggcgcacaaatggcattgcgaaggctttttcatttcaaacatatgatcatttatcccgctgaattcccaaaacaatcagctgtagtttaattgattttatgttgtcaattatggaataaaaacggtaaaagagcgtacgcaatccgagaatttctgtttactctctctaagcagcaaaatttgtatgaattacctgtttcatggcgttaccagataggtgtggaaaaactaactgttcttatttcctagaaaccagggaacatcgagctagtttttataatttaaaatttatatattataaacgggaggttaaattttcccaaaaagagaggttcaagctaaaacacacgttcggctaattcctgacgtttttgaaattggttccatataatttttattaaaataagcgcgctgtgcaattagaataaaatatattttataacaaattgtaatctaagaccgacgttgaattccttccacactggtgctaatcgtacggctggctggtgattcaaaggatttctctgaaccaccgaaaaagtcagatagtttgcatccctggcattgtggcgtgtggagtgtggagtgtgtggcgccaacagtcgattttttttgtgtgcttaaagttaggtgtacagctcctctccatcgggaatggcttcctcgtactcgaagtcctcaaaatttgcgtcctcatcctgaagtacctcgtggtcctcatattgttcctcgtcaatgttatctaacattacgtccagttcagcctggttgtcctccatttctgcctgcccctcttccatatatcccggaaactccgccggatcgacttcagactggaattcctcttttggaccattaaccagcaagttgacccgcttgcggtgatactttgtggagtagtgccgatgcaaaaactgcgcctccttgaactccttgttgcatgtgaggcagctgtgaaagaatatgagtttgtacatctatggctacgtatatttcaatgattcttacatatggacatccggttggtcactcttgtgcccctcctcgtgcttcagccg

SEQ ID NO: 26204 - DNA, 1054 bp, DROSOPHILA
cgggataaatgatcatatgtttgaaatgaaaaagccttcgcaatgccatttgtgcgcctcgtgtttctgtcacctgaatcccacgataattttttgcctggaagttctggccaagatcaaggatctcactggaatatggttagaacagaatgaacgccagccgcgtcatatttgcccatcttgtttaaatgacttgaacacatcgattaagttaaagaagcgcattcaacgagttcacaatgaagcaacgctgaggcgggaatctgggcttgatgaggatctagaaagcactgtatccgatatagagccagaaggggattccagtgacttggaatcggaggaatcatatgattcagaaaactatccatttgacaaaaaagcagaggaatccgatattgatttaaatctcgcccatgaggataggagaaacgaaccacataatccttatgattcggaaacccccttaatatttaagcataaaaatccattaattgagactccttcatttgcaaatgaaaacttgcctaacaaagtcgatgcaaaaagcccaaaaaagggaaactttatacaaattggaaccgatctgagactacttacaacgtatccctctattaaggtagtaaagccccttgcattagctccagaagatgtggcagctgagaatgtaccccctgcaaaaaggacagctcggaaaatgcaatccctggtgtgccctaagtgcggaagggtctttaagactccatacaacctaaagacgcatatggtgcgccacacgggtgagaagaactttccatgcacgttctgcgacaagcggttcgtcaccaagtatctggctcgtctacacgaacgagtgcgccacatgggcgaacagccgtttgagtgcaacttctgctcggcaacgtttttcacaagtacagctaagtcgagccatgagcgaatacggcacatcagagatctgaggtaccaatgcgaccagtgcaccaagagattcaataccaagacctgcttgaataagcacaagttcctgcactcaggtcttaagccctttgagtaa

SEQ ID NO: 26205 - protein, 342 aa, DROSOPHILA
MKKPSQCHLCASCFCHLNPTIIFCLEVLAKIKDLTGIWLEQNERQPRHICPSCLNDLNTSIKLKKRIQRVHNEATLRRESGLDEDLESTVSDIEPEGDSSDLESEESYDSENYPFDKKAEESDIDLNLAHEDRRNEPHNPYDSETPLIFKHKNPLIETPSFANENLPNKVDAKSPKKGNFIQIGTDLRLLTTYPSIKVVKPLALAPEDVAAENVPPAKRTARKMQSLVCPKCGRVFKTPYNLKTHMVRHTGEKNFPCTFCDKRFVTKYLARLHERVRHMGEQPFECNFCSATFFTSTAKSSHERIRHIRDLRYQCDQCTKRFNTKTCLNKHKFLHSGLKPFE

SEQ ID NO: 26206 - DNA, 3145 bp, DROSOPHILA
ttgcagtctcagtgtccgaatcctcttgtttgccctgcttttcgaaccaagacgaattggtcctgatgcagcgctcccggaatgcgatggcatcgttcagatccagcaagcaggataagcagatcctcgttggcacacctggctggttcctcaactggaatcgaagagggaatgactccgtggttaccgggaatagtcacctacccaaaagcccgtcagcttgaggatgttgctcaggacatctctggcctccttatcgaaaagtgacttggcgtgctccgcctcctggccacaggtgcggcacagcgtggtcatcctttttgcagtttcaactcaattgtttagtttccgccaagtaaacaaagttggacttctgtttacagaataatctagtttatcattgttttgtgtgaatggcacattttaaagtgaactacaaggaattagttcttccgatttgaactgtggatttgttgtaataaacgttaaatatttaagaggatgaaagatccactttcaaaactgatcgatacacccaaatcacagtcagatatcttatgatatttcatcttattaacttcttagaaatacttttatactaaattattataattttaacagataagaacattagacctctaaacggatgacaacacttaacaacaaaacatttgtaccttatttatttttggaatcaatttcggacttagcactcattgcgatcagcttattttgatgctgcctggagcggtagtgggtcttcaagttcgagttccgtgtaaaggacactttgcagacctcacagctaaggggaaagtagataaaaacaaagttaaacatttgaaaaagtaacttttcaagcaggaaatagttaacttgattgctggatgtagtggatattaggaagtaaagagttacaaagtgggaataataagatgattgatacttaaaggaatatgttaggagaaagaaaaatctagccatatatcttcacaagatcttactggaagttacgctcgccggtgtggaccacctcgtgcttggccctctggtagttcgactcgtatcgcttgtcgcaatagttgcacttgaagttctttggtgttttcttgttccggtgtacccggctgaaagaatggcagtgttcgtaggtgcaatttaggggatttaaggtatgctatagactcacttttcgtggcgcgatcgcatagtactgtgcacaaaacgctcgtcgcagaactggcaagcgtatggcttctctccgcggtgcttcacccgaatgtgaatgttcaggatgtacctgttgaactccttttgtccgcactcaggacactcgaagggcttgacgcccgagtggcgcagcacgtgcagattaaagttgcccttgtcggtgaatttcttgccgcaatggtcacagatgtggaccttttggcttatgtatgtttttcgttttttcttcgcaggtttgagaaagtcggtgtcgtcgtttttgggagatgatctcttggtgtattttcgacgaggcttcttatcttcgtcaagggccgattgacgcgatgtggcttctatatctgacatagaatcagcatctgtatcgctgtcgccgtcctcgttctgccaaagctcgtcgtcgtcttcctgtgactcctcttcgtcctcctcattttgctgactttcctcctcatctggctgtgactcctcacattcctgtgactcctcgccatcatcatgtcctgtctttttatccaccatatcctcatactcctgctgttgctcttgctcatcatcctccttactgaagggtatttcgcaggcaatatcttcaaattccttgttctcattaacctcgctttcttcctcctccttcttgtacaggtcgtggtcttcctccagtccttcattatccgcataggacacctcgtacaacacctcctgctccacttccgcatcgttgatcttcagcccctcgtgcgcatcgctcagcggatcagcccagcatccgtcatccttggcttccacacttcggcgctggattgtcagtcgattgttggtcttgatgcaggcttgccggaaggcaatggcgctcttcaggctcagcaggcagcaggagcacatattccggggcatcttcgagtggtcggtgagcttgaaaaccaaacgagcattagcggtttaaatttgccaatttaatttacacactcacccaaaggcccgtgaccaatgcgatttgcctgaccattttgctgttctcatcgaatatgttaactggattttgcgtgtatattaaatctccacacaaccggcattgtggcgtcatttttaagagttatttttcgagccaaaattccttgctttattaacagctgctgcttcattttgggccattcgcagcgaactgttgttgttgtccgcgtctctgggtgactgccaagcggtggcgccaaaatttgaaaatggcgccttttattcaagggtcgttatggaatatactccaagcatttgcttttcgtggcaaataggaattaccaaatatatttaccacttcaaaaaaagaattaaaaatatatattatacataagttttctgtttttaaatgaaaacgattaattaaatagtaaggtatttaacatttcgaaatgaatggctgtccaaatattacactcttaaagaaactacttcataataggaaaagcaaatgacaaaaatgtaatacaaaaaagttatagcaaacgaagggcaatccagtgccaaaacagtgagaatacgttcaaacatttatgtctaatagatatcctgagcctcagaattatccaagtcgtgctttcatctacatatcccgcatcttataagacggaattaaaaacgatctctaattctttggcgaatcaatgctcttcggattccaggatggcgctggctcttttctggtgagcaaccgaatcgaagtgactccttagcgttgcctttcgggcaaagttgatttggcaaataacgcagctgagagggaaatacacgacttgtattaaatatgcgcaaatttcatatcatttcacttactcaaagggcttaagacctgagtgcaggaacttgtgcttattcaagcaggtcttggtattgaatctcttggtgcactggtcgcattggt

SEQ ID NO: 26207 - DNA, 1083 bp, DROSOPHILA
ctcaccgaccactcgaagatgccccggaatatgtgctcctgctgcctgctgagcctgaagagcgccattgccttccggcaagcctgcatcaagaccaacaatcgactgacaatccagcgccgaagtgtggaagccaaggatgacggatgctgggctgatccgctgagcgatgcgcacgaggggctgaagatcaacgatgcggaagtggagcaggaggtgttgtacgaggtgtcctatgcggataatgaaggactggaggaagaccacgacctgtacaagaaggaggaggaagaaagcgaggttaatgagaacaaggaatttgaagatattgcctgcgaaatacccttcagtaaggaggatgatgagcaagagcaacagcaggagtatgaggatatggtggataaaaagacaggacatgatgatggcgaggagtcacaggaatgtgaggagtcacagccagatgaggaggaaagtcagcaaaatgaggaggacgaagaggagtcacaggaagacgacgacgagctttggcagaacgaggacggcgacagcgatacagatgctgattctatgtcagatatagaagccacatcgcgtcaatcggcccttgacgaagataagaagcctcgtcgaaaatacaccaagagatcatctcccaaaaacgacgacaccgactttctcaaacctgcgaagaaaaaacgaaaaacatacataagccaaaaggtccacatctgtgaccattgcggcaagaaattcaccgacaagggcaactttaatctgcacgtgctgcgccactcgggcgtcaagcccttcgagtgtcctgagtgcggacaaaaggagttcaacaggtacatcctgaacattcacattcgggtgaagcaccgcggagagaagccatacgcttgccagttctgcgacgagcgttttgtgcacagtactatgcgatcgcgccacgaaaaccgggtacaccggaacaagaaaacaccaaagaacttcaagtgcaactattgcgacaagcgatacgagtcgaactaccagagggccaagcacgaggtggtccacaccggcgagcgtaacttccagtaa

SEQ ID NO: 26208 - protein, 354 aa, DROSOPHILA
MPRNMCSCCLLSLKSAIAFRQACIKTNNRLTIQRRSVEAKDDGCWADPLSDAHEGLKINDAEVEQEVLYEVSYADNEGLEEDHDLYKKEEEESEVNENKEFEDIACEIPFSKEDDEQEQQQEYEDMVDKKTGHDDGEESQECEESQPDEEESQQNEEDEEESQEDDDELWQNEDGDSDTDADSMSDIEATSRQSALDEDKKPRRKYTKRSSPKNDDTDFLKPAKKKRKTYISQKVHICDHCGKKFTDKGNFNLHVLRHSGVKPFECPECGQKEFNRYILNIHIRVKHRGEKPYACQFCDERFVHSTMRSRHENRVHRNKKTPKNFKCNYCDKRYESNYQRAKHEVVHTGERNFQ

SEQ ID NO: 26209 - DNA, 3435 bp, DROSOPHILA
cctcatgccgcgatatgatgcgaaagcaggtgcggcacttgcttgccggcgggggatcgcattcctggagcccagtgctctcctcttcgaaatcactatcaaaaaacgcactgtctgctgtggtcgtgtccagggcagtggatgtggtgcaggtggcgtcactgtcgtctgcctccgccaggaatagcttcacaagctttttgttaacctgccgcgaggagcgcattgtgtctttgttgtcgtttgactggcgcaccttgaatgcaaaaaaaaaacgaaggtatacataatataccagattagaatattaataagagtttgagtgacacacccattttgaatcgctggctgtcctagacgacctcatctgtgaaagttattcgcaaataatttgagctctcccgttttcggcaatgttgagtcgatgaaaagtttcgcggactgttgggaaagtccggaatatgctttcttctttcaccgagatgtgcttggactggcgaactcgcagaggaatctgttgccgcagatgcgaactgcgcacttcatcctttgccggcaaactgcgaatttctgcaaaacagcaagcacagtttgcagggctgcataaccttgaactaggggttgaactccaggctgtgtccatgtgcgtagccaagagcacttttcacgggcgtagcgattttagtacggtgcatatggctttaagctttttgtttactttaagcacttgttgagaatagcccaattcattattttaattatattctttattgaaaattattgatgttagcaaaaccacaatttactgctatgccatatcttattaggaaacaagggaagatagtcgagtcctcgactatcagatacccgttactcagcttggatgagggagcaatttgtaaccaatttttattgacatcaactttagaaagtttccagaggggcattttgcatgtcaatagcagaacatgcgaaataatcctctcaaggaaccaacgatttacccatccgcttggacagtagcatccatttttggcatttttgactgctcctcaactttcaggcgatggtgcttcgacttgtagtgggtggccagggcgttccttctattgaagaacgtttggcagagctcgcagctaaagaaaatgtattaagtaaagatccaaacagtgtctgtttgaccgtaactcactggaatggctgttcccccgtgtggaccacgatgtggtccttgagagccgtcgaagtcttgaaggccttctggcatgtggagcacacgtgtggtcggtggacgggactctccttgtggttgcgctcgtggttcagccgcttgaggcagttgtcaaatcgcttgccgcagtacttgcacacgtagggcagctccccgcgatgcttaatccgcacgtgcaaattgagcaggtgttgggtgaactccatgcggtcgcactcctggcactggaactccttggtgcccttgtgccgtctgaggtgcacattgaagttgcccttctcgctaaaagttttgccgcattggtcgcagaaatatagtcggtgctccagtgcataggctcttttggcagctccccatttgtttcgtgtggcatacttttcctctttggtcttattggtagttgagtcaatattctctattttagccatgtccttgccaggacactcctctaagcaccctttgctcctcggttttcttcggtttttctgtacttccccgatgacttgtagtgttctgggctcttccttcatgacttggggcatttcggatgctggctcttcgtgattcatggactccactggataatcagatgaaagctgaggctcgctcttcacctgaataggatcctcgcaccggagaggatcgacgagatcggcaggcggtatttccgggacaactaaagggtaaattggggtttctactgtcttaagaggcactccatccactttcttgctgcgttgtggtagaatccttctcctttgcggctgtgcaatactaatgggcataacatccaccctactttctaacctgttattcccgccttcccttgcagtctcagtgtccgaatcctcttgtttgccctgcttttcgaaccaagacgaattggtcctgatgcagcgctcccggaatgcgatggcatcgttcagatccagcaagcaggataagcagatcctcgttggcacacctggctggttcctcaactggaatcgaagagggaatgactccgtggttaccgggaatagtcacctacccaaaagcccgtcagcttgaggatgttgctcaggacatctctggcctccttatcgaaaagtgacttggcgtgctccgcctcctggccacaggtgcggcacagcgtggtcatcctttttgcagtttcaactcaattgtttagtttccgccaagtaaacaaagttggacttctgtttacagaataatctagtttatcattgttttgtgtgaatggcacattttaaagtgaactacaaggaattagttcttccgatttgaactgtggatttgttgtaataaacgttaaatatttaagaggatgaaagatccactttcaaaactgatcgatacacccaaatcacagtcagatatcttatgatatttcatcttattaacttcttagaaatacttttatactaaattattataattttaacagataagaacattagacctctaaacggatgacaacacttaacaacaaaacatttgtaccttatttatttttggaatcaatttcggacttagcactcattgcgatcagcttattttgatgctgcctggagcggtagtgggtcttcaagttcgagttccgtgtaaaggacactttgcagacctcacagctaaggggaaagtagataaaaacaaagttaaacatttgaaaaagtaacttttcaagcaggaaatagttaacttgattgctggatgtagtggatattaggaagtaaagagttacaaagtgggaataataagatgattgatacttaaaggaatatgttaggagaaagaaaaatctagccatatatcttcacaagatcttactggaagttacgctcgccggtgtggaccacctcgtgcttggccctctggtagttcgactcgtatcgcttgtcgcaatagttgcacttgaagttctttggtgttttcttgttccggtgtacccggctgaaagaatggcagtgttcgtaggtgcaatttaggggatttaaggtatgctatagactcacttttcgtggcgcgatcgcatagtactgtgcacaaaacgctcgtcgcagaactggcaagcgtatggcttctctccgcggtgcttcacccgaatgtgaatgttcaggatgtacctgttgaactccttttgtccgcactcaggacactcgaagggcttgacgcccgagtggcgcagcacgtgcagattaaag

SEQ ID NO: 26210 - DNA, 1329 bp, DROSOPHILA
aacagaagtccaactttgtttacttggcggaaactaaacaattgagttgaaactgcaaaaaggatgaccacgctgtgccgcacctgtggccaggaggcggagcacgccaagtcacttttcgataaggaggccagagatgtcctgagcaacatcctcaagctgacgggcttttggttgaggaaccagccaggtgtgccaacgaggatctgcttatcctgcttgctggatctgaacgatgccatcgcattccgggagcgctgcatcaggaccaattcgtcttggttcgaaaagcagggcaaacaagaggattcggacactgagactgcaagggaaggcgggaataacaggttagaaagtagggtggatgttatgcccattagtattgcacagccgcaaaggagaaggattctaccacaacgcagcaagaaagtggatggagtgcctcttaagacagtagaaaccccaatttaccctttagttgtcccggaaataccgcctgccgatctcgtcgatcctctccggtgcgaggatcctattcaggtgaagagcgagcctcagctttcatctgattatccagtggagtccatgaatcacgaagagccagcatccgaaatgccccaagtcatgaaggaagagcccagaacactacaagtcatcggggaagtacagaaaaaccgaagaaaaccgaggagcaaagggtgcttagaggagtgtcctggcaaggacatggctaaaatagagaatattgactcaactaccaataagaccaaagaggaaaagtatgccacacgaaacaaatggggagctgccaaaagagcctatgcactggagcaccgactatatttctgcgaccaatgcggcaaaacttttagcgagaagggcaacttcaatgtgcacctcagacggcacaagggcaccaaggagttccagtgccaggagtgcgaccgcatggagttcacccaacacctgctcaatttgcacgtgcggattaagcatcgcggggagctgccctacgtgtgcaagtactgcggcaagcgatttgacaactgcctcaagcggctgaaccacgagcgcaaccacaaggagagtcccgtccaccgaccacacgtgtgctccacatgccagaaggccttcaagacttcgacggctctcaaggaccacatcgtggtccacacgggggaacagccattccactgcgagctctgccaaacgttcttcaatagaaggaacgccctggccacccactacaagtcgaagcaccatcgcctgaaagttgaggagcagtcaaaaatgccaaaaatggatgctactgtccaagcggatgggtaa

SEQ ID NO: 26211 - protein, 421 aa, DROSOPHILA
MTTLCRTCGQEAEHAKSLFDKEARDVLSNILKLTGFWLRNQPGVPTRICLSCLLDLNDAIAFRERCIRTNSSWFEKQGKQEDSDTETAREGGNNRLESRVDVMPISIAQPQRRRILPQRSKKVDGVPLKTVETPIYPLVVPEIPPADLVDPLRCEDPIQVKSEPQLSSDYPVESMNHEEPASEMPQVMKEEPRTLQVIGEVQKNRRKPRSKGCLEECPGKDMAKIENIDSTTNKTKEEKYATRNKWGAAKRAYALEHRLYFCDQCGKTFSEKGNFNVHLRRHKGTKEFQCQECDRMEFTQHLLNLHVRIKHRGELPYVCKYCGKRFDNCLKRLNHERNHKESPVHRPHVCSTCQKAFKTSTALKDHIVVHTGEQPFHCELCQTFFNRRNALATHYKSKHHRLKVEEQSKMPKMDATVQADG

SEQ ID NO: 26212 - DNA, 3524 bp, DROSOPHILA
gacaactggcgctgcacgtcgtccggcagattttccaccgaatcgatatagttgtccacataggtggccgaattgatggcctccgactcggatgcaatggggtttatcatcgtgtttggactgcgaatcgctctattcccgccgcgacatcggctcggggacgtgggttcggatgtgagctactcttccggcgctctggaagggatcggctggctatatagtactccgattccactcagttccaactttttgtatggcgttgcgagtcgcaacttgcgactgtactcgtgtgtgcgtgtatgtgtgcgtaggtattatttatatgtatgtatacaatgggtggttgtgctttgcaacactagtcggctggtgttttgctacactgaaatcggggtggttaacggcactgctgtttcggttgaattttttaataaataagtaatattggttttaatagtttgtggtcaaatatcttctcatcatttccctaggcaatagaaagtattaaaaatattttccctttaaatacaaatttaattattactttcagtcctttttttgtattcattttattacaattatcgtaattttaaaatcatgtatcattcattcaacggccagtgtaggaaacgttcaaaaccaaccccttactcatttgcccgggaaactggagaatttcaaataacagtatcagctgattttttaattaggaaaaacaaatgcacttatattattttttaattgattattatttaatattaataatataaatatttattgttcctttcatgaaacatacgtctgaactattcagatttgtatttaggttgtcaagtctattcttcattaagcttaacgttattaaatgcataatactattatacgaattatatatttttaaaatattgttcgtgcattatcttctatgtcggcacttactaaacgtcaccttagaagtattacgtacttcgccatgaaagtatataaatttttataaaaattatatatattcaatagtttgagtcttttcatcctgagttctggctcgcacttcctgtgcatttggctgcattggtgtttgagattcaaagtccatttccttatcaatatctttaaatgcttgttgcagtccattaacttcttcttttatagctttctgcatattatcccgatgcaaatcggtgtttttgtgtttgtttagattatatctatggcggtagtgaacatcgcagatctcgcacctggcaatataaatcaagtaaagaaataagtaaacggacagtagtcgggattctcttttgcacccaccgatgaggatgcattcctgtgtgtacatcctgatgctttgttagttgggagcgcagcaggaatccctttaggcagatgtcacagcgaatgggaaacttgtcgtgcaaagcttgatgtcgtttcatggcagatgggtcagcgaatttcatctggcaaatcttgcactggaagggtctgcttccgttgtggaagttcatgtgcaggactagacctttcttgctggtataacttttggtgcactgggtgcagtaatggcgactggatccctcttcctttgatttcacccgcgttcgaatccgattgcctgctccgtgaacatccctggagtcaatcgaagtgattagatgatggaaccatcaaatagtaggtgcactcacctctcgtgcctgtgacgactgcttgcgtttgcgaaggactcattgcaatggttgcagggaaagggatgctcgcccttgtgcagcgctcttacgtgaatgttgcgcgtatagagatcgtagaatttcttcgggcattcggggcactcgaaattcttggccctattgtgacggagcaagtgcatctgcagctgactgcgttggcgaaaggtgtggccgcacttgtcgcagacatagttcaatggcttcgcttgtatcctttcgcggcgccttcggtttttctcctctggactcacccttagttgaggtttctttggtagtgaaagcgaatactttggtgcagtttcctttaggctattgtactcaccgagcacaaccttatagaccttggctccgtgatctaccttaccaatctcttccttagtcttacactttcgtatgctaattatttcattacatgacttgttttgctccaaagcaaagtctttttctgtgtctctgtctagatccaactcatcttcacttagtgaaaactgagttggctctgcatccagtggaaagtcgtcttcatccaggacaccctcactatccggcaacaactctgagctgaaatcttctagtcctacgactccctttgcctgctgggcggactcttcgtagagcacattttccagctccgactccatttcctcgtcacagatttgaatgttgtacttttccgtcgtctgcctaagctttttgtcgacctgctggcatttggcacggaattccatggatttattcacagtttcctggcacgttgagcaaatgtgatgcggtagctctttgactccttgttgtatctgcaataaaatgttagttctttaatgcagctttattataatattatatagtgggtttatttttctgttaaatttgtggtagaacagtttaagaactcacatattatgttccttgtcaacaaagttaacttataaaacgaagatgaaacaatttaacaacaaaaaagaaaacgtaagtttaaatgcagacgcagacgtacccacaccccagtgatgacctttatgtggtgcagaagcgctatgttgaccctgtcatatagatcctgagcatcctcatgccgcgatatgatgcgaaagcaggtgcggcacttgcttgccggcgggggatcgcattcctggagcccagtgctctcctcttcgaaatcactatcaaaaaacgcactgtctgctgtggtcgtgtccagggcagtggatgtggtgcaggtggcgtcactgtcgtctgcctccgccaggaatagcttcacaagctttttgttaacctgccgcgaggagcgcattgtgtctttgttgtcgtttgactggcgcaccttgaatgcaaaaaaaaaacgaaggtatacataatataccagattagaatattaataagagtttgagtgacacacccattttgaatcgctggctgtcctagacgacctcatctgtgaaagttattcgcaaataatttgagctctcccgttttcggcaatgttgagtcgatgaaaagtttcgcggactgttgggaaagtccggaatatgctttcttctttcaccgagatgtgcttggactggcgaactcgcagaggaatctgttgccgcagatgcgaactgcgcacttcatcctttgccggcaaactgcgaatttctgcaaaacagcaagcacagtttgcagggctgcataaccttgaactaggggttgaactccaggctgtgtccatgtgcgtagccaagagcacttttcacgggcgtagcgattttagtacggtgcatatggctttaagctttttgtttactttaagcactt

SEQ ID NO: 26213 - DNA, 1401 bp, DROSOPHILA
atacaacaaggagtcaaagagctaccgcatcacatttgctcaacgtgccaggaaactgtgaataaatccatggaattccgtgccaaatgccagcaggtcgacaaaaagcttaggcagacgacggaaaagtacaacattcaaatctgtgacgaggaaatggagtcggagctggaaaatgtgctctacgaagagtccgcccagcaggcaaagggagtcgtaggactagaagatttcagctcagagttgttgccggatagtgagggtgtcctggatgaagacgactttccactggatgcagagccaactcagttttcactaagtgaagatgagttggatctagacagagacacagaaaaagactttgctttggagcaaaacaagtcatgtaatgaaataattagcatacgaaagtgtaagactaaggaagagattggtaaggtagatcacggagccaaggtctataaggttgtgctcggtgagtacaatagcctaaaggaaactgcaccaaagtattcgctttcactaccaaagaaacctcaactaagggtgagtccagaggagaaaaaccgaaggcgccgcgaaaggatacaagcgaagccattgaactatgtctgcgacaagtgcggccacacctttcgccaacgcagtcagctgcagatgcacttgctccgtcacaatagggccaagaatttcgagtgccccgaatgcccgaagaaattctacgatctctatacgcgcaacattcacgtaagagcgctgcacaagggcgagcatccctttccctgcaaccattgcaatgagtccttcgcaaacgcaagcagtcgtcacaggcacgagagggatgttcacggagcaggcaatcggattcgaacgcgggtgaaatcaaaggaagagggatccagtcgccattactgcacccagtgcaccaaaagttataccagcaagaaaggtctagtcctgcacatgaacttccacaacggaagcagacccttccagtgcaagatttgccagatgaaattcgctgacccatctgccatgaaacgacatcaagctttgcacgacaagtttcccattcgctgtgacatctgcctaaagggattcctgctgcgctcccaactaacaaagcatcaggatgtacacacaggaatgcatcctcatcggtgcgagatctgcgatgttcactaccgccatagatataatctaaacaaacacaaaaacaccgatttgcatcgggataatatgcagaaagctataaaagaagaagttaatggactgcaacaagcatttaaagatattgataaggaaatggactttgaatctcaaacaccaatgcagccaaatgcacaggaagtgcgagccagaactcaggatgaaaagactcaaactattgaatatatataa

SEQ ID NO: 26214 - protein, 443 aa, DROSOPHILA
MEFRAKCQQVDKKLRQTTEKYNIQICDEEMESELENVLYEESAQQAKGVVGLEDFSSELLPDSEGVLDEDDFPLDAEPTQFSLSEDELDLDRDTEKDFALEQNKSCNEIISIRKCKTKEEIGKVDHGAKVYKVVLGEYNSLKETAPKYSLSLPKKPQLRVSPEEKNRRRRERIQAKPLNYVCDKCGHTFRQRSQLQMHLLRHNRAKNFECPECPKKFYDLYTRNIHVRALHKGEHPFPCNHCNESFANASSRHRHERDVHGAGNRIRTRVKSKEEGSSRHYCTQCTKSYTSKKGLVLHMNFHNGSRPFQCKICQMKFADPSAMKRHQALHDKFPIRCDICLKGFLLRSQLTKHQDVHTGMHPHRCEICDVHYRHRYNLNKHKNTDLHRDNMQKAIKEEVNGLQQAFKDIDKEMDFESQTPMQPNAQEVRARTQDEKTQTIEYI

SEQ ID NO: 26215 - DNA, 3015 bp, DROSOPHILA
tcttcatttgtatttcacccctcacatcacaagcagcttttccgagaaatcgtaatcacacattcacctgcaatatttgcacacaattttgcaaaacccccccacctcctttcgtctaacaaatggaaatcattgtcccagtgattgagctagtatgtatatacacatatatccatctccagttccagtaaatggaaatttaagtcaataaaatgcaatctgggttcaagttctcattcaaattaatcaagctgtcctcgggttttgttatcccacacaactaaatcctattcacgttgattgacatttttcaagtgcatttcgacatttaattctggccaaatgttgcagttgcatttaatttaaactcattcaaacactaatttctaaaaacactgcaatttaacagcgaatttgatttgtcatttattttctttcaaatcaatgagttgagcaacaataggctattttggccacaatgtcggctaaaagccctttctactctagcaaccccttttattttcagtgcatttgcaactgcattttgtttaggcgcatcgcctttttcaaggtcgaccgttttccacgttctatacgtatctactttccagttgacacgggcttttgagccgttaaagcgtaaagcaattgccacaggacctctctccccccccctctgcaacaaaaatgaaggggattgggggttttgactttggctttggctttggctttggccaaccacgtaatggcaattgtacaagagaaggagccaagtgagcgtaataaacgccaagatttagatcacattcactggcggataagttgggcggcttgggcggccttaaaagaggtttaagttagtcgggggtttcgaatgtgcgatttacgatggcttttcttttttttgtagaactgaagaacttgacacctccactcctagttgtttttctatgtaatgcgcttgtttaacaacgcccctgtgttttagtaaccgtctcaatatcgccgctgtctatttgttcttttatctgagtatatatccgtctgttagtcgagaacattatattggcattttagcccacacagtacgcccctacgttatttgagaatcttttttttataaaacaagaagttcggtaaataaagtgaaaaaattcgcataacgtataacatttcaaagggaatcaatacatatttaatatgagttatatgtatttgggaaatatttactagcgcattcaatgaaatatttaacccaaaaggacgccacattgaaatggatacttcaaattgggcttcacaccgtttaacccgacagttgggcagacaagatagactggctttaacccttgactcaccttgacgacttggttacgtttttcgtaatcaatcaaaccgctggattggttgtacttgaccccgccgaagggcataggtggagcggtcacggatacaattgaggacaagggtgcagaggttgaggttaattctccggcagacgagcgcatggagaaagttgatgtagatggggaaatgacttccgacgactccttcacttgattatcctcgacttttggcttactgccaccaataacagcagatatcttgggtagctccaactgctcctgctctttttgcatttgctcatcatcctcgtcatccctgctgctggcattcaacttgagatacacatttcgcggatgattgttcacatagttcaactctttgatctgattctcattgttgctaacactatcgctggctaccttctcgttcagtcgaatgatgttcgacaaattgatgttgttgatcagcgttatgccggtaatcccgaccagaacgatcacaaagcaaattccgccaatcagcaggagcggcgtggttttcgacgttttcggacacattttcactttttgatttgcatgcactttagttttgattggaaattatgttgtcatatttcttttgatttaagctaaccgtttcttgactaaaaaatattcaaatgaaaaatctttacattttctagttgctataaccttttcatcacatttaaatgtcaatgctaagcataatttgctcagttctcctttcaagtttttcccctttgcgaaccatttctgtttttgctaaggatacctttaattccccttcgcatttacatcacttgaagcaatcgacctctgactgttcttcctaagtactccgccagcagagcaatataaaagttgacaaggttttattgcattccttcgcattatttttttcttttttttttcgcaacatcaacagaaacagcaaaaaccaagaggacatcctggctaacaaacacaaagtataagaatttgttcgaataaaaagcacaacaaatgggaaatgtttctggaaatggaggaggatgaaagtttttaggtgagaactggacccttgtaatgtctaagtgttctgccttttctctgcaactcgttttcgccgcagctttttccccaatcgtttgctattccattcgccatgcatattatgaatttgccaagttttgtttgagccgcacgactgcacttcaaattcgaataatcaatgaagaaaatgggagaaaggacttccaagggggggtggaaaattggggcgtaatatggagcaaatggaaggtcaggataacagtggcaaagttataagagcaatgctgttaaaaaagagtttcacaatgcaaaaatacaaaatacgctatatacgcctagaatacatttcaaaattacgtatacgcaacgtatacgccaagtgcgtttcaaataacgtatacgcacttcaggcgcaacatacaatatgacaggccattacagaaattaagatgaaaaaaaaaaaccaattaaaagccgctggcaagaaaaattataaaaccaatctagatcatatcagatcaatccgatagcagcatattctgttgatttcattcattcgattttgttttcattctatatttatatccccgctcacctctgcccactccctttgcaa

SEQ ID NO: 26216 - DNA, 897 bp, DROSOPHILA
gatttttcatttgaatattttttagtcaagaaacggttagcttaaatcaaaagaaatatgacaacataatttccaatcaaaactaaagtgcatgcaaatcaaaaagtgaaaatgtgtccgaaaacgtcgaaaaccacgccgctcctgctgattggcggaatttgctttgtgatcgttctggtcgggattaccggcataacgctgatcaacaacatcaatttgtcgaacatcattcgactgaacgagaaggtagccagcgatagtgttagcaacaatgagaatcagatcaaagagttgaactatgtgaacaatcatccgcgaaatgtgtatctcaagttgaatgccagcagcagggatgacgaggatgatgagcaaatgcaaaaagagcaggagcagttggagctacccaagatatctgctgttattggtggcagtaagccaaaagtcgaggataatcaagtgaaggagtcgtcggaagtcatttccccatctacatcaactttctccatgcgctcgtctgccggagaattaacctcaacctctgcacccttgtcctcaattgtatccgtgaccgctccacctatgcccttcggcggggtcaagtacaaccaatccagcggtttgattgattacgaaaaacgtaaccaagtcgtcaagagggggggggagagaggtcctgtggcaattgctttacgctttaacggctcaaaagcccgtgtcaactggaaagtagatacgtatagaacgtggaaaacggtcgaccttgaaaaaggcgatgcgcctaaacaaaatgcagttgcaaatgcactgaaaataaaaggggttgctagagtagaaagggcttttagccgacattgtggccaaaatagcctattgttgctcaactcattgatttga

SEQ ID NO: 26217 - protein, 261 aa, DROSOPHILA
MCPKTSKTTPLLLIGGICFVIVLVGITGITLINNINLSNIIRLNEKVASDSVSNNENQIKELNYVNNHPRNVYLKLNASSRDDEDDEQMQKEQEQLELPKISAVIGGSKPKVEDNQVKESSEVISPSTSTFSMRSSAGELTSTSAPLSSIVSVTAPPMPFGGVKYNQSSGLIDYEKRNQVVKRGGERGPVAIALRFNGSKARVNWKVDTYRTWKTVDLEKGDAPKQNAVANALKIKGVARVERAFSRHCGQNSLLLLNSLI

SEQ ID NO: 26218 - DNA, 3404 bp, DROSOPHILA
ggccagaaacagagattttggattctgggtcagtggaatcaaagagaaacaaaagcgaggacggagtacaaaaattagacacgctgagacttgtgaattggttatggaatttctaaatgctacacgtccacagcgaaaatgggttcctaacgaagatgcaactatgaaacaagatgtaccctttaatactagctgcttagatccttcaaatgggaatgtgacaacgataaagataacaatatatgtacataagttcgtgaaacagcgtggcgcataaacccttttcttaagatctcttcgtcgagttggcaaagaccagtggcgtggaaaacaaaaaaagaaccactttcggggcacattcgttgcagtgaaccgaccgtctccacaaacaattagtcggaactgattgtcgcggaagttgagcaaggggaccacagaagacgcgaaacgtggcggggggtggaagtggaactgtatgtgggagaaatatatgtatataaatagcggaatgctgataattgcccacgttgtcaagttgaggagaaaaaaaaaacgaagaacaatttacacacagcccgagaaataaaataaataaatgccaaattagagcataaaaaaaagacgatgcagaaaaataaaaatagaactcaggcgaaatcgagctgagcagaaaaaaaaaaacagagcgataaccccgggagagttcaatatttgccagttttaaaaagaggtacataggtttccaaggtttccaagttcattttacgataagatatgctgacccgataaagaatataatctccaggcagtaaaatggttaacggtattgcaatcgataaaagatatgtgcaaaaatatccacatcccaagtactgtgtacttgtactaatcactttgattttaagtacagtatcgttagcttgtatttatattaaatttatatcattgcatcgatcttactatccagcgtatttcaagctatcaagtgtgaaccacctacctctttgaccttctgacgccgttcttccagtgtggcgtccagtgtgtccggcgcctgatcattgccaccgccacccaatggcagttgtggttgctgctggttgtgctgctgggcggaactttgtggatgggacgaggcctggctggcggcattgtccccctgaactggggcggccagaacgggaatggcggcgtgtccctcgtcctgatccagcggctgatccgccagagcggcgacgggtgctggagcctgagcctgttgggcgagcacctggaattgtccaggttcgcctccacccgcagccggtggctcatcgagcatatcgcccaattcggcgcgaatcttttgctccaaacgttggcgatcgccaatgaaatgtggatcctcgctgcgatggggggcgtgtgcggcgaggggcggggctgggataaagatctccggtccggcctttcggaagtgcttgtagacgcgcaggacacgatcgctgccgaaattgtccggcagaaggaagatgccgccgaagcagaggaagcacaacgttaccaggacgagtccaatcagacatttttcgcgcgagtggaagttcgatttgcgtccaattggactgatgcgatacatgatcgattgtttatttgcttcaattcgatttaactgattgttttgggttatttgtattattgtttcactgtagtcttctcgggcattggcggtggactttttaatttaagttatgtttatgttttctcagtttctctgatttggtgaaacggttaaagattatttatggtcgcgttgcccccatttgcctgtcttgggattaaggaagttgggatagaggccctttggtttctcgatctccttgagcacttggcgaatggtctggactcgttcccgatacagtggattcccggtaatgtcgctcagataggcaaattccagatgcagtgtgccaaattcggataggatagaactgccgccggatgcccagccgtagttcttggccacaccggtcttggtgttgaccagcgcgtagggaatacccgttggtgtttggaaggcgggcagcagcttgtcggcaacgtgctgggccttctccttgtacagtggatcgcccgtaaaggcgtacagcgtcagcatgccgccaacaaaacgaatgttcgtttcgaaaacactcaactctgcgctgatattgtccagtgagaattttcgctcgatccaatcgcgaccctcgcgatattccttctccagtcccataatgtacagggtatccagaccgtcgacgattgtagcacccagatcgtatgatccaaaaatactggccgaatggggtcgctgcgaaagcggacgcagctcgtttttgccccacgcatacaatttgtaattgtgccacgcatgttccatcatctaaaaaagagcaaatagaatggaagttcgttagatatttaatgcaattactgtgcaatttatagttatatataacagtttgtcaatatatcaatagaaatcgaactctttaagcacccaaaaccaatagtttgcactttaagaattgtcattgaaaatcgtttgcgtatgcaacaattccatgttgaagtaccctcagcaaatcgcaatcattttgcatggatacaatatgcagatttccgcacatttcatgttatttctatatttacactctgcttaatatttggccttcgttgcaattcgtttcatatttagtttctcgctttcaactcggcttgaaatgtttgcatacgtcagtgcgaccgtgtgtttgagttgatttaccctttttttcttttgcaattgaatatcgcccagtgccacataaacacacacacatacagcacgcacacacacagacgtgggaagtcacgtagctggccgcataaatggtaatgaaatggacagcggtaaatcgttttcattgccagaaccgtgtaatttataaagtattgcaatatatttagaaatttgaaagcgaaaatcatttgataagtaaatcggttaattgagactttaatagtatttttcatggttaaaaattagtttttatgattaatcctataattttaaaataacttataaaaatgttgaactgatggtaactttcatattcgagttcaattagcatgcgactacgttctttttttttctttttttgggtttccatttggcttagtgcaagtatttgactgtgcacctgtgtgtgtgttgtttgcattggtgtggcctgcgcaattttgcattttgccatgtacttccgcttacacacacacacacacacacacacacacacagagcataattcggcattgcatactttgcagcgccgctttccctctcttggtgtggctttcatttgggtactttttgcaaaaattaaattacgaccgcaggacaa

SEQ ID NO: 26219 - DNA, 3450 bp, DROSOPHILA
cggcgggcacattgtggatcggatccaagctgtttttggtcgtctcgaactcaaaaaaagaaacgtaaatccagcggaattaaacgcgattgtggaaggcgtctcgttcttgtgatacctctgccgtgaatcgatggtcggtttgcggaaaataataaggtggcaggcgaccataaataatctttaaccgtttcaccaaatcagagaaactgagaaaacataaacataacttaaattaaaaagtccaccgccaatgcccgagaagactacagtgaaacaataatacaaataacccaaaacaatcagttaaatcgaattgaagcaaataaacaatcgatcatgtatcgcatcagtccaattggacgcaaatcgaacttccactcgcgcgaaaaatgtctgattggactcgtcctggtaacgttgtgcttcctctgcttcggcggcatcttccttctgccggacaatttcggcagcgatcgtgtcctgcgcgtctacaagcacttccgaaaggccggaccggagatctttatcccagccccgcccctcgccgcacacgccccccatcgcagcgaggatccacatttcattggcgatcgccaacgtttggagcaaaagattcgcgccgaattgggcgatatgctcgatgagccaccggctgcgggtggaggcgaacctggacaattccaggtgctcgcccaacaggctcaggctccagcacccgtcgccgctctggcggatcagccgctggatcaggacgagggacacgccgccattcccgttctggccgccccagttcagggggacaatgccgccagccaggcctcgtcccatccacaaagttccgcccagcagcacaaccagcagcaaccacaactgccattgggtggcggtggcaatgatcaggcgccggacacactggacgccacactggaagaacggcgtcagaaggtcaaagagatgatggaacatgcgtggcacaattacaaattgtatgcgtggggcaaaaacgagctgcgtccgctttcgcagcgaccccattcggccagtatttttggatcatacgatctgggtgctacaatcgtcgacggtctggataccctgtacattatgggactggagaaggaatatcgcgagggtcgcgattggatcgagcgaaaattctcactggacaatatcagcgcagagttgagtgttttcgaaacgaacattcgttttgttggcggcatgctgacgctgtacgcctttacgggcgatccactgtacaaggagaaggcccagcacgttgccgacaagctgctgcccgccttccaaacaccaacgggtattccctacgcgctggtcaacaccaagaccggtgtggccaagaactacggctgggcatccggcggcagttctatcctatccgaatttggcacactgcatctggaatttgcctatctgagcgacattaccgggaatccactgtatcgggaacgagtccagaccattcgccaagtgctcaaggagatcgagaaaccaaagggcctctatcccaacttccttaatcccaagacaggcaaatgggggcaacttcacatgtcattgggcgctctgggcgacagctactacgagtacttgctgaaggcctggctgcaatccggccaaacggatgaggaagcccgcgagatgttcgacgaggcaatgctggccattctggataagatggtccgcacaagtcccggcggactgacatacgtctctgatctcaagttcgacaggctggagcataagatggaccatttggcttgcttctcgggtggcctcttcgctttgggagcggctacacgtcaaaatgactatacggacaagtacatggaggtgggcaagggcattacgaatacctgccacgagagctacatcagagcacccactcagctgggacccgaggcctttagattcagcgaagctgtggaggcgcgagcactgagatcgcaggagaagtactacattctacggccagagactttcgagagctactttgtgctgtggcgactcacgcacgaccagaaataccgcgactggggctgggaggcggtcctcgccctggagaagcactgccgcacggcgcacggatattgtggcctgcgcaacgtctaccagcaggagccgcaaaaggacgacgttcagcaaagcttcttcctcgccgaaacgcttaagtacctgtacttgctgttctcggacgattcggtgctgccgctggacgaatgggtgttcaacacggaggcccatccgctgccgatcaagggtgcgaatgcgtactatagacaggcgcccgtaacgcttccggtttcgaacgcatcgtaaacgggcgccatgttgcgccgctggctattcggcctgtccctagcaatgcaccttacttagctcgcgatatttggatatctacacatgtgtgtaccagatcgtaacatttttttttttttttgttttgtttaagttattagttagattacgtgaggatgacaactgcgtacgaaagatattgtatgtttacaatcaatccaggcacacacacacacacactcgagaaactgtcaatgtaacatatttataaagcttgcacatatataggaacgtaaacttaaacggatatatcgtagtttagttcttaactgtttgcacaagtttctccaagtctctcttcttgatttatcttatggaattaatagcaatccaaatagttgacagaggtggatggtgggaagacctcaatttccatttaaatgcgaatgacgtagacgtaggcaaaaactcttgatattaattatgatatgatatataatatgatatacgtgtaaatgtaaaactcaggtgttcttattatgattttccttgcgctcacacaaggcactttttcaactaaaccagctacgtaactatctctacaagcattctatacgcaattctcgatctgcgactatatctctgtgtggatttatggccacttggcgggcatttcgttagatctactctgctaatttccaattcgaatctttgaccactttattttgtatataatttctactgactttcctcgcaaaatgaaggcagaagaaaatcgaattgatatttatacaaatatattcttacacaatattgtttactttgtagcctaaatatttaaatataaatctaatatagagtctagcttactgtatgtgacgaaagaaatgtaacgcaaattaccttaaatcgagaacatcaagcgaaaagaacgcaaatgaatatatataaagtaaaataaataaatatatatttgtatttaattaaatcaaataaaacgtaggcaattgttaaaataaattaattatacgatggcacgagccgagcgaatggtaatttaatttttaacaactgtaaaggttttttataataataataccagcagtaatcatatttataattctattt

SEQ ID NO: 26220 - protein, 667 aa, DROSOPHILA
MYRISPIGRKSNFHSREKCLIGLVLVTLCFLCFGGIFLLPDNFGSDRVLRVYKHFRKAGPEIFIPAPPLAAHAPHRSEDPHFIGDRQRLEQKIRAELGDMLDEPPAAGGGEPGQFQVLAQQAQAPAPVAALADQPLDQDEGHAAIPVLAAPVQGDNAASQASSHPQSSAQQHNQQQPQLPLGGGGNDQAPDTLDATLEERRQKVKEMMEHAWHNYKLYAWGKNELRPLSQRPHSASIFGSYDLGATIVDGLDTLYIMGLEKEYREGRDWIERKFSLDNISAELSVFETNIRFVGGMLTLYAFTGDPLYKEKAQHVADKLLPAFQTPTGIPYALVNTKTGVAKNYGWASGGSSILSEFGTLHLEFAYLSDITGNPLYRERVQTIRQVLKEIEKPKGLYPNFLNPKTGKWGQLHMSLGALGDSYYEYLLKAWLQSGQTDEEAREMFDEAMLAILDKMVRTSPGGLTYVSDLKFDRLEHKMDHLACFSGGLFALGAATRQNDYTDKYMEVGKGITNTCHESYIRAPTQLGPEAFRFSEAVEARALRSQEKYYILRPETFESYFVLWRLTHDQKYRDWGWEAVLALEKHCRTAHGYCGLRNVYQQEPQKDDVQQSFFLAETLKYLYLLFSDDSVLPLDEWVFNTEAHPLPIKGANAYYRQAPVTLPVSNAS

SEQ ID NO: 26221 - DNA, 3854 bp, DROSOPHILA
gccaaaacgaacacagaacactcgggcaccatcactgttatacacgcgatctagatctatatagatttaccaaaaatatacatctatatacatatttatacacccagtaaaattagttgtgtgcgtctaagagcctcgcatggatcaacagggtttccgttcaagatcctccaagaatcctgggaaacagttttcattcatgccagtctcttcttcgtaccgccagaggttttcggacacctgctatacacttagctcctagttttaagagaatgaaatcacatagtccaaatgttacatgctaacatatcgaattctctactgtacccacgaccaaagcgaaacgtttgaaactgtaactagtacataattagctttaagcaacctattacatgactattaactagacgtagagatttttgcaaagtaagtgccctggacgacttctgagtgtttttgaaaccagactcttacgtgtattccgtgtagatgtttctgtagcgcgatcgtaccctatacaaaaaaaaagtatatctcatgttaggcgaacttattgatggatttttagaagtttatataggaacgatacgatactataggaatctatggcaccaagcccatttgctcccgctcacttgtttaggtagtctctttacattttagttatgatactccaaattttatctatccacctacgcgttagacacctgaaatctatcctatacagttcgtttcaagaatgaaatacaacaattgtaaatacacatgcacttgtacctacatcaactgaaaatttcttcagtggaacacaaacgttgttattaaggaattgtcaatttatggtccaaagctacaataaatagaacatcatttggatgggtcagcagtaagcttaactaagttctagtttacgttcaattcgctaacacaaaacaaaagtaaaattgtgtgaatgtgtatttttgaaatcaaataaacgaattacataaatgtaatcttttcataaagagttatttgatagtttctcaaaaatcgcgcaatgattgccctggtcgtagtagcttttgattaattgtacctcatgcacttgggacacaaggttttccagttcctgttcctcgaaaacatggtagtatcgcagataagtggtcttctgctcatccttggtcttccacggcaccagaacatcttgctgctggaactctgtgcgattagtgtgaacaggaagtgggttattattggacagctgctgctccagttcctgatgttgcttctgacgctgctgctgctcagtggtacgctccttgttcactgccttattttgacgtagataagtcgacttcttatcattctttcgctgatccttggcccaaacgtaaaccaaagcacgtcctccaggtcggaggacacgtgccatctcctgcaaggcggccaatcgacgctccttggtggccaggtgatgaataaccgctatactgatgcagccatcgatgctggacgagcgaacgggcaccacaagacagtcgcatcgaaacacgttttgtcccttccgacgacctacagcaagtagtccttgcgctctgtcgcaaccaacggacaggagcagcgggttgcagcttagatacttgccattgccgcaaccaatgtccagcaccacagattggggctcaaaggagtccagaaattcagatacttgtggccaaggcgtgtgccgcgtttcgctgaagtgatccgcaatcttatcgtacacctcgtggacgttctgttgctccagagtgatggcctgagcagctagcgatgcgtgcaactcctgtggtaccttggtttgctgtgtgtcgcaaagcgcggggtatgaacagtcgcagggaccttttcgcaggcgtcgaaaagtcaaagaagttctcttgccgcgggcttgagtggtcaaaccgccagatgcactgggtaccacatcaatgtgcttcggtctgatgccatgcgtccaatcgtatcgagcttcacccgacattattagcaaggatcggcgcggaagtctgacttgaacctggtcatctcctcggcggaagtccattaccacgtcggattgcagggacagcgaaagaatgggatccaagaaagcactatgtgtgtccacatgcgggggaattccatgaccgggttcgtattcattcactgtcagctggtcaggagaactccagtcccaggtggaagcgaagctatttagtcgtggccatagaatatcacatgctgatggtatcgactgttccagaggcttcgagggatccacattattggtgccgtaaagaaactcaaagccgaagtgcttgacgtttcgatgctttagagatcccgtgacttcggaggttctgccatcctcgccaatggccctcaacagcgttgactcctcctcttcggtgacaaagtcagcaattatgtgaaggcctctgggaagaggcttgttccactcactttttcccgcaagtgccggtagttgccttatatagctaaggtaggctacagctccctgttgtccaatggtcgatatattgtgcattccctcatagatgagctgggagtcttccaagctggcacaaataaaaaaacagtacgatttgcccggcaacatgaccacttggatgacttttccaccggtcgcggcagcctccgtgagcaaacactcctccgtgagtccattgctgagtcccacgttgagaaccgccaggtaaggggtgggttcagcgcttggagacacctcgcagtcacttttgatgattgccagacatcttcgctgctttttatccgcctttttggccttgtttaccttttgctgtgtttcctcaacgtgcatctcgcggccagtgtgtacaccccttttcaatgtttttctttttgttctaatacttaagtcgattgtgaataccctttcttgcaacttcaagtaattgtagaaactttgaataaagaataataagaagcagagaaacataatgtaggtatatttggagcaagcgctaatgcaaatgccaatatttttattgtacactaacctaataacctaacgctagttgaaggtgagaaactattagtcgggtgcgtacacctctggcagtctaccaaacccggtcaatcatactgttgtcctggggcttctggttcatggtggtcagttgctggtgatagttgcgcatctggttgctgcggcgtggctgcgccaggtactcgaacatgctctgcaggtgctgggacagcatcttgctcaagtcgctgggcatgggatccgtccagaagaagtcgtgattcagagctgtgtccgcatcgatgcgtttcttgggatcaagggtcagcaatttgtccaatagatcacagccggtttgatccttgacatacggacgcaggcgctccttgactcgacgcttctggttctttggcagctcgatggatttgtacagctccagctcctccactcccggccacacgtccggcgtaaaggagccgcatagctgcgagataaaggttagctgctgctgctccgtattgccttgcatgatgggcgagcgtgtccacatctcggccattatgcagccggctccccacatgtccacgggtggaccatagttgcggtcaccaagtagcagctcaggcggccggtaccacaaggttactacgcgattggtatagcgattcttactctcgttctttggaatgctaaaagcacgggccaagccaaagtcagccagctttaagatgccatgcttggtaatcagcacgttggcagctttcatgtctcggtgcaggatctagtaatgcaaatgaaaacagatacatacaatgtaaaaccaaaactttgcttaatg

SEQ ID NO: 26222 - DNA, 1854 bp, DROSOPHILA
cgcgagatgcacgttgaggaaacacagcaaaaggtaaacaaggccaaaaaggcggataaaaagcagcgaagatgtctggcaatcatcaaaagtgactgcgaggtgtctccaagcgctgaacccaccccttacctggcggttctcaacgtgggactcagcaatggactcacggaggagtgtttgctcacggaggctgccgcgaccggtggaaaagtcatccaagtggtcatgttgccgggcaaatcgtactgtttttttatttgtgccagcttggaagactcccagctcatctatgagggaatgcacaatatatcgaccattggacaacagggagctgtagcctaccttagctatataaggcaactaccggcacttgcgggaaaaagtgagtggaacaagcctcttcccagaggccttcacataattgctgactttgtcaccgaagaggaggagtcaacgctgttgagggccattggcgaggatggcagaacctccgaagtcacgggatctctaaagcatcgaaacgtcaagcacttcggctttgagtttctttacggcaccaataatgtggatccctcgaagcctctggaacagtcgataccatcagcatgtgatattctatggccacgactaaatagcttcgcttccacctgggactggagttctcctgaccagctgacagtgaatgaatacgaacccggtcatggaattcccccgcatgtggacacacatagtgctttcttggatcccattctttcgctgtccctgcaatccgacgtggtaatggacttccgccgaggagatgaccaggttcaagtcagacttccgcgccgatccttgctaataatgtcgggtgaagctcgatacgattggacgcatggcatcagaccgaagcacattgatgtggtacccagtgcatctggcggtttgaccactcaagcccgcggcaagagaacttctttgacttttcgacgcctgcgaaaaggtccctgcgactgttcataccccgcgctttgcgacacacagcaaaccaaggtaccacaggagttgcacgcatcgctagctgctcaggccatcactctggagcaacagaacgtccacgaggtgtacgataagattgcggatcacttcagcgaaacgcggcacacgccttggccacaagtatctgaatttctggactcctttgagccccaatctgtggtgctggacattggttgcggcaatggcaagtatctaagctgcaacccgctgctcctgtccgttggttgcgacagagcgcaaggactacttgctgtaggtcgtcggaagggacaaaacgtgtttcgatgcgactgtcttgtggtgcccgttcgctcgtccagcatcgatggctgcatcagtatagcggttattcatcacctggccaccaaggagcgtcgattggccgccttgcaggagatggcacgtgtcctccgacctggaggacgtgctttggtttacgtttgggccaaggatcagcgaaagaatgataagaagtcgacttatctacgtcaaaataaggcagtgaacaaggagcgtaccactgagcagcagcagcgtcagaagcaacatcaggaactggagcagcagctgtccaataataacccacttcctgttcacactaatcgcacagagttccagcagcaagatgttctggtgccgtggaagaccaaggatgagcagaagaccacttatctgcgatactaccatgttttcgaggaacaggaactggaaaaccttgtgtcccaagtgcatgaggtacaattaatcaaaagctactacgaccagggcaatcattgcgcgatttttgagaaactatcaaataactctttatga

SEQ ID NO: 26223 - protein, 615 aa, DROSOPHILA
MHVEETQQKVNKAKKADKKQRRCLAIIKSDCEVSPSAEPTPYLAVLNVGLSNGLTEECLLTEAAATGGKVIQVVMLPGKSYCFFICASLEDSQLIYEGMHNISTIGQQGAVAYLSYIRQLPALAGKSEWNKPLPRGLHIIADFVTEEEESTLLRAIGEDGRTSEVTGSLKHRNVKHFGFEFLYGTNNVDPSKPLEQSIPSACDILWPRLNSFASTWDWSSPDQLTVNEYEPGHGIPPHVDTHSAFLDPILSLSLQSDVVMDFRRGDDQVQVRLPRRSLLIMSGEARYDWTHGIRPKHIDVVPSASGGLTTQARGKRTSLTFRRLRKGPCDCSYPALCDTQQTKVPQELHASLAAQAITLEQQNVHEVYDKIADHFSETRHTPWPQVSEFLDSFEPQSVVLDIGCGNGKYLSCNPLLLSVGCDRAQGLLAVGRRKGQNVFRCDCLVVPVRSSSIDGCISIAVIHHLATKERRLAALQEMARVLRPGGRALVYVWAKDQRKNDKKSTYLRQNKAVNKERTTEQQQRQKQHQELEQQLSNNNPLPVHTNRTEFQQQDVLVPWKTKDEQKTTYLRYYHVFEEQELENLVSQVHEVQLIKSYYDQGNHCAIFEKLSNNSL

SEQ ID NO: 26224 - DNA, 2468 bp, DROSOPHILA
ctttgcttcaaacccacaaaaagtgaaaagtccgacgacattagcaaaaatgtctggcaaattaaaaacaatgaagatcatcaacggatgattgggaggagtggcgcataaatggacaccgcatgagagccaggcgagttcctcccgccattaaaattcccccagtaccgcctggcgacccacaaagcgactgtccacatgttttcttctttgttgtcgtgccttgccggtctgtcttgactcacttgtctccttggctctgctgcctttcgtttttggtttcggttcggttttatctttgtgccgcgttatttttgttgtttaacgacgatgacgacgacgtgccaactttttaatgcgggatcaaggtcttgtagagcgtgcgcctcgcacaacacaggcaattcggagacgcggttagggcacagacatacacacatacccccaaggcccggatggtgcctgttcactgatccacatccaccatgccccatttgggacattccatatgagtgtttgtttgaatgttctatagccaaataaacttatttccttaatattaggtcgctagaggaaatccagtaccaactggggactaacatgggtaaaaccaaaaacgatttatgcatcgttagggaaagacttcaaaactcaatcaatgatttcaaaaattttctactaagccagtctcctttagttttattgaaatctgcatgaaactttatttctattgcaggtagcataggtcgaaactactacttaagcttagaaaaaaagtggatatgcaaaaacatttcttatttaatgatactattaatataatatttaaatgattataaatatttaaccaaattgtgtttttctaacattttattcaagctagtcgaatttcaattacgttaagacctggaggatatggtggccaggtcatgatattaacgttttcacttgaaataaaagacttttctaatcgagaactatgaatgggagcattgtcttgttaaaaaatccaaggaattggtccaaagagatattttaattttggaaatacggactccaacattgttttgaagcgatcgtcgttcatcttttgatcgataaaaatcaagacaattgtcccataaaatgtgatagcaccccacaccattattcccccttcttgtctatggtggcgacttaaatatagctcatctttccgcaaatcgtgatcggcgaattccttgatcttagcagcagatttagtagaattcgaagcaattctaacaatatggcgttctgcttgctttgatagtgtttttttttttcttttaaagttattcccatatgcctctgaatccttcaaatatctgtcaacagttctggagctgcgatttatctgtttggcaatgtttcgatgggacaatccttgcgagtgtaggaagtctactttttgacgttccaataagctcataacagcagctttacccattttttctccctttttttaatatttcgtcaataccaaaagtttacacttgtctacacaatacaaagaaatttaagctgcgtctaattgtcaaattgccaaagaatttctagaatctttgaatgttagcatgagaatttttttcgaacatgattcgaactttgataagaaaagcattttggacaattagaacaagcatggaaatgaataattgattttgttttaaaaaaaaggatggtgcctctaacctaagaccagcagtgcattacaaagcagctttatgggaacaatcaaacaacaacaaagggagctagattgtgggccttacgtcttaacgtcttcattcgtcttcatatatacatatatatacatatatatacatatatatacatatatatacatatatatacaagttaagaaccctcttcttgcgctcttcgtcaggactcaccagcgctcggctctcgtgttttcgggccccgtcagcaggcgactcggggcctgtctagtaacatgttcgtgtaagttaagaaccctcttcttgcgctcttcgtcaggactcaccagcgctcggctctcgtgttttcgggccccgtcagcaggcgactcggggcctgtctaggaacatgtttgtgtatgtgtgcattcggaacaagtgccgttggtcgcactcagggtgaggggtcaacgggggaagcggatataaaagcagcggggcgggagaagaggccccagtgtcgaacggacacataacggaaccgctagcagatcgcgaactgaatcttaaaataaagctaatcgtaaactcgaaccctcttaactatcttgactattatttggagaaccacagcatgttggttgtcatatcaaggtgaggtatgcggcagcgagtgccgagaaccctgatgcaagtggaacttgcgttaacttacatatatatacatatatatacatatatatacatatatatacatatatatacatatatatacatatatataca

SEQ ID NO: 26225 - DNA, 468 bp, DROSOPHILA
atgggtaaagctgctgttatgagcttattggaacgtcaaaaagtagacttcctacactcgcaaggattgtcccatcgaaacattgccaaacagataaatcgcagctccagaactgttgacagatatttgaaggattcagaggcatatgggaataactttaaaagaaaaaaaaaaacactatcaaagcaagcagaacgccatattgttagaattgcttcgaattctactaaatctgctgctaagatcaaggaattcgccgatcacgatttgcggaaagatgagctatatttaagtcgccaccatagacaagaagggggaataatggtgtggggtgctatcacattttatgggacaattgtcttgatttttatcgatcaaaagatgaacgacgatcgcttcaaaacaatgttggagtccgtatttccaaaattaaaatatctctttggaccaattccttggattttttaa

SEQ ID NO: 26226 - protein, 149 aa, DROSOPHILA
MSLLERQKVDFLHSQGLSHRNIAKQINRSSRTVDRYLKDSEAYGNNFKRKKKTLSKQAERHIVRIASNSTKSAAKIKEFADHDLRKDELYLSRHHRQEGGIMVWGAITFYGTIVLIFIDQKMNDDRFKTMLESVFPKLKYLFGPIPWIF

SEQ ID NO: 26227 - DNA, 2424 bp, DROSOPHILA
actgccagtagtgggttggatcccagaagtcacgggaaatctctccggagcgtcccacgcaatcgggctcaccattgccatcgggattgcagtcaaggtcggcgtagatggcaacgcagagggtcaggaagagaaggactaaagctgaaacagaattccgctattggcatctcaatggtttcagcgatgtgaggtcatcaatgaaactcacctgctttcattgtggtttgttcgagtgattaataccgaatgcgattggaacgcaacgttcgacattttatagccacctgctatctattccctgacatattgtctgagacaatcggagctatacattctatttcttaaagaacatgaaatcgtttaaaaataatctcatgatcacgattggtatctgtatctcgacaattcgaacatttgacgccgtcgtacaattcgttttcaaacaaagaagtatatttcaccaagtgttgtagtatacttagttatgatattaaaatattattgaacaaaaaatttgcatatgatttgtttgaattgaccggctcctatttagacaatttataccctgtaaaactttacacactgagacacagtgtttttgaaataaacaaacaaattttgaaaccaagctctagttaaaaaataaagttgtttgtaaaattaaagtatattgtttatactttatatgataaagtataatttacttttctctcgttcataaacattttattgcattaaatgcaaattagtagcaatacgagtactgtctaatctttataggtttccaagatatcatttggacaaaaacatctcaaaaatgttatttacaaataataatgaaactcgttaacactcaactgtactcaacatcctatagaaagcgactgagcagaaacaaaatattctatataccaatctaggttgctctataacattttcccatatcttcgaatactcgcaagaacatgagatattttaaaaatccaaacaatgtatgtaatcatttagtttgccatatattttcatttttgttgttattaaaaatgcaatcaacagtaagcagtccaagaccattcgctccatgaaacgcactccttctttgtggggtcgaatccagtggacaacgggcacaacacagccgtggccgtggaggtggaggactcacaccaccagtagcgagtgggatcccagaagttgcggatgttcgtttgcacgttggatgcgtcgctgcagtcgggctggttgtcagaattgggatcgcacgcatttccggtgcttaggagcgccacgaagaaggcaaggcagatcaaaagtagtgctatgggatcggcaaagggttgaagtatatttcaaatggggattccttttcgatttgctcagctaacttaccggacttcatggtgcaattgagttcccactggtttcgtaagtgtgctttaactgggcgaattcgcaagcttatataccccagaccggcactgatattggctttcatcaatagcagttatctccgttggcgggaagcctgtgcgaaattctattttggcagcgacatgaaatcgtttcaaaataatcgcaccttgtatcgcccaccgtatctgtatctgtatctcagcgcattgtacgcgcccctaagttttgttgacgcaatagtttgattatatggatgtgtcgtaaaggtcatgccgcgtgccacaatccaaactgggtagcactcctatcaataagttaaatatagtacaaaactaggacagtaaggtttataatcgaaatttaaatttgggggcttctattcaaatacctaatacttaaccgtggggaaccccacattcttaacgcaaacaagtcattagaattacgcatttatatttatattaatatactacccttaactgttggtgatagcactaccgcactactaacctggtttttaatcaacccatccgctataccgtataccatacatatcgaaatataaaactccaaaatataacattaaatcgcagtaggtgtcacacaactaattatttgcgatattaatgattacaaattgctcgtgataaatctcccatagcgatggagtcgagggtcaccagcggcacaggtccaccgaacaccattatgatccagctggtgtcccaacagcccagttcctgtggacagatgcaggccatgcccatttcggtgcagacgatacccttgttccccaattccagaacatcgacagagcgaccttgtcgatcggtctccattgccccgaatgtaagacctccaacggatgtccctcctcctcgaaggaatttaagaatccgacccgaggaatatgcgacacccaagcggaagaattcgcaaagccagtttcgtcatttctcccgcagcataaaccaacctccaccggtgtactatgttcttcgaccagaa

SEQ ID NO: 26228 - DNA, 353 bp, DROSOPHILA
ccagtgggaactcaattgcaccatgaagtccgcactacttttgatctgccttgccttcttcgtggcgctcctaagcaccggaaatgcgtgcgatcccaattctgacaaccagcccgactgcagcgacgcatccaacgtgcaaacgaacatccgcaacttctgggatcccactcgctactggtggtgtgagtcctccacctccacggccacggctgtgttgtgcccgttgtccactggattcgaccccacaaagaaggagtgcgtttcatggagcgaatggtcttggactgcttactgttgattgcatttttaataacaacaaaaatgaaaatatatggcaaactaaatgatta

SEQ ID NO: 26229 - protein, 92 aa, DROSOPHILA
MKSALLLICLAFFVALLSTGNACDPNSDNQPDCSDASNVQTNIRNFWDPTRYWWCESSTSTATAVLCPLSTGFDPTKKECVSWSEWSWTAYC

SEQ ID NO: 26230 - DNA, 25002 bp, DROSOPHILA
ataatctaaactaaactaaactaggaaccaatctggcaaaagaaacaaaattaaggcaacgaaaaatcgataaatcggaacgcaatctaattaacacatgacatatgcaaactaggactaaacaaataaataaggcaatgaacgatgatcgcatcgttcacgtcgagttctgggtattcggcgggggattttcttttgccttctccaaaatggctacttacatgggcgtgccttgcgttcgcttccgcttccggttgtcggcgtctttttacggctgctgggtgcctgactcgccgaccggatctgccgcttcggtgactcattctcagcaacgcccggaccagccgattgcgaccgggctgagcacgcacatggacacggaaacggatggaggatggttcggttttcggttttcggaatcggtttttgttttggcatttcgttttattatttgcgattttgttgtatggttggttggtggtggtggcggtttgattgatgacaaaagtacgatttgtatgttttaatttaaattcgcaattgactagagaaattcttattccaaatgttggacggtgtgagagagcctttctactagtgatatttgtgtgggtgtttcaagtgaattattgtacacgttttcatggcaatgcgctacgatttaacctttttcctttccacaacgattataatatagatctctcccaattatatactaaggttaagactaagttggcaaattcctgacaaaatccgaatactaatcagacaccgaaagatacacttttttatttagttaaaattatcgaagtatatatataaattaaaagcgaaatagatgtctttaaagcttagcttaacgcaaagtaatatacagccattatcgaacttacttacatcccagcacactaaaacactcatggccccaatacaccgaaatgatttatatatacgaaatatgaatgaatgattatgtgggattttcctaagtattggccacctcaatatataaatgtaagtagttgtggttttaagggattgactcatatgttctcaaaaggttctctacaaatcatagcttaaacgtagaacatgaaaatcaactttcaaccgaattcagaacacaaaccctcgataaaaactggcaaatgtaagtaaatagaaactacattaggattgtgcacaaatctcatatcccaagaagtcttcggtgcacttgacaatgatgaaaaacgagtcgactccttcgactgtcggggaaaatgcaaatcaaacggttgaagcagttgagcaaactatggcaaaacgaaaatcataggaaaccaaatcaaggtattggtaacggggcgtatacttattgttggagcgtgtacaatgttttgttctgttcccaaactcgtaactctattggtaagtgcattttgtgtacttgtgtcattgttgcaaaagagtaaatttgctattcggatatggttaactttggaattaaaatcggatatgcgtatgcattctttccttgtatcctctgctcaaaggtgagggaaaaagcggggaactactcacttttaaggaccttcttggggctgcccttttgaggactgcccttctgaggcgatccgtgcctggacaaggcggtcttcttgggacttcctcgctgagattccgattcccgcttggtaatagccggcatcagcttctcgcgcgttggcgagggcaacaaagctccctcttccacatctgaaagaaagatcaatagaagagttagtctgagctagtccttttatttatctcaagcactcacccggacctgtggtgcgttcaaggtgatggcgtatattgctaaatcgtgctggcagtgctgaaatctcatccttattatcaatcaaaaaggcttggccaggaacacgcggcttctgggccttctgcaatggcgtggacttcttattgttctcctgttccttctcctcctttgtaataggtctagcaggaatggaaaaaaacctttttgattatgatttctttttttttttaaggtaagcgccacataaaaatgataataggtaagcctcactggatgaaatacccgagttatatttacctatgaactgaagaggctagggaaagtgccgaaagtgagctgcgctttgaaacctgatcccaaagatccttctgtttcttatacaattccggatcaatttctatgccccaaccgcgacactggaattgaagaagatcaacggagttagggtaatgtcctaattaactaatatccaacatatatatagtgtccaaattatttaatatccaacatataaataaggctacaacagtatttgatatactaatagtaagttacaccgtttttaatgtaatgattaatgataagtaacttaaggagacagggaacactgattactaaaggacgatacaacagataaacaattaggtcgtaccttgtattcgccggcttttttgcgcagctccaccatctccttgaaccacaaatccaaattcggtttcgagtgcggcggggcagagccgttcatgaccaccacctggccggattcgccggcctgccggttgtccacctcgtccttgagggccgcggcggccacggcggcgtcggcgaagccaaagttctcctttttcgtgatgaagtggtttaggcgctcctggtcgatggcctgcgagaagggacgcgaggtggtcttgcgctccataatggtcacttgtctgcaagaatcgggagagtcattagcaatgggaagtagtgctggctcctgagagattctgagcttcaagtgggaactgctgtgcttctcgatggctgcagcatgcaacacttgcaacatgcaggtgcggatgaatgtgggttctgaaagctattattatattttggatgatactgctctttcgggtgggctaatgaaggacatcactgaatgagatggcagaagctatgagcaagtcgatttgagggctaggttaatcaaatgttcatacttctcgtgagtttttctatcatccgtatcgctaaccaagggctccaactcatgtagagtagctgaaagcacacagacacgaaatttaatgctgcaatccaagtcgatcgatagctttatacagattctgcctgatgtctgccatcagtgggtacattaagattagttaaggaaagtataattaattgtagaaaatgcaataggaaactaaaggccaaaaaggtggaaacaaaggttaggttttcttttgcaaggtgtctcagatacgctaaacttcaactcagggttaaggagaaggtgattttatattatagtacagcaaataaatgagccggaagcagcgcttaagtgggtggttttgaggtcgtggttgtgattgggtggttagtttgtgtcgggtcagcttactcggctaagagaaatgctaaatgtaaacttcaaatgaaaatcaattagtgtttttggcattgagttcagaaccgaaaatccgaaaataatgttgaatgtttggttgaagcgtgtttggcatggtttcctggtagtttctggggatatgtttgaacaatttcgggtaacttttatttggaatatagaacgaaattcaaaccaattgttgtattctttcttatgcaaaatatgtaattacaattcgagttgaatgcagcgttgcatattttatattttttaattgttagatattttttttttttgtatttttgtaagcactacgtctaattttgtacactatcgctggaagctaaaggcgtcgcacaagggctaaagcaagacaaagcattttgcacttgaagccactaaatgccacttagatgcagatgcacttaacgatttagcatatgggtagaggggttaggtttcattttattctattcgattgcggtttgttcacttccgtttccgtttaccttacctatgcgctttgcttgaactgtaaattttgttagtatttggaaagtggtaatcacatttactgcccacagcctaaactaacccacactaagcttgccaattcgtctagccgatgaattgttatacatgagtattattggtatatacgattgatagcgagttgatgctgatgccgtgttgactgattgattgatggttgtctggtttgatgcatgacactaaagtaatttcgattggttgtcgtttcacacatgcaatgaaactaaggcaacttatgcaacaactcctacgcttcgatcgaaatgaaaacggaatatatcacacaacctgcggtcacaacatgctcatactacacttggctattttcaattcatcaattcatcagttcgtcacgtaaagttgcattgacactgcgtgttggtgggttttttgaattttggatgagaatgggcacgaccaggtaataattccatcaattttcgattgatcaacgcaaattttacgctcggcagtaaaggaaattgaattggcttagcactaataaagtttaaatttagttcaacacttacgtcagctttgggctaaaaagatagtcttgattgtgtttaaccttttagtgtctggtttagttttgtttttggaaaggaatttagcataatttcgttctatatgagatagatttaagttggctaactgcttgaaataatacaacttcaattacaaaagcgttaaacgaaacatttgcttgtacgtacggaaagaaggggaaaatcatacggaaatggtcaagataattattctaggaaatatctatcttagttttgagcactgtagtatacatatttataggtacgagtacgattataaagcgaaagttacgacgacgtgtacataaaaacttgatttcgaattcgattgattgctttgtggcaagtttgcatttttaatatggcggcggtgagaggagaaaaatcgtttagactacgttcatttaccaacactattcaacacttttctatagggctttttatcttttggtttttttttttttttttttgctcaatgctgctgccacggcacaaattttcatttaaaaatcttgaaaaataaacaaatcgcaacggttacggaggttagtatataacaaaatattacgcaatctgccgtgaattagtttgttaggttgatttagtaacgaaacgtttaattaaaaaacaaatgtcaactcatttagtacgcacgcgctttttgattgttaaaaatttgtttttgtattacatatagtagttgaaagaaactatgcactagtaggaaatgtttcgtctgtttcacatatatatgtaatttattgttttttgttttggttttagtatgataaataaatgcttagcgacgacaatttgttgtcgcaccttctttctgatttgttgttcgttttttatgcaccgtcggcaagcccgcaccgccacccatcatcgtgtgatgtgtgtgaccattctgggcttgggtcagaccctgactctggctctgattctggttttgggtgtgactgtgacagtgaccttggccgccggaccgaagggcgcccagcgatatggactttctcggatagtcgccggcagcggccctagacgtcgcctcgccgccgccctttatgcgtcggacggtgggccaaacgaattgcaggcggtactcagtgctcaacttattgatggtctttttcaatagcccatttgactcacccgcctgcgaaagagaagagaagagcagaatgagagggcaaaaagagaacgagaatggataatcgagaaaagagaacgagaacgagaaaagaaagcattgcgcagtgtcgcattgagtgtaaggataagattaatgtttaatttaattaattcaattgggattattttcatatttttcggggtttcattggaacgatcagagcacagttaacatagagaagaagataccggttagtcataggcggagaaacagagaacgagaaagagaagaaatacacacaatacaagtataaattgtaaattttgaacatctattactaattgcgttatattggttggttaacagacccaaaaatacttaaaatacgtttaaagtgactaatactggaggaagtataaaagggtttaagctgcaatgctgccataattaaaaactattaactactttatagtaagtaaaatcacttaggtatgccccaactatgttttaccaaacttaaattaagtaaaggtttaaaataaaatgataataacttaaaaaaaaaaacagataaaatataagtcataacacataatacgagtattgagcattgccccaaaatgtatgctacggaacttatggacaaataaaactcctctctcaacatatgtaaaatcaaattgaatctaacacatactcaacttcacatcttttcacccgtacagagataataagagggagatacaaactagcataaaaccattgtaacatgcattacaaaatacaaacacaatggccacaatcagaacggccatatatgtactaagtattgaaagtatcaggaaaagtatcatcgaaaaaatcgatgtacaacttatgcaaatgttgaagggttttccagattaaaattgtacgatacattcaggtcgagtagccgcccgactaactgacattctgtctgacaactcaatgctgtgctggctcactcactgcaaatgcagtgagcagacacatgcactcatgctcgtgtgagtaaatgaaattttcccatagccgcaaaaggcgcgacgagctacaaatgttcaacagcatgtcctgcacggggaaaattgtcaataaaaggactggaaaagttgcagacagtgcacggagtgcacggtggggatatcggaagctggttgagagacagcatcgcagctaatagaaattgttgctagccaccaagttccggtccattggaccaaggcgcgtcctatctctgatcggaaaacaggacaggtcctatctcccaacaagttttttcacagtttatgtggcgccacgagcattcaatcggactgaagtaggccttcacattgcatttacgttagccttaaaatttatgaacagctagcttataattttgctaataagaagtatgaagttcgtttcaaaatttaagccagaggttcactgaactttatttcgtaaaaatcataactagctcacagtgaacttattttaggaataattgaagggagagtaaattaagtagcaactgattgaaaaacgtaacgtcaaactaaataagtttgttttaaatctaaaacctatagtgcagtcttcgcggtaagactgaccattgtatactttccgctgatatagacatttctggacacaaatgttcaaccccaatgtgctcatccttgaaatgtttcaaataatacaggcatgcaggggggacttgaacttgcaaacacacgtacacacagacaccctggctccccgaatttgaagtgcacacacgagtatttggcttaattgtttaggccatagacaactattgaattggacacccgaatgctctggctgcgtgcagtgcaatccatctgacaattatgtacctgttttcttgtggttccgtcgatctccgtggcaatgggatacgcacgtccattgggcacaacgggtggtccctccgatttgctgcggcgcgaaggtgtgccaccgcgctcctccgactgcagaaagacagagatggcattaaggacattaaagttatacgggcatgtctggttaattagttgctcgtaaataatacgcatccgccctgttgacgtgcgtcatgaggtaaagtcaattaattatgtattgtcagggtgcccatgatagtatgtcaaaagcacactctccccggcatttcgacgcacaaaccagtatttgggtcagtggcgtactaagaatattgccgcggggtattttaatgagagttatactatacattcattttatgcacttttgattgattaacattttgactctattgtaacaacatttagtcactcgaatgataagctaattattaatacaatttaagcaatcgcttttcaacatttcaaagcacaaatggacacattttggaaagcaaaataaatgcccaagggcacaaaactccctcaaaaccttccatccgcgtacgccactgattttcgcacacgtatcttaatgtccttgcaacatttgccactgtgtgcctcattattaattagtctaccgttggagatgaggggcccaaaatgaactaggaaaggaccaagctcacatggagcttttctgaacggcttttgtgtatttcctgtggcatttgagagcgtcgactttttatgagggccgcggcttaaacgcattaaccctaatgccaagcctcccgtaatggcttctgaagcccataaaaatcgtatatgaaagtatactttcaatgaaaactttataccctttaagcctaattaaaacaaataatttacgcgtaatttaggtgtacaattaaatgctcatcttttagcgcgatttaattttaggcagtgcaaggagggctgactatttcctcgcctcctcgacgacttactgaaacatagggtatataaataggaaagttttctactttttggaaaacctcagagcatttcatttttctttcatggtccccttcaaatgtcaaaagcgcataaagcttgtgtggccataaactgaatacactactactataacatgttgaaagctagctgggatttgcattttttagctcgttcatggaacgtgaatatgcacaataatcttgcatatttataagcggacatcttcttaactttttatgcgcagaaatggaagtttggcttaaagtggcaaaaaggttcttaattacatttcggactttagtatataagaaagtatagaaaattatacttttttgtaaatccaatattatagatttgtaatatacgaaattttttatttttttacttttcattgtgctaaaggaacatttcatttccctattccttatgagagataaaatctattttatatatatcatattatagcaattttctatatttaatgctcgctacagctgcccattatgaaggtggaaaattggaaattcgggaaacgacacttactctcgccaaacgatgtgcactggcatctcggcgtccatctgtatactccgatcctataataaactcgtgcgatttatatgctaattctggacattttttccggcgtggcaatggcggctcatttgtcgctcctgcagatgcgcaaaatccaatcgaaagtcgaatcagagcgggatcaataaatagtccgtgacaatgggcgcaagacaaatgccttcgcaacttaccaacaaattgacttgggtttggggcaggcgcccgtcgcacaacctctggccgcgagttgcccgtaaattcatgccagcgataagtgctccgatactccgagtggagctgctgggaggaaaggatgaaagataacagtgcgttgagtcagaaagcaataaagtaatatttcaaaatggataatatggttgttgggttaagcttgacaattgcagaggtatatggcataattaaagagttttttaaaactatttcattcacaagttactcgtaggatatcagctaaaactgatgttagacatgggtatttgtctcttttaacaatacagggttgaaattttttttcactacccatcactcattccttaagtaaaaaaaaaatatatataatataccaatatttgcaatttggaagatattcgcactagcgacgcttacacttgataattctgttctttcgaccaaaaacaaatatatttctatatgagccaaagtttaatccgaaacctcattgcagcgtgtcgagtaaccaaatcaaagtcaaagaaatatgggtttccagtcgtggggggctggaaaaggcaataccttataagtaataacattttatttagcgattaaaatcatataaaatcaaacaggcttagctcttccaactgcatccaaatatgaattccgtttaagtggcccttcctgctgaactaaacaattgggcgcatttgaatatggataataattacagcaggacgcatgacaaataccacaatgagaccgacaaaaagctaaccactgccacatatggccacatgtaaatattttcatttgccagggccagacttttgggcccagggctattggccaattggctggttactcaaacagtttcgtttcgggctctcggccaaattgcggcttgccgcatttcaatgcggcagtacgtctgtccacccactttctccattacaactgcagccatttgataattgcgacaatggccagagaaaaatccatattaatggcctgttttctactgcaacagttactcttgctgccacttcggcagttacggcatgtgtttgtgttattttgcgacttattttatggccacgacagcgcgtatcgatctaagccaagggacttggccatttcgagcagaagtcgttgcatgtaagctgtaaattgggttaagctcttccaaacaacaactggttaagacagctgcagcgactgtcctgaccgacaggacagacagcttttccaggacattctcgtgaagcagccaagtcactcgatttaattatggccagcttgcaactctcctcctgccccacagaattttcgtgtgtctaactgagcttaactttcgttgtctcgacgtcgtttcctgctccacttttgtacaatgaaataattgccgactggcacgcaatgtcaaaagacagtaaacattatattaattatttgcagcacccatttccttggtttagttttaatttttaaacacctaatcgggctcggtcgtttacttcattataaataaaaaggcaataattttaccctttgccatttgaataagtgacacaattttttttttttttaatttgcccaacttcgcatttcctgtgaatagttgtaaactcgtataatctctcctcgtaatgggcttaataaatctaatcacttgtgataatacttaataaattaagctgcaatagctttctccctcgctccacatgccctgcggcaaggatacacttataatccaaacaatgaccccagaggcatttaacccagttgcgggaagaccccttcagtctagacacactccaatatctgccaacgctttgcaccaattaagaggagccgtggcaaatcattccacggcaatcaataaggctcacttggccggaatggatcgagtgccacgccttcggtagcgtcataccacgagggcacgcaccttttgcataatttagcagtaagagctcatttcattggggcaaaactcgggcctacgagggctcgtttttcatatgaattggcagttgatgtcaggagcgtagccttcgttcgcactgccaaaagtgcggggaggtttgtgccacgtggcagactcgcacctgcacacaacgttagagtctacatacatatatacacacttatttacgacacagctaactttcagtgtattttctcggcagctgcaacaatttatcatgtcaagggaggtggttactgcaaaaaacttatatttctccaactgatttatgtttgtggtccaatgtggtgctccaattgattgcggtgaccaaatgcacccgagccccagcataaatatttaaatagtgtagtagcttttttcgatagtgtgttaaattttaatggcgtataaaattttaagcgttgtgcgtcttttggggctggtaggcgatacggctttaaatttgaatcatttgagtttcttgcgagagtgaaggcaatccctcagctgcgagacactgcctccctgtgcagtgatgttgaaatcccgataagcctgctgacatcccaactgtcccacagctgacagatgggcgggcggcagaatcctcctgttggttggattatgtttaattaaaattgaaaagggggagaagagtacggcttaaagggtcagtgcgctgacaccaagtgatttttaatgaattttccaaaaggtaattgccacttatttggcatgaatactgggcacatggaacggtgcccaatttgtggtgttcctaactatcccataaataaatgtccatgctgcagacatatttcttgtatagattttcctgtatccgatgcacattctggagataaatttatggctcatgtgtagggcgttggatttcagtatttttcgtagcatacttgcaagcgtcacttgcaccataatctacacactcacacactcccaagtccctgaccgcagaaatgtgtgtgtgtgtgggaaattcgtgtgcgtgtttaatctacccgaagggaccttttaagttttatgcgggcaaaacaagcaaaatgacacctcgaagcatagttatcgcctcggagatccttgttttgcggtcttatatgtttgcccgagtattggtatagtcctttgaagtgccaaccacatttctggggaccaagaaaatgtctttgtcctatgcgtttcgagaggtgagactgcaaagtttgttgcacattgggcggtatactgttttaattatctattgtaagtcatactattttcaactggcgatattattaaattaatgtcgaattagaaactgaatttcctgtccgattgtaatttttattaaaaaaaaaagttccccgattgtacaatagtagaattttcaattactaaacttattttttctcttcagtatggttgcaagtgcaactttcacattcaagccgcttaaataaatattgaagttatgcaaattgctatcttatcctaaaagtgcagtttggtaaaaacttcctttgttgttattccccttctgttacttttgtcgcagccctcggcttgtttgaaaagttttttcatttactttttgtttacgatgcatttttgccatttgacaccattttgtctggcacggacaacagccgcatacacacggtgcttttatggtttccgttggccaggccgagcctacaaagcacctgatcaggtgcgctccacgttggccgcaccccgttcgcatttttctccggtgcgtgcctttgtgccacagcggcttagtttgctcgattgctcagctaacttggcccatgggatgtttgctgccattttgcgttggcctgtgccgtctggcaattaattcactcagcagtgccccaggcgggcagaaatgatgctgctgccacaaatttaattgccagctgcacttctgagaatgagacacgacccgaatcagcccgatcgactgactgacgcagattgaccagtcagttaatgctaaccacttgcaaaagttaaggaaaacaataagaaagtatattgaaatataagccaactcgagtgattttcttatcttagttaagaatattctactgacttgaaaataaaatctttatttgtcctaaaaaataaatgtatcgaccctaaaaataaagtactttctatggagtatacacaacctttagaaatgctacgcatcggtccgaatatttatcattaagtattaggaagctatatattatttaaggtatttattgcttatagacacgtttttcccactgtacaaatgcaccacaagaggtcgacgaggcaacgaggcacatcgtgcaccccagcgcaagcaaagtcccggctagaggtcaccttcattaaattaaagaagactgctcatttgcatgagcgccttcgttccgcttttgcagtttgccttcatccataaatatggatttagtttcctttcaaataaaagcagaacaacctgcggacgacatttaattagtggcaaataatttacaaccgcagccagtgttttaaagaagtcatctcgtacattgattaaggaaaaaaagctgttcgggataatttataggcacttaaattatgcaattatttgaaaattattgaataaccacataggcatataacacaagcgttagagtgaaaaagatatgatcgcgtggccaagctattttcacagaaagatagaaatttgcaagaaaatgttcgacatttatacggacggatggacagaaatggctatctcggctcgactaatgaatctgattaataatatatttactatataggaaaactgtatgaaacaatgagtactaattcatacagccttgtatttagtagagtagacaatgaactaattttaatggatatgtttgggatttaatcttttactccctaaatatacctcttattttaaagaaatattcttcctatcttaaacacctaatatttaaaatggctcaagtaaaaatcacatcacacaaactaagatctgatgtgcttcttattaaattaattttacccaaaaagctttccccacccactaaagtttgggagaactcccgacgagttatgcaacaatttaatgtcaacatacaattaagctagaaaatagcgaggcgaaggcagtcgttaaactcagtgcagcgatttattttcgccccaaaacaaaagtcagacggcaaaaaggaagacagacaggaaacaggagtgcagagggcgacacatagacgacggctaaaaagtcatttgtatgcaaccgcaaatcgagggacattaaacttttaagacgcttttattgctttccccacggcccatgtgcccatgtgctccacatcgtctgtgtccttttcaattctaatccttatacctttggaccgcatggctcggggcctttggattcggctttgattcgacggcttagcgttgacatggctgtcggtgggacagcctgatttatgtggcccagtccttgggcaaatctcaatcaaattgcttgtggcaactgcgaaaaatccaccggcgagctctataaattctgcataagcagtcggactccttaattttctaaggtacattttgttgcacttggaggtacatcaggaataagattcgtacattgtgtctttcagatatgtagtcacgtttcaattttcagtatattacatattaccataaataaagctgccacgaagttgagctagtgtatctcaaaagcgttctctcttacttacgctaattttttcgaataaaatgtatccttaacttattgttctaaactaaataaacttaagagcattcatatagtgaaatcaatgtgcattgttccgcatattcttcggcttataactttgaatgtgcaaataaactaaagacttccgttagtttcgaaagcattaacccttggaatcgctttgcacaaacaaatgaaaattaaaatccatttaagttatcaaattctttcctcgcacactctgccagccgcagacaatgacaactttttacacatacttgggccgagaaattgcacttcctgagcaatttatgcaggcaaacttttgtgacaccttccgcccacctggcaaatattcgtcatacctgtgagcagaatgcatctgaaattatgtgcccctccaacggcgcagcaacaaaaacatcagtggggtccggtggggtgggcagttataattgcattttcctgtctgtcgtctgcccccgagacaaacttcaaatgcctgagccgccaagaaagatactcgtaaatgcatctccatttccatacatgcatgcatctgctgctaaacgttatttaatgttgagcaattaaattgaaattcgatagtgcctttaagcttggaaaagtcggaaaatgaaagaaaaactattttctgtcgcttgtgcgtgccttcaacggttgttgcttttgttttccttgtacagcgattaccgcacgagtgctttttgtcagtgtgcgggtgaacgaatctgcctgcgtctgtgtgggtgagtatctgtgtgaaatgctctgcttagtgcactcatgtgagtaacgacgctgtcgacaacgcgactttcccatcgatatggcacgcgctcagctttctgtcccctaataccatgaaagcgtttaaaaaaaatcacacaaaaccacaagaatatattgtgtagaaaatataaatagctgaataacactaagaacacttatgtgatgttatcagaaagtttgttaatcttatttttgcattgaaaaaatgcttaaacactctttttaatattgtacaattttaaagaaggcaagggttcatagttataaatttggcttccatagtatccaaattgtatcttccatttctttttaatttcctttaaaaaaaattaaaattctagaagagactagcactgtgagttaagtaaggaatttcaacttcgtcataactttctttggcgtctctctatctggccgcggaatctgctggcaattcgaagctcctccaggctgcaatcaaaatgcattccgaatgaaaatttccgcttatgtaagtacaccgaacttacgtcagccatgatgggaaacgaaacgcaaaggaaaataaacgaaaaacaaaattaaaatgccgcaaacaaatgtgatgtcaacttctcagtagtgaactcatttcagcatccttcgaatactcgcattaccgcatttccgcttttcacggaacaaagtagaatcattatgccaaaaaaaaaaactttagcacttatcagcgcgtttagattattcacagcctttgtttatccaagcacgaagttttactaaagaatcataaacaaaaaacgaggctgaaatgcaaagtgagaaaacttcgtgatatttgttgttcctttttgtgacagattttgtgcccttttcagttcctgaatatagccccatttgggactatgtccagcttatttgattaatgtagtagtttgagataggcaaattttgagttacatcattcataacgtcaattaagtcatcatcatcgtaaacattaaattacgctattttcttatattcttctattaaagctgaatatttttaaatgatccattctagccagtgctgaaataacttgggccggagaagcagagcagtctagccaggaaataggctatcggaagtattaatttagtggcaaattgatgcagtcagacgatgaaggattttaagccctgtaaacgaacttgatgggggttgttaagtgtatgaatatgttatgttagctttgctattcagtctagaaattagaaactctctttattgcgtggcaaacatttaattagttctctaacagaattagctatatttaaagttacttttctgatgcgtaaatccctattaatgccacgctaggcttaaaactaaaaaaccattttctccttgctgtacacattttctcgaattaccacattttaatccagtcattgaactatgctgaaacagcagcgtgttttcgacagacatgtctggcacattgcgcaatcagcggacctagctggatccacttaagcccagatgaactttactcatgatggagcggagttggccaagtccctgaatgctggcaattgaaaacgctgaacgttggttgaatgccattaagacaatgcagcacagaatggcactgcagaatgcaaaacaaacatcaatgtttgaatggatatatgctaatgcttctgtgaatacagatctcttggctgtgcacataattgtccattgtcggcacttatttttgttgcagttctttttatactttagctgcatatcaaattgccattgccatcgcaataaaatggcaaataatatgaaattatatccaggcagcgaatgacaaagtgccagcaaagtttttccttgaagaaacttttagaattttgaattgaggctacgatgagttgtcgaaatattggtgagttatggccatgtaaatatttacttcaactttgttaaaacatgttgaatattccaacatacagtcgcatttttcggctgacatcactccgatattttgggaatattatatgcacttaatcccggccaattggcagcgacttcctgttcgcttgccaaaagaccaagctaacacattacttataagcaaataaggtcagatgagaggggcaggacactgcttccgcttccacctcccctggcttcgcatccccttcagggccacttaaatattttacgcttttgtattgttaagcaaaagtttttccccatcccgccggccaaacgcataaaaaatgcatacgcacacaagttctcatatcgtttatataatgggattttcacacacacacatttggggtttgtttgtgttggccaagttaaaaacaaaagcgcagcactagagcctgaaagcgtggaacgtttaactttttatgcaaaagtacgatatttcctctttcctccattcgcggctaaaaagtggaagtgcagccaaggattctaaaagcatgaaaagctagatcaggcaaaaaatgcctaagtgatgtagaggagaccacctgaatgtaatcatcgttataaattatggtggcacacgaattacacagagtttttatgggcatttttttgacataagacaactaaattttaaatatttggtttgtagcataaggctgataaagtataaggtggatatagtggatatctttgatgatgaattgtttgttttttattctatttgaattcaagatatatagaactgaccaaggaatgcggcatatggaaattaatggatggcagccatactaggtgatgacattaaaagtgagacgcctgggagccctaagagcttcttaaccagcaaagctgcgatattcccccccctccaccaactgtccaataaaattgccatcagcactgtcagcatcaacagccccttgcaacttggtcgccagccaagagccaacatggtgaagggttcagaggttggggctagggttgaaaaggggttttgaagactgcgtcagtgcagcggtgacaggccgggtcccatccatatggtatactcgtgtagcgtacagcatatggcatacggcaagtgccaagcgccatgtggcatgtggcacctggcaggccgttggcccggccctgtaatccattcacttgcgcagggaaattattataattgcattagttcaaaggcagaaaattgaaattgaaatacgttagacgatgtgatggcacggccgctgctctccaggatgctgatggatggatggtagaatgtatagctgaatggaaagtttgaggcactgaaaggtggcagtactggagccaaagttgacgtaatgtgccaaggatggggcgtagtcgaatggaccaactattcggttagcgatgcgcctttaaaattaattattttttcttggcgtttttcggttccttcctgccccaaatgagataagacggaaatcatcagcaaatgggccataattggcttttaaccgatgttctcatagctgaatctaatgtacgccgctcttgccgggtatcaaaagcttcggctttaatggaagaagttcggacccatacaagttctaatcgcctgacattgatgagcacgacttgatagacatttcgtgctcgttcgacattcatgtatagtttttaatggctgtcgaataggaaaatcaatatgaaaagttgttgctgattaacacgctatgagagcccgagcacataaaaatcaaacaatcaaggctatagtaaagttgcctggaatattcaggagcaggcaaagtgaagtgcgatttttgttgattgatttaacaattcattctttttattctacttaaagcaattatattatattatgcagttacttttagatttccagtttttaaacatgaaggagacttctgttccgtcataatatgtaatcgataaaaatacaatcagcattgcaagccaattgcgaatttaaaaaaaaacacaagtaatttctcccaaatagagtaaacatcagacggcagcagattaaataaaaacttctgagaaatgtaaaaattttatattcgctctgcatgcgattcactgatttgtgttgaaaatatgcaaataaccaaatgactgactgcctctgaaactgccaacctgaaaacaacacaagtccggaaaatggaaaaaaaagaaggaaaatctctcatgcgacatgtgcttcgcccactgccagccgctcaaatgttaaaccagtcagtcagttttttgtgtacacgtcagcacaattcagaacagttttccagtacaatttcatataaacggaaaacaagtttcattttacagaagagtatttttcatttttgatttcacaccaaccacctccgaacacttgacctcaagtaattagaaaacttttcacccggctgcagctcctccaccaaatccatggagatgaacatcggttttcaacaatcgccaaaaagacaaaacaaaaaagttccttctccctgggctcctgggccgcagtgggttgagttttcctctggtttccccattttcagttctggccattgagccgagtgttgtgggaagacagcggcagagaagtgcaaattgccctcgttagatgcaataagaagggttttccgcagaagaaggaaataaaagttcaaagttctcaattattataatacccttcaagggtagggaaaccaatacccttgatatcaaagcttaacaggattcacaaggaatattaaggtttccttcatttatctcacaatctgcgttgatgagcgtaacaaatcatattttataaataatataatagttgttaaaaatgcatacgtctaagctctgagtccttaaataattatttgcaagtataattgttggcacatcctgcattctacaaaacatataagttctaatccacagtcagctcgcagaaaatgtgtcaagacaaacttagaaacacggcaaagagtggaaactatgttgtgcatggaagtggccaactcctggcagttttctgcatccagaagatagccgagcaacaaaggcagccgcctcgcgttctacacaatccagcggaagacattgcggatggttatagatggaggaaacaatagtccggatatagctgcgagtgtcagtgggagataactcggcataagttaagtgaacgtacacagagaacaattttatatttaattcactccacaaaaaactctcaagctgtaacaaaaagatttcctatatgcataagttgtaacttaattgttagagactcctactaccatcgttttcacagttttaatcacatgtaatccgttcttgaaaaaaattgcttttcaatatggtatttccgccttattcgtttgatatctctttcagtgtacgtcggggcgacgcccagttgactgcaaggatttgccgaatcgcactggatcgatccgaggagtgactaagaattaagcatggcagtaaccatatgcaagctgaatcgataagcgtgtggcatgcaaccgacgtccgattggcgacacttagccggcacttgttgttgccgccgggcaggaagatgggtgcatgggtagctcgctgggtggcaagtgggtggtaagtaggcgtgggaatgggcggtgaaggtgccgccataaaagtttgactactctgcgctgatgtaataccgcaagacaatttgcttcgaacgtcatatggctgaacaagcagcgggaagcaacaacaaaaaacccaagcaaaagccggctaaaaggcgctctcctcgctccctcttactttctctcagcgcccgctttcttcgaatccctatctctctcctcccatttctctctcagctgcacatgcgcgaggtcgtggaatgacggcatgttgtacccttcaatttgtgcgcaatgtgacagtttttccaaagtatacaagaatagtagttaacgctttaatattttgaaaatattttcaatggacttcaggtttatttcttacatactagaacctaatcgttcactttttaattgatttgatttatccatttatataacaagagtgtttccactgaaaaccaagtgtcggaaacgcatctcctacaatccacaatcttatatgtatattttcacggcaaaatgatgaatcagctgttttgcacagcgactggaattcgacgctggaaggctagagagccagttcttcttcggtcttccgtctccgacggagtaggtgcccgtgtccgcgtccgggtccgaaccggaattaaaatccgggtgctataaggcaccccggccggccacagctgtgggcccaaacaagccacaagccatatgctattgattttctgtgccttttctgccttgttacccatttttctttccttttgacttggtgccgtgtttctctttgtatttcattttattttttgtgggctgttactttacggtgacgcgattggtgtcgggcgtaatgcaagttaatttattcgctgccagcgaattttagttatttactttgggactccatatatattcgctctacattgtctgaaataagctgagaaatattgcatgtctctggacaaacgagttgtgacgacactccaaggattgcggacgtaaggtgatattgatcaacattatgaaagctggtaaaaaaaaatgtggccaagggaaaatcagttaggtgaaagagttcaaggaattcccgcatgacattaattgaaccgaaatctagtcgagtcaaactagaaataattaaacaggactttaattttgtgtttatgattggacaattaagaaaataaataatcagttaatatttgaattgtaattgaaggtaaatcccaatttcccaaaaataccatacccttgcgtaattaattaaaatttgaattgcaattttgggagttattcacctcatatttcaccataaatttctgattcggtcccctgagtctgatttaaccctccaatttaattccgaatatggaatgttaaagtccccacacattaaaaattcaccctaatcccgcaattcttcaaaacaagtcataattcaagccaagtcaccccattttcgactgcagccctttcacttgtcgcccgcaagtatgcaataaaaatctattatgtgtcctgcactcacactcaataaccaaagaacttttatccgtaaaaaaatataacttaactgcttttggtatattattatggttttttttaccgacaacaattagcaaatcaactttaattatatagacgcttaacatttcttttgcagttagggatattattttacaacattttgcagggtggagaggggtcttttttccgggggcattgtacgttactcaccttgtctaccggcattgatgggcacgctctgcacagattccagaatgagccaatcatagggaaatgcttttgctgtttgccaaccaaagtgccaaaaatacaaattaaacacgcgcgcgtaggggtttctcttctttcgatcagcggcgattgacgttgcttatgtttaacaacttttcatgggtcacacacacgcgcctggcctttaaacctaaatatttcacctctcgctcgctctctctatacgcacacgcacctggacaatgcgtagcgaagaaagtgcgtttgtattgtcataggccaaattgacttccgctgcggggaaaatggtggcgtgagaaaaagtactgcataccagcgggcgccttgttcctgcgatgatctcatgcccacatacacacacagccgacaaatttgatggcccactgaaaagtgccgcaattagcctataatacccgcttgtagcggacaaacaactttattggacattaaaaacagaaacttgcgcgagagccacgctcagattcttattttcttgccctagccaatcgatatctatttttcatgacagccccgtggtatgcaatactttttagccgcttcgcgctgcctgcatatcgcacttctgtcagccgcttctttctcctgcgtggtcgtggttcgtggtcactgaagcgaataccttactctggtaaggcaaggtagtgccaaaaaacttcaggtgaagcactgggaaacacacttttcaagattgaaccgattttctctctgccgctgctactgctgctgctgctgcctgctcatatgtatatgtagctgtgagaatatgctatggctcttttctggcggtttcaactcgacgacgttacgaacacgactgaacctgaactgaaaggtcccacaaataatccagcgagcgaagccaaagcgacggcgttggagttgacgcagggcctggaagttttgggggagagagatttggaagtggaatggaaccgcgaatcgaattggaagccacactgaacatctgtttgcatgggcgtcggtgggtgcacgaaactgcgttaccaataggcaaaacaagcttttagatacttgggaaatttttgggcaagaaggttaggtctgcaaatttaattcggttggtttgccttacaataacctggcaacgctgacatgcgcactgccagcggttagtctgtgatgtcaaaacagctgatgtgcagcgataccgttggatttttcggcggctcatggaacggccacacattggcttgtttacctagtgagttaaatattttttgcggatttcgataattaactatttgaattaaaacatttaaaatatttctagtaaaatctgtaatgcattgaaagaactaacggaaaggatgattcgcttacggcaagcaatttgtgagcaggtgagcataatattaatggagctacccattatgtcagaccaaacttgtctcccatattccagctgccgcatctcaagaatgcctgctatgccctggaggtgcctgtcaagaaacaacagctacagaatagccgacgtccaactgtggagtggattctgccctctgcgtttgcgcaacaggaggtggaactactggactcattgaagaagcgcagattcgaggcctatgtggaaaacgttcggattgtacctagcgctgggcgcagtgcagccaaaatcgagtttcagctgcagccacaggtctttgtagaacagctcctccaaactaaagagattgctttacatccttcgccctttgctgcggaacacatagtggttgagtacagctcgcccaacatagccaaacccttccacgtgggccac

SEQ ID NO: 26231 - DNA, 2591 bp, DROSOPHILA
ccagaaaagagccatagcatattctcacagctacatatacatatgagcaggcagcagcagcagcagtagcagcggcagagagaaaatcggttcaatcttgaaaagtgtgtttcccagtgcttcacctgaagttttttggcactaccttgccttaccagagtaagcggaagtcaatttggcctatgacaatacaaacgcactttcttcgctacgcattgtccaggtgcgtgtgcgtatagagagagcgagcgagaggtgaaatatttaggtttaaaggccaggcgcgtgtgtgtgacccatgaaaagttgttaaacataagcaacgtcaatcgccgctgatcgaaagaagagaaacccctacgcgcgcgtgtttaatttgtatttttggcactttggttggcaaacagcaaaagcatttccctatgattggctcattctggaatctgtgcagagcgtgcccatcaatgccggtagacaagctccactcggagtatcggagcacttatcgctggcatgaatttacgggcaactcgcggccagaggttgtgcgacgggcgcctgccccaaacccaagtcaatttgttggagcgacaaatgagccgccattgccacgccggaaaaaatgtccagaattagcatataaatcgcacgagtttattataggatcggagtatacagatggacgccgagatgccagtgcacatcgtttggcgagatcggaggagcgcggtggcacaccttcgcgccgcagcaaatcggagggaccacccgttgtgcccaatggacgtgcgtatcccattgccacggagatcgacggaaccacaagaaaacaggcgggtgagtcaaatgggctattgaaaaagaccatcaataagttgagcactgagtaccgcctgcaattcgtttggcccaccgtccgacgcataaagggcggcggcgaggcgacgtctagggccgctgccggcgactatccgagaaagtccatatcgctgggcgcccttcggtccggcggccaaggtcactgtcacagtcacacccaaaaccagaatcagagccagagtcagggtctgacccaagcccagaatggtcacacacatcacacgatgatgggtggcggtgcgggcttgccgacggtgcataaaaaacgaacaacaaatcagaaagaagtgttgcatgctgcagccatcgagaagcacagcagttcccacttgaagctcagaatctctcaggagccagcactacttcccattgctaatgactctcccgattcttgcagacaagtgaccattatggagcgcaagaccacctcgcgtcccttctcgcaggccatcgaccaggagcgcctaaaccacttcatcacgaaaaaggagaactttggcttcgccgacgccgccgtggccgccgcggccctcaaggacgaggtggacaaccggcaggccggcgaatccggccaggtggtggtcatgaacggctctgccccgccgcactcgaaaccgaatttggatttgtggttcaaggagatggtggagctgcgcaaaaaagccggcgaatacaagtgtcgcggttggggcatagaaattgatccggaattgtataagaaacagaaggatctttgggatcaggtttcaaagcgcagctcactttcggcactttccctagcctcttcagttcatagacctattacaaaggaggagaaggaacaggagaacaataagaagtccacgccattgcagaaggcccagaagccgcgtgttcctggccaagcctttttgattgataataaggatgagatttcagcactgccagcacgatttagcaatatacgccatcaccttgaacgcaccacaggtccggatgtggaagagggagctttgttgccctcgccaacgcgcgagaagctgatgccggctattaccaagcgggaatcggaatctcagcgaggaagtcccaagaagaccgccttgtccaggcacggatcgcctcagaagggcagtcctcaaaagggcagccccaagaaggtccttaaaagtgagtagttccccgctttttccctcacctttgagcagaggatacaaggaaagaatgcatacgcatatccgattttaattccaaagttaaccatatccgaatagcaaatttactcttttgcaacaatgacacaagtacacaaaatgcacttaccaatagagttacgagtttgggaacagaacaaaacattgtacacgctccaacaataagtatacgccccgttaccaataccttgatttggtttcctatgattttcgttttgccatagtttgctcaactgcttcaaccgtttgatttgcattttccccgacagtcgaaggagtcgactcgtttttcatcattgtcaagtgcaccgaagacttcttgggatatgagatttgtgcacaatcctaatgtagtttctatttacttacatttgccagtttttatcgagggtttgtgttctgaattcggttgaaagttgattttcatgttctacgtttaagctatgatttgtagagaaccttttgagaacatatgagtcaatcccttaaaaccacaactacttacatttatatattgag

SEQ ID NO: 26232 - protein, 537 aa, DROSOPHILA
MIGSFWNLCRACPSMPVDKLHSEYRSTYRWHEFTGNSRPEVVRRAPAPNPSQFVGATNEPPLPRRKKCPELAYKSHEFIIGSEYTDGRRDASAHRLARSEERGGTPSRRSKSEGPPVVPNGRAYPIATEIDGTTRKQAGESNGLLKKTINKLSTEYRLQFVWPTVRRIKGGGEATSRAAAGDYPRKSISLGALRSGGQGHCHSHTQNQNQSQSQGLTQAQNGHTHHTMMGGGAGLPTVHKKRTTNQKEVLHAAAIEKHSSSHLKLRISQEPALLPIANDSPDSCRQVTIMERKTTSRPFSQAIDQERLNHFITKKENFGFADAAVAAAALKDEVDNRQAGESGQVVVMNGSAPPHSKPNLDLWFKEMVELRKKAGEYKCRGWGIEIDPELYKKQKDLWDQVSKRSSLSALSLASSVHRPITKEEKEQENNKKSTPLQKAQKPRVPGQAFLIDNKDEISALPARFSNIRHHLERTTGPDVEEGALLPSPTREKLMPAITKRESESQRGSPKKTALSRHGSPQKGSPQKGSPKKVLKSE

SEQ ID NO: 26233 - DNA, 6592 bp, DROSOPHILA
ttaattaattattttcgcatacttagcaacagctatgacgccagtcacaaagttcacagattccaaagatcaaaacaaatcgtaattcaattttcgttttggccatttttcgaattcgactgcgtgggaatcaaagtcaaggggcttgacaaacgtaacgcctaacaatggtaggttggcaggcggagagtaaacgttatgattaaaaaacaataagcaataaacaataagcccgccacaacaaaagtggaagaccaatttttaaactattgttcttctgtccccctttttttggcaaaccaaatcgacaactgctatcaatcaccgaaataccaccagatgaagagccacaggggagagagacagacttttatttgtttaaacaaatttctagatgacttcacgcaacagtaacaacaataataagcataataaaaggcttacgaacaagattttcaaattaatgtacgtacacaacacacaaacaccgattgccaaagacatccgagcgacagaaagtcttaattgaccgcgataaaaatagcaccagatttgcagaaaagtgacgaggcgaataacaaaactggttgccttaacttcagggttccccaaatcctaaatccctcatcgtgcgacctattgtcgtgggtgtggaatttcagggaggtggtgcttcaggtttaaggggaggtggggagcctaccggcatctcagagcttcaagaaaattcgcggttatagtttattatgatttaaatgagttttatagtttgacacatgagcgaagtcgacacgacacgatccacgaagatatcgctcggcggaccaactgtacatgtgtacaagtgtaaaagtgtcggctcagggggatatagtatatatactatatattctatatatactacaccttcttcattggcgctcgtcgagcggctcacttttggacactcatatcgcgtagaagatcgtttaggcgtagttctttttatcagtcgatcccgcttcgtcgagagtgcgccaagtgtcggaaaatattacatcgcttcaagaaaattccacaccagataacatctcacaaaaaaggatactttctgaagcaaaatgtcgcgatcatcgattatgatacgccgcgggttctgcagttaaaaacattgacataatgtaaagtgatctttccataactatcgatcaaattaagtttagcgtttcaaaatacgtgaaaatcggtcttatcatagaatttgacaagtaaatattaggaaaaaacagtcccacgcagaataataacttctgttttaatataatttgaaattgaataagtaaaaagtattattttacttaaaagctactttaataaaatattattctttgcttatatttttgaaaagtctcaaaagtgaagttttcacgtccgtttgaaacagtaattatctatctatatttcaattaagaacttttaatactataatcataataaactttttccttgactacgatactatgacgatagaaacctgaagaccccaagcagaatcgaaactaaatccgcaaatactaaaaaaaaaattagcattaatcatagccccaaagtgcctaagtacaagtggggggatcacatcagcggtatctagaagttttctcttacaaaatcagccaagtgaacaatcaacgatttctataaccgagtgcaacttacatatgaatagcaattgaggtttgtttacactcggtgcacggcatttggcgactgcattatcctttaattcgcgcactctgactctcggattcaattgcaactgcataggcgcacgaaaactatatataatatagctcggatctagtaatcagctagtgtacggcgcagtgtggggaatgggcatgcgcttcaggttcaagggcattgtggcaacgcaaaaatatgtacaacccaactaagcccaatgcgttcgctcagataataacccccttaagttccccacaaaggcgcgagcgagtgaagaaaaggctccgaattgctctcaattataattgaatcagcgggcggcaaagaaacacccgagcgatacccgccaacgaacgatcccgaagatcgttcggccgatcggccgtcggccatcggcgatttccacggctccatggcgtcgcagttttccaagatggccggcggcggtctgtcgtaacgggtaatcatacgccatacgccacttccgggccttcgagtttaacgaaagccagccagccagctatctacttaaaatctagcactttttgcacctgcaaaaggtattggaacgtattaattgattgcccgatttccagcaattcacacagtgcgccaaaagtggcagcacatttgtaatcacacgggggcgtttttaagccaatatttgctcagtgtgttagcgagttttggggcctcgtagactccagacaccaacccacaaaccacacacggcgagaaataaagtgatctcagaatatatatttataaaatatttgaaatattcatattacccaagacaaggcgtagactaaaattcctctaaatttgtaaagttttacaataacgcaaaactattccaacattctgcaaaatccaaaatctttctgtgcatcacagctcaaaaatccaaaaactggtttctcaactacgcacagattttgattaatttgctcgcatattttagccaactcaattttggccgccgtttttgttgccggcccttgtttatcgccctatatgtttaatcagtcagcggatttttggtttgcctaatcaaagaaagttttttatgcgttgtcgtcaggcaaacacaggctttttttgcgtttcctattaacttttgtttatgttttgcaaacaagtttgaaagattcccagaatcgttcgagaattgtttacagtaatgcgatgccgaaagtaatgcaacaaataaaacctaaacaagcttaacgcttcgctagctaatttagtctaatgtgacatcgtaactctctggattcctggcagtcgattgcctgaagttacataatctggggaaaaagctggaaaaacacagaacttgcatttttgcaatcaaacagatgtgatgagcaaatcagaaataaacaaaataagattaatagcgaatgccaaataaaataataggataaaataaattcgaaaaaaaagagggagacgatagctgaaatccattttaatgtatttttttaataaattaaatctgtcagctgaacaacaaattggcatatttttttaattcattatagaaattataaaaataacaaggcaaattatactaaagataaagaagatgaattttgaagtaaaccgctcctgaacgttggaatctgcttacatactaaacgaatgagtacttccacttctgacgttgacataaattgtaaataatatgcacaaacaaaatcaaaataataaaataaacaaataaaacatgggagtatcgcaaaggggggggtgtggcaaatagacttgtctatcccaaaaatagctcctatcatgaagaggcccatcgagtttggactcacattaattacataattcccctactaattcaagtgatatgtatgtatctcaacgatagtagtttcttaaacccccttgggatgagcagtcagaaccagtagcactccaagataaatccccggatagtctggcgataatgctggtgattgtgatgatgctgtcttatcgctgcgtcaaaaggaagacgcttagataactgataactgggaccacgagtgtcgcatccaacgcacgactggctatctttggcggagttcatccatccaggcagttgggaaagttagccagtcagttgggtccagttggctcgggatagctcagagcgattgatagcatagatgcctcgtagaaagttgcagtcgataaacttcacatcgaactatctttgcaggcctttgaaaatgtcaatcagtcgctgaaattgggctataaattggcgctccgctggcgtgtgatattggaaagtaactttttcgcatacttatttgccgattgcaggcagtgacaaaaaaacgaagttgcattgcaccgaggtttttgtgcatatttgcgcgttttaattgccacaaccacgaaagcagcagcattgacaccggcggcggaggcgacgacgactgcagcagcaacttctggccgtcaccatggagaatcttggctataaggagggcagcaccaagccccgccgcatgacacgttcgatcagcgtcgttaccaagaccgaagtggaacagccgctcacggagaataatgcaaataaccggtaagtgccagttggagttgccagttttcagttgcctgttgctgttgcagttgcagaaatttctggccacaataaaacacactcaaaatatacacagatataggcgtgattgccgggcccaaaaggcaaagacgcggaagcaaatccgtgatttatgtgacaaatgaattgccagccagaaaaccagcatgttattcgtaaaatcaacaatgtcatatttatataatgtgtgcttatcaaatttgaggaatagtcagccagtttttgtgtggggtgtattgtaatactcataaaaaaatgggataactacatctgataattgattttcgcagtaaaaagctaattgcatagaattataggaagacacaaacaatttatttttcggatggtggttaaaaccttatgtgtagtaaagaaaatacaaaaaaatgtaataataataattgttagaaaaaaagcttttcagccatgtgatagctaataatatgaggtttggctaaagaatataaaatacttgaaattatcacaaatatcatattgcaacgcaatcttcaaaatgataaggaacagcttcctttttgccaagtgtaatttggattactttacagattgtatacttttgtataaactattttatacatattcgtgtatttataatttaaaagttacggcctttgggagtttaaaatgctttttaaaggtcacggcattcttcattgattaaaatatcatattaagccgccatttttatatctttacaatatctcattgaaagaactaagcctacaaaaaattataaatactgaaaagtgagatgtaccaaagattttcactcccactcgcgttgaaattgcagactttttggagatttctcacactcgctaaagtatctccctctccaaatactatttacacctccggtaaaaatagtggcacttaaaaatgacaccttatatattcaatttttaaggcaaaatcaaaaactgacaatgatcataaatagccttacataataataagaggcagactgaaaatcaaatcatcaatcatatacttggaaaaatgtttaacctcgcgttcctagatctattattttaaccctacctgtacgcgtatctccacgctctctagataacctctctttaaatctcgatcgacgacttaaccaacgcttgccgattttcatcgagctcagtcggtttcgaaacaacaatgcaggcggacgcgtttgtagctggccaaaagagtgcggaagcagcgaaatagcagccacaaaatacggctagaacgcgttcgaagtgatcgtcgtcggtgtagaaacaataggaataaacgctgaaataacgtccgaaaaaacgtccgtcgacggcaacaacaaaacggaagtgaaaaattcgcgttttttcacacaacatttagcattttccgcccgttagacgcgattgtctgggctcccacaaaaggccttaattgtgaggcacttgtcccgttccgaccccatcccatcccatcccatcccatctcatcccatctgaccccaaccaatccagtgcgatccgatcggatcccatccgatccgtagtcagtatttcgaatttggcggatcggtcggctggcgcgccgggctctcccatgtatttcagaaatgaaattagaaattgaaaacagctcactgtcgaattggcatcatccgtggatatggctgcaaacggtgtacgtattcagtggtcccagtcgcttggttgccgagatccccggcttaagtggccaacaaaagcagtggcactgggcagtgagtgggtagtgggcagtcgaagtgctttggttgcacaacaagtgcaccagcttctgaccatggacgaggtctgaaattatgcagcgggcaactatgctgagcagccccaagttggcgaccaagaaaacaaaacaaagtctgccggcgcagtcggtgaaaccatcaacgtacgataacagtgaacagtgaatactgagcagtgaaatatgaaaaccgattcaatcaaaacggccaacttagcataactcccaatgcaaaataacacacaataattatttaaaaatatgcatgctcgaaaagtcaacagatctcgaactccgctgttcagtgccatttgagcgatggggattatgtgtgtacagatccataaaaaggtgatctgtgcgagttgagagtatagtttggacaaagagaagtgcgagtctatctaatggctttgtttcatatatttagccaacttagttcgccgaatgggcgatcccaacaacgct

SEQ ID NO: 26234 - DNA, 731 bp, DROSOPHILA
cttcgtcgagagtgcgccaagtgtcggaaaatattacatcgcttcaagaaaattccacaccagataacatctcacaaaaaaggatactttctgaagcaaaatgtcgcgatcatcgattatgatacgccgcgggttctgcagttaaaaacattgacataatgcctttgaaaatgtcaatcagtcgctgaaattgggctataaattggcgctccgctggcgtgtgatattggaaagtaactttttcgcatacttatttgccgattgcaggcagtgacaaaaaaacgaagttgcattgcaccgaggtttttgtgcatatttgcgcgttttaattgccacaaccacgaaagcagcagcattgacaccggcggcggaggcgacgacgactgcagcagcaacttctggccgtcaccatggagaatcttggctataaggagggcagcaccaagccccgccgcatgacacgttcgatcagcgtcgttaccaagaccgaagtggaacagccgctcacggagaataatgcaaataaccgatctattattttaaccctacctgtacgcgtatctccacgctctctagataacctctctttaaatctcgatcgacgacttaaccaacgcttgccgattttcatcgagctcagtcggtttcgaaacaacaatgcaggcggacgcgtttgtagctggccaaaagagtgcggaagcagcgaaatagcagccacaaaatacggctag

SEQ ID NO: 26235 - protein, 106 aa, DROSOPHILA
MENLGYKEGSTKPRRMTRSISVVTKTEVEQPLTENNANNRSIILTLPVRVSPRSLDNLSLNLDRRLNQRLPIFIELSRFRNNNAGGRVCSWPKECGSSEIAATKYG

SEQ ID NO: 26236 - DNA, 6584 bp, DROSOPHILA
ttattttcgcatacttagcaacagctatgacgccagtcacaaagttcacagattccaaagatcaaaacaaatcgtaattcaattttcgttttggccatttttcgaattcgactgcgtgggaatcaaagtcaaggggcttgacaaacgtaacgcctaacaatggtaggttggcaggcggagagtaaacgttatgattaaaaaacaataagcaataaacaataagcccgccacaacaaaagtggaagaccaatttttaaactattgttcttctgtccccctttttttggcaaaccaaatcgacaactgctatcaatcaccgaaataccaccagatgaagagccacaggggagagagacagacttttatttgtttaaacaaatttctagatgacttcacgcaacagtaacaacaataataagcataataaaaggcttacgaacaagattttcaaattaatgtacgtacacaacacacaaacaccgattgccaaagacatccgagcgacagaaagtcttaattgaccgcgataaaaatagcaccagatttgcagaaaagtgacgaggcgaataacaaaactggttgccttaacttcagggttccccaaatcctaaatccctcatcgtgcgacctattgtcgtgggtgtggaatttcagggaggtggtgcttcaggtttaaggggaggtggggagcctaccggcatctcagagcttcaagaaaattcgcggttatagtttattatgatttaaatgagttttatagtttgacacatgagcgaagtcgacacgacacgatccacgaagatatcgctcggcggaccaactgtacatgtgtacaagtgtaaaagtgtcggctcagggggatatagtatatatactatatattctatatatactacaccttcttcattggcgctcgtcgagcggctcacttttggacactcatatcgcgtagaagatcgtttaggcgtagttctttttatcagtcgatcccgcttcgtcgagagtgcgccaagtgtcggaaaatattacatcgcttcaagaaaattccacaccagataacatctcacaaaaaaggatactttctgaagcaaaatgtcgcgatcatcgattatgatacgccgcgggttctgcagttaaaaacattgacataatgtaaagtgatctttccataactatcgatcaaattaagtttagcgtttcaaaatacgtgaaaatcggtcttatcatagaatttgacaagtaaatattaggaaaaaacagtcccacgcagaataataacttctgttttaatataatttgaaattgaataagtaaaaagtattattttacttaaaagctactttaataaaatattattctttgcttatatttttgaaaagtctcaaaagtgaagttttcacgtccgtttgaaacagtaattatctatctatatttcaattaagaacttttaatactataatcataataaactttttccttgactacgatactatgacgatagaaacctgaagaccccaagcagaatcgaaactaaatccgcaaatactaaaaaaaaaattagcattaatcatagccccaaagtgcctaagtacaagtggggggatcacatcagcggtatctagaagttttctcttacaaaatcagccaagtgaacaatcaacgatttctataaccgagtgcaacttacatatgaatagcaattgaggtttgtttacactcggtgcacggcatttggcgactgcattatcctttaattcgcgcactctgactctcggattcaattgcaactgcataggcgcacgaaaactatatataatatagctcggatctagtaatcagctagtgtacggcgcagtgtggggaatgggcatgcgcttcaggttcaagggcattgtggcaacgcaaaaatatgtacaacccaactaagcccaatgcgttcgctcagataataacccccttaagttccccacaaaggcgcgagcgagtgaagaaaaggctccgaattgctctcaattataattgaatcagcgggcggcaaagaaacacccgagcgatacccgccaacgaacgatcccgaagatcgttcggccgatcggccgtcggccatcggcgatttccacggctccatggcgtcgcagttttccaagatggccggcggcggtctgtcgtaacgggtaatcatacgccatacgccacttccgggccttcgagtttaacgaaagccagccagccagctatctacttaaaatctagcactttttgcacctgcaaaaggtattggaacgtattaattgattgcccgatttccagcaattcacacagtgcgccaaaagtggcagcacatttgtaatcacacgggggcgtttttaagccaatatttgctcagtgtgttagcgagttttggggcctcgtagactccagacaccaacccacaaaccacacacggcgagaaataaagtgatctcagaatatatatttataaaatatttgaaatattcatattacccaagacaaggcgtagactaaaattcctctaaatttgtaaagttttacaataacgcaaaactattccaacattctgcaaaatccaaaatctttctgtgcatcacagctcaaaaatccaaaaactggtttctcaactacgcacagattttgattaatttgctcgcatattttagccaactcaattttggccgccgtttttgttgccggcccttgtttatcgccctatatgtttaatcagtcagcggatttttggtttgcctaatcaaagaaagttttttatgcgttgtcgtcaggcaaacacaggctttttttgcgtttcctattaacttttgtttatgttttgcaaacaagtttgaaagattcccagaatcgttcgagaattgtttacagtaatgcgatgccgaaagtaatgcaacaaataaaacctaaacaagcttaacgcttcgctagctaatttagtctaatgtgacatcgtaactctctggattcctggcagtcgattgcctgaagttacataatctggggaaaaagctggaaaaacacagaacttgcatttttgcaatcaaacagatgtgatgagcaaatcagaaataaacaaaataagattaatagcgaatgccaaataaaataataggataaaataaattcgaaaaaaaagagggagacgatagctgaaatccattttaatgtatttttttaataaattaaatctgtcagctgaacaacaaattggcatatttttttaattcattatagaaattataaaaataacaaggcaaattatactaaagataaagaagatgaattttgaagtaaaccgctcctgaacgttggaatctgcttacatactaaacgaatgagtacttccacttctgacgttgacataaattgtaaataatatgcacaaacaaaatcaaaataataaaataaacaaataaaacatgggagtatcgcaaaggggggggtgtggcaaatagacttgtctatcccaaaaatagctcctatcatgaagaggcccatcgagtttggactcacattaattacataattcccctactaattcaagtgatatgtatgtatctcaacgatagtagtttcttaaacccccttgggatgagcagtcagaaccagtagcactccaagataaatccccggatagtctggcgataatgctggtgattgtgatgatgctgtcttatcgctgcgtcaaaaggaagacgcttagataactgataactgggaccacgagtgtcgcatccaacgcacgactggctatctttggcggagttcatccatccaggcagttgggaaagttagccagtcagttgggtccagttggctcgggatagctcagagcgattgatagcatagatgcctcgtagaaagttgcagtcgataaacttcacatcgaactatctttgcaggcctttgaaaatgtcaatcagtcgctgaaattgggctataaattggcgctccgctggcgtgtgatattggaaagtaactttttcgcatacttatttgccgattgcaggcagtgacaaaaaaacgaagttgcattgcaccgaggtttttgtgcatatttgcgcgttttaattgccacaaccacgaaagcagcagcattgacaccggcggcggaggcgacgacgactgcagcagcaacttctggccgtcaccatggagaatcttggctataaggagggcagcaccaagccccgccgcatgacacgttcgatcagcgtcgttaccaagaccgaagtggaacagccgctcacggagaataatgcaaataaccggtaagtgccagttggagttgccagttttcagttgcctgttgctgttgcagttgcagaaatttctggccacaataaaacacactcaaaatatacacagatataggcgtgattgccgggcccaaaaggcaaagacgcggaagcaaatccgtgatttatgtgacaaatgaattgccagccagaaaaccagcatgttattcgtaaaatcaacaatgtcatatttatataatgtgtgcttatcaaatttgaggaatagtcagccagtttttgtgtggggtgtattgtaatactcataaaaaaatgggataactacatctgataattgattttcgcagtaaaaagctaattgcatagaattataggaagacacaaacaatttatttttcggatggtggttaaaaccttatgtgtagtaaagaaaatacaaaaaaatgtaataataataattgttagaaaaaaagcttttcagccatgtgatagctaataatatgaggtttggctaaagaatataaaatacttgaaattatcacaaatatcatattgcaacgcaatcttcaaaatgataaggaacagcttcctttttgccaagtgtaatttggattactttacagattgtatacttttgtataaactattttatacatattcgtgtatttataatttaaaagttacggcctttgggagtttaaaatgctttttaaaggtcacggcattcttcattgattaaaatatcatattaagccgccatttttatatctttacaatatctcattgaaagaactaagcctacaaaaaattataaatactgaaaagtgagatgtaccaaagattttcactcccactcgcgttgaaattgcagactttttggagatttctcacactcgctaaagtatctccctctccaaatactatttacacctccggtaaaaatagtggcacttaaaaatgacaccttatatattcaatttttaaggcaaaatcaaaaactgacaatgatcataaatagccttacataataataagaggcagactgaaaatcaaatcatcaatcatatacttggaaaaatgtttaacctcgcgttcctagatctattattttaaccctacctgtacgcgtatctccacgctctctagataacctctctttaaatctcgatcgacgacttaaccaacgcttgccgattttcatcgagctcagtcggtttcgaaacaacaatgcaggcggacgcgtttgtagctggccaaaagagtgcggaagcagcgaaatagcagccacaaaatacggctagaacgcgttcgaagtgatcgtcgtcggtgtagaaacaataggaataaacgctgaaataacgtccgaaaaaacgtccgtcgacggcaacaacaaaacggaagtgaaaaattcgcgttttttcacacaacatttagcattttccgcccgttagacgcgattgtctgggctcccacaaaaggccttaattgtgaggcacttgtcccgttccgaccccatcccatcccatcccatcccatctcatcccatctgaccccaaccaatccagtgcgatccgatcggatcccatccgatccgtagtcagtatttcgaatttggcggatcggtcggctggcgcgccgggctctcccatgtatttcagaaatgaaattagaaattgaaaacagctcactgtcgaattggcatcatccgtggatatggctgcaaacggtgtacgtattcagtggtcccagtcgcttggttgccgagatccccggcttaagtggccaacaaaagcagtggcactgggcagtgagtgggtagtgggcagtcgaagtgctttggttgcacaacaagtgcaccagcttctgaccatggacgaggtctgaaattatgcagcgggcaactatgctgagcagccccaagttggcgaccaagaaaacaaaacaaagtctgccggcgcagtcggtgaaaccatcaacgtacgataacagtgaacagtgaatactgagcagtgaaatatgaaaaccgattcaatcaaaacggccaacttagcataactcccaatgcaaaataacacacaataattatttaaaaatatgcatgctcgaaaagtcaacagatctcgaactccgctgttcagtgccatttgagcgatggggattatgtgtgtacagatccataaaaaggtgatctgtgcgagttgagagtatagtttggacaaagagaagtgcgagtctatctaatggctttgtttcatatatttagccaacttagttcgccgaatgggcgatcccaacaacgct

SEQ ID NO: 26237 - DNA, 616 bp, DROSOPHILA
agagtgcgccaagtgtcggaaaatattacatcgcttcaagaaaattccacaccagataacatctcacaaaaaaggatactttctgaagcaaaatgtcgcgatcatcgattatgatacgccgcgggttctgcagttaaaaacattgacataatgcagtgacaaaaaaacgaagttgcattgcaccgaggtttttgtgcatatttgcgcgttttaattgccacaaccacgaaagcagcagcattgacaccggcggcggaggcgacgacgactgcagcagcaacttctggccgtcaccatggagaatcttggctataaggagggcagcaccaagccccgccgcatgacacgttcgatcagcgtcgttaccaagaccgaagtggaacagccgctcacggagaataatgcaaataaccgatctattattttaaccctacctgtacgcgtatctccacgctctctagataacctctctttaaatctcgatcgacgacttaaccaacgcttgccgattttcatcgagctcagtcggtttcgaaacaacaatgcaggcggacgcgtttgtagctggccaaaagagtgcggaagcagcgaaatagcagccacaaaatacggctag

SEQ ID NO: 26238 - protein, 106 aa, DROSOPHILA; identical to SEQ ID NO: 26235

SEQ ID NO: 26239 - DNA, 3509 bp, DROSOPHILA; identical to SEQ ID NO: 21994

SEQ ID NO: 26240 - DNA, 2519 bp, DROSOPHILA
atttcagatcggtcagcagcagcagaagcaaaaagctcggctcgcgactcgcgcggaacgttttttagaagttgtgcggattaaaagagcagatttgtatttgattggccctatgaatattgatttttgcacgttgctatcggtgctgaatcagtcgcttaattggactacaatcggattcttcagtcgcgcgttttaccggcggcttttgcaagtcagttgagatcgtgcaacactttctgtgtgattttttgtttgttgtgtgacgactattaattgatattttgaaacatacagctgaaagtgactgtataattggaattgtggaaagcaagtgttatgtgtgaaatcaacaaaagctaaacataccaattattattctaatccatcaaaagtaatccggcatattcttacccataatttaaaaaccttaaaagtacataaatccagctcttaatataaagttattactaatatataacgtattttcaaatatcattaaaagtattttgactcttaaatataaagtcttttaaaatacacgtaaaacaggtgcttctaaaatcaaaagaaagcagcaaaatttaaaagtgagacctaaagtcgaaatattttccaatactcttcggacttacccaataacttaagcttaccaataatttatgcaagactaaattgcaataaaggcatataatccctaacaatataactctcattgaaaaaatcttaaataatttaaaccccagtgaattaaacagcaaaagacagttaatagacacagaaaatgctaataaaaatagcataataaaagcacggttacataaacttagacgctcgaacatttacataggatatcagaagctggaatcatggtttcggaggagaactggaatagcgacacgatgtccgactcggacatgatcgactcaaagaacgacgtctgtggcggagcctccagttccagcggcagctcgatttcgccgaggacaccaccgaactgcgcccgctgccgcaatcatggcctaaagatcaccctaaagggacacaagcggtactgcaagttccgctactgcacgtgcgagaagtgccgactgacggcggaccgccagcgggtgatggctctgcaaacggccttgaggcgagcccaggcgcaggatgagcagcgggcgctgcacatgcacgaggtgccgcctgccaatccggcggccacgaccctcctgagtcatcaccatcatgtcgcagctcccgctcatgtccacgcccaccatgtgcacgcccatcacgcacacggaggacaccactcgcatcacggacatgtcctgcaccaccagcaggcagcggcggccgcagcagcagctccgtcggctccagcctcccatctgggtggctccagcacggccgcttccagcatccacggtcacgcccacgcgcaccacgtccacatggcagctgctgcagccgcctcggtggctcagcaccagcaccaaagccacccacactcgcaccaccaccaccaccagaaccaccaccagcatccgcatcagcaaccggccacgcagaccgccctgcgatctccgccgcacagcgaccatggtggcagtgtgggtccggccaccagcagctccggcggtggagcacccagttccagcaatgcggcagcggccacctcgagcaacggatccagcggcggtggaggaggaggcggagggggcagctcgggtggcggggcaggaggtggtaggtcatcgggaacatcggtgatcactagcgccgatcaccacatgaccacggtgcctacgcccgcccaatcgctggaggggtcctgcgactcgtcgtcgccctcgccgtcgtccacttccggtgcagccattttgccgatctcagtttccgtcaatcgaaagaacggcgccaatgtgcccttgggccaagacgttttcctagactattgccaaaagctattagaaaaattccgctatccttgggagctgatgccactcatgtatgtgatattaaaggacgcagacgccaacattgaagaggcttcccggcgaatcgaagaggctcgagtggaaataaatcgcactgtagcccagatctactacaactactacaccccgatggccctggtgaacggggcgcccatgtacctgacctacccgagcatcgaacagggtcgctatggggcgcacttcacccatctgccgctcacacagatttgtccaccgactccagagccgctggccctcagccgctccccgagcagtcccagtggaccgtcggctgtccacaaccaaaagccctcccgaccgggcagcagcaatggcaccgtccactccgcggcctcacccacaatggtcaccacgatggccacgacctcctccacgcccacgctcagccgccgtcagagatcgcgctcggccacgcccaccactccgccaccaccgccaccggcgcacagcagcagcaacggagcctaccaccacggccaccacctggtcagctccacggctgccacgtag

SEQ ID NO: 26241 - protein, 549 aa, DROSOPHILA; identical to SEQ ID NO: 21996

SEQ ID NO: 26242 - DNA, 4958 bp, DROSOPHILA
aaagaacaatatgagtatattgcaattttatcacttcgatctgtcggcaacttgcgggttttttctatcagtataaataaccaatcaacacgtctcttcagactggggcggtacgaataaaatcatcatgtaagcctgcctattttatacactttattacaacgttggcttacccatttgttaaattttagttgagaattcaagcagaaaacgcgaccgtccattttgaacgaaaaaaagaagtggaagaatgcacgtggcgatgtgaccgcactacgattctgtaacgataattcatttatcgagcatgtaatcgatagttatagagggtagttccaagaatcgtgtgccacggaaagtgtaaatagcttgttttttagtaatcattatttatagcatcggcattttaaataaaggtaaatgcgcttatagcaataagcttattgaatttttaaaatagaatcccctgttaatttgcttcttataaaatattatgttcatttatttttgttccttatattaaattaaaataaatataatccttagtaaaattggttcttattaaaatattgaatgctctaacaatcttgataagtttttgtatgcaagttgtttctctatcaagctctcgattcaaacccctcgatctcgattatgctatcgtgtttctatagactatataattaattctatcgatattagtgttacctataatctaatacttatacacctttcacacttcattttattatacacagtttacgatgcattattttgttgatgttcactttacttacgatatcaaaactgttgtcattattatatgaattcatttaattaaattattaaaatattgttacggtcttatcgatatatttgtcaatggttcttgacactgctgatatttcaacgaagtgctccacctctccgtgcactctattccaagtcccgaaatgtatttaaacagctgctgcctggccacactgcgtatttgttgttgcttgccgttgcgtcgcgtgtgtgtctctttgcgtaacgttcaaagttttgatttgtattttctccggcatacaaatccgccaaagaaatggtgctaatcaaggagtatcgcgtatgcatgccgcttacggtggaggaggtgtgtggccgcttgtactttgccttcataatattgtctgaaataaagtttttatctcatcactttacagtacaagatcggacagctttatatgatagcgcgccacagtctggagcaatcggaggagggcgagggcgttgaggtggtggagaacaagccctgcgaggatcccgttcacggcaagggccagtacacggagaagcacattcacttgtccaggtgggaatctctagaggtgctacttagttgtagaatatccgactacaaatgacatccattacagccgactgccctactggatccaggccatttgcccccgagtcttctatgtgatagagaaatcatggaactactatccgtacacgctaacaggtgaggagtgacagtaacccaccaccacctactgcgcatcccagtctatttttagtctaattgtgtattccggaggcgggctttccctcctgccatcttaccatagccatatggcaagcgttctaggaacatcgtgtgatttttgggggccagcaagaattccgctttatcactagaccattacaaatatggtggggtacgtctgccgataagcgcgctccattaaactcacacctgtttacgcacccagtacgtcaccgatatggtttggatggggctagaggagagcacttgatggccagctgctccaatctccgttcggcatttgttggcaactgcctgtattcccagcgcatatgttgataaaatcggattacgcggtgcttaatgcatccgattaaactctgtgcactcgattggggattgtcattccagcaggtcgttgacttcgaggggaaaatacagttctagctggtttgtttacccaaagtggctttgggaaattaccttttaagtgcctgcaaaacaaattggttttaaaggcgaagatttagttataatctatgtatgtcgaactaactatttgcttataataagttctctaagttctcatatcatagggataatttttaacgtttatttgggacttcgtaccaaaggcttaaatcttttgataagccttaatgttcttgttttttaatatagtatcttatatagttaaggacttaataactgatccatttgcttaattgactcacattaccagctccatggccaaagaatttttaagtacttctatccaaagtattaattggctgggttattgattttttttatatctgtcatgttttcatgtgctgtaattgggtctcaaattggatggaactttcactagaatacacggtaattgcatgaattctgttttgatccgcctttgctaaccaattatttcttgacagtgttcctttatacccaaactaaatgtgctcatcaaaactaagtacgaggacaataatggcagcacagaaaacgtaattgtaacttaaagttcaaacttaacattgggaaataatgtaattttggttgacagtgtctggatcttactgaagatgagctcaaagttcgaactgtggatcatttggacatagcgttcgatgaggtcagtgccaagcattataagaaggaagaagatcccaagttcttcaaatccgaaaagacaagtaacatgatcatgcggtagagttaatcagtgcaaagaattcatatatattttatccttagaccgtggtccattgattgaaggatggcgggaaacggacaagcccattatgtgctcctacaaggtggtccacgccagctttgaggtatggggtctgcagaccaaagtggaggacttcattcagcgcggaattcgggagattctactactgggacaccggcaggctttcgcatgggtggacgaatggcatggcatgaccctggaggatgttcgcgcctacgagcgtcaaaagcaggccgagaccaatgagaagattcacaacacaagtggtggcgcaaatgcagcggccaacgccaaagaggcaaatgatggcgatattgattgagaatttacctaaaatgtaggaaaatcgaagtaacaaaatgcaggctaaaatagtaccttcaaggcctcgcggcaagcttaaaaagtttcataggaaatatcttattaacgtacgcatatttatgtatatacatacatatatatatatcattgtctatgcatttctatggtccaaagaagctcagagctctagtaactgcctgcagcgtttaaaagtacaatgcacaagcacctagctggaaactcgaaaccaaataattgttacaaactagatcacgcaattttttagtcaaacttataagcgttacacagacatcctagtgaacggtttgcgttaactatattccctagtttagctcacatctaaatgtatattttggtgtacaaatacaaacaattttggtgtacaaatacaaacgattaaacatattagaaatatacctatgtcatatgattgttagatacttttattcggcatccgagggccattaaaatgttctgatttgttgccgaccaaattataagtcatttgtatgccaatgaaccaagcagtagatagagatgattcacctcgccgcttgacagaatggatcgccagtgtgtaaatcaataaatgcgagcaaaattgactgaccctgacactgatcataaatcacacacccgcacacccttcattcatcgattgccaggggaactcaacagctgctccaaccgaaacgagcccccaaaaaatgtggagagggctattgataagtgtatatcgctctcgctgccagctgatttgccgctggagatctcggacgtcaaaaagtattacccgcagagcggctaaagtaaaaaaaaaacagcaaaagcaccagcgtttcgcgttctcgccgcatttgaacttcaaacgcgagaaaagtagcacagcgcggatagatacgcggatgcgtggtcattaaacgacggatcgcggaaaaaaacgaatttcttgattatgtttttagcatagagcaaatggcagagccaaaacaattcgatcgcaattgcccaacctgctccacctgcgcgcgatcgtgacaatggaatattctgattgaaaacaacgcaagccggataaacagtctcaaaataaatatttaaaaataacccaaaaattaatatgcctagcggtgtttttcaaaaacggccaaaagcagccgaaactatttcgctgttctgcatgatcttaataaggtaaaaacacaagtggaccacgcggcgtatgtgtaatccagtgtaatacttgcaattcgccgctgttatcagatgtttacagcactagctgatttatttataaacatactaaaacctattctgggccactccatatgcgggttatagtccatggtaaaccttttacgaggctccatgcaatagagccgaactgattgggttttatggttaatataaagactagacaaacgaactggagtacattgcagagttcactggaaccgaagagctaaagttgtcctatcattgtttgtacttcctacacatgatatgatagctttattctccttcactgagtaactagtttaatattccaagagcacatgggcaattagggcaataaagttctaaggtagcaacttcctcaaaattcaaaacagaggcgaaaagccattccaccacttatcgctcaccccaagcagcgtatcacagtcatgaattttgagaggttatcaggtatatttgcctcaactttaaaaattcttatcgccgttactataaaaagtcttcatttatcaaagcaatatataacaacaaaatgcaatccgatctggatcggttgtctatatattatgaacgtttttagct

SEQ ID NO: 26243 - DNA, 1367 bp, DROSOPHILA
cttgccgttgcgtcgcgtgtgtgtctctttgcgtaacgttcaaagttttgatttgtattttctccggcatacaaatccgccaaagaaatggtgctaatcaaggagtatcgcgtatgcatgccgcttacggtggaggagtacaagatcggacagctttatatgatagcgcgccacagtctggagcaatcggaggagggcgagggcgttgaggtggtggagaacaagccctgcgaggatcccgttcacggcaagggccagtacacggagaagcacattcacttgtccagccgactgccctactggatccaggccatttgcccccgagtcttctatgtgatagagaaatcatggaactactatccgtacacgctaacagtgttcctttatacccaaactaaatgtgctcatcaaaactaagtacgaggacaataatggcagcacagaaaactgtctggatcttactgaagatgagctcaaagttcgaactgtggatcatttggacatagcgttcgatgaggtcagtgccaagcattataagaaggaagaagatcccaagttcttcaaatccgaaaagacaaaccgtggtccattgattgaaggatggcgggaaacggacaagcccattatgtgctcctacaaggtggtccacgccagctttgaggtatggggtctgcagaccaaagtggaggacttcattcagcgcggaattcgggagattctactactgggacaccggcaggctttcgcatgggtggacgaatggcatggcatgaccctggaggatgttcgcgcctacgagcgtcaaaagcaggccgagaccaatgagaagattcacaacacaagtggtggcgcaaatgcagcggccaacgccaaagaggcaaatgatggcgatattgattgagaatttacctaaaatgtaggaaaatcgaagtaacaaaatgcaggctaaaatagtaccttcaaggcctcgcggcaagcttaaaaagtttcataggaaatatcttattaacgtacgcatatttatgtatatacatacatatatatatatcattgtctatgcatttctatggtccaaagaagctcagagctctagtaactgcctgcagcgtttaaaagtacaatgcacaagcacctagctggaaactcgaaaccaaataattgttacaaactagatcacgcaattttttagtcaaacttataagcgttacacagacatcctagtgaacggtttgcgttaactatattccctagtttagctcacatctaaatgtatattttggtgtacaaatacaaacaattttggtgtacaaatacaaacgattaaacatattagaaatatacctatgtcatatgatttaaaaaaaaaa

SEQ ID NO: 26244 - protein, 109 aa, DROSOPHILA
MVLIKEYRVCMPLTVEEYKIGQLYMIARHSLEQSEEGEGVEVVENKPCEDPVHGKGQYTEKHIHLSSRLPYWIQAICPRVFYVIEKSWNYYPYTLTVFLYTQTKCAHQN

SEQ ID NO: 26245 - DNA, 2529 bp, DROSOPHILA
acaatgcgggaaaatccacgttgacagaccgcctggcggaaattttcaatggagaagtaaggccatatatgtgatggtcctatctccatttgataatgttagcataaactatttgcagtccaaggaatctaacaatcaagttagtgaatggagcttcaccataaataatttcagagtccagttgtgggatattaacggagaactgaagaatcgccagatctggccaaagtattataagaaagtgaatgttttggtgagaggagaacttatatagaacttatatagactcgactacaatccctgaaccgtagatttttgtactggatagcacggatgcactgcggctaagcgaggcgcgatgtgttttatgcgatgttttgatgcaccaggaactggataatgctccgctgctgatcgtgtccaacaagaaggacgcctcgggatccctgtccatgtccacggttatcgatttgatgggcctatatcgcctaactggtcgagattggacttttgaggaatgttccatgcggacagggtctggtgttcaggtatatgttgtgttctatattcgaaatctgataatttaacttatactatctgggtaggagatcgtaaattggattaacgaaaagatcaacaataacaggaagtgatttatcacatttttatattttcaaaaatttggcaacctattaactaatatattaaatatatatttaatgtaatttagcaacaatagtttgttacacttgtattatagaaattatttgcctcaaataatgattcatttagtttgctgatcggcaaacactcttttaattaatacattaatacagccatttgctaatcaatgatttttgacattgacctctgtcaataattgaaaaactcgtggctgagtagcaacattgtgaggacaaagcccttttgcattatcagttattagttgttgttgcttttggggctataaaagggttagttatagaattgactggcacagtttaacagcgatcgttgaaatgaactcaactctggtgattctacttctttcggctctggctttggtgcaggccaggaatattcgttggtctgaggaggacaactcgtcccaaggtccaagtctaagccacccgcatccgcactctgtcaactggccctgtgatgtgggtcacttcccagaggcattcattctaatgcacaaggtggataagcgactggaacgaattgacaacgagagtaccaagaaacggatcgagaactacgccgtcaatcagttgaggcagtgcatcttggatggccagatggacgtgcactgcgttaggcgttcgattggatacaccatgtcattcattcaccaccaaatgagccaggcgaatggaatgtaagctcacgacttggtgatcagttgatataatttaaggacattcctttagccaccttttttttgcaaaatgcattttaataatcaaatcctttcaaacgaactaattagtaacaaattatcaaaataaattaagtttaaataataattaatttaaattcagctttgtcttatgggtttggattcccattcgtttcgcgcgaagcttgaggagcaagcttgtggcacttttcctgctcggccagctggcgctccttttccattttggcgaacttgctgcccatatagagctgctccttgaatcgattctttcgccgctcatccatactgtatcgtcgtagcatatcccgtctgtccacaatcgacatgcagatgtcctggcaatcccgcgacggctggcagaagctccacgaaccgaaaatggtgtccacacagccgcaggtgcgacaatagccaacaaagtgaccgatcagattggaattcgccttgcggaaggatagagaaagtggcccgcccaggatcatcatagcttgtcccgagaaataccaatcggtgagattatccaggagatcgtgggccctcggcggcactgtctcctgcacactaatatttagcttaatgccatggtaattgggagttttcaagtcggccgcatccttcaactgcgtcctgttcatcttgacgcactgtcgtctcgtcctgcgataggtacgacctttgtgttggctacaggtcggcttttccgcttcttcgccatctgaatttgttggcggggtcttgatatttatgcgaatgccaaggacttgagattcccaggatccgtttagatcgcagggcgcacctgaagttttaaactttatatacatacatgaatcttagctctaccacctattcttaccatcagctggatccacgaagcagcagggcagctttctctcctcctcctcttccgacgattgattgcttgacttgcttgcctgaatgctctccaatcgttccaggatcttgtctagaaccggcgaaatccccagctggtcctctggctgttgatgcggcgtctgtgatggtggacttgggacttggcacatgatctctgatccctttcggaaactacttccgatctgacttgcttttacacgatattcata

SEQ ID NO: 26246 - DNA, 529 bp, DROSOPHILA
tttaacagcgatcgttgaaatgaactcaactctggtgattctacttctttcggctctggctttggtgcaggccaggaatattcgttggtctgaggaggacaactcgtcccaaggtccaagtctaagccacccgcatccgcactctgtcaactggccctgtgatgtgggtcacttcccagaggcattcattctaatgcacaaggtggataagcgactggaacgaattgacaacgagagtaccaagaaacggatcgagaactacgccgtcaatcagttgaggcagtgcatcttggatggccagatggacgtgcactgcgttaggcgttcgattggatacaccatgtcattcattcaccaccaaatgagccaggcgaatggaatgtaagctcacgacttggtgatcagttgatataatttaaggacattcctttagccaccttttttttgcaaaatgcattttaataatcaaatcctttcaaacgaactaattagtaacaaattatcaaaataaattaagtttaaataataa

SEQ ID NO: 26247 - protein, 121 aa, DROSOPHILA
MNSTLVILLLSALALVQARNIRWSEEDNSSQGPSLSHPHPHSVNWPCDVGHFPEAFILMHKVDKRLERIDNESTKKRIENYAVNQLRQCILDGQMDVHCVRRSIGYTMSFIHHQMSQANGM

SEQ ID NO: 26248 - DNA, 2821 bp, DROSOPHILA
gttattcaaaatttcaaagatagaccagaggatactaccgagtctagactaatactggtaatcaggtgctagaataacacaccttcaaaaaactaagtagaaaaaacaacaacttaatagcttacaaattttagggtctgctatcgctgttgcgtaaactgagacccaatccggaaaaggaggctcgcatcctgctcctaggattggataatgctggcaagaccacgatactgaagcagctggcatcggaggacataaccacggtgcgtataaaggcggcgaacttcttccgttttccccataaaatacggagtgaaatcccgcaggtaacgcccacggcaggatttaacatcaagtccgtggcagccgatggtttcaaactgaatgtatgggatattggtggtcaatggaagatacgtccatattggaagaactattttgcgaatactgatgtgctggtaggattgttatagatctaaactcaattctgttagctaatagtttcgattatttcagatctatgtaattgactgtacagatcggactcgcctgcccgaggcgggtagtgaactattcgaaatgctcatggacaatcggttgaagcaagttcccgtgctgattttcgctaacaaacaggatatgccggatgccatgagtgccgccgaggtggccgagaagatgagcttggtgcaactgcagggacgaacctgggagatcaaggcctgtaccgctgtggatggcactggactaaaggagggaatggactgggtctgcaagaatatgaagaagtaatctaaattatagtaatcgtcgcctgttaagttgtccctaagaactaaatatacgtacctacatttcaactcaccaaaagtatcacaatctctaattgttggatgaatcttccttttttcacgtgtatctttaagtataaactgaatatatagttgagaaggctatgctagttaaatcattcatttttacctgacatctaaactgaaatcaaatttcgatccccatgtgtttttacggacctgtttcgttcataaaaaagatcctgcccgcaggctctcagaaatcatgtctgctcattttaggattagacaatgcgggaaaatccacgttgacagaccgcctggcggaaattttcaatggagaagtaaggccatatatgtgatggtcctatctccatttgataatgttagcataaactatttgcagtccaaggaatctaacaatcaagttagtgaatggagcttcaccataaataatttcagagtccagttgtgggatattaacggagaactgaagaatcgccagatctggccaaagtattataagaaagtgaatgttttggtgagaggagaacttatatagaacttatatagactcgactacaatccctgaaccgtagatttttgtactggatagcacggatgcactgcggctaagcgaggcgcgatgtgttttatgcgatgttttgatgcaccaggaactggataatgctccgctgctgatcgtgtccaacaagaaggacgcctcgggatccctgtccatgtccacggttatcgatttgatgggcctatatcgcctaactggtcgagattggacttttgaggaatgttccatgcggacagggtctggtgttcaggtatatgttgtgttctatattcgaaatctgataatttaacttatactatctgggtaggagatcgtaaattggattaacgaaaagatcaacaataacaggaagtgatttatcacatttttatattttcaaaaatttggcaacctattaactaatatattaaatatatatttaatgtaatttagcaacaatagtttgttacacttgtattatagaaattatttgcctcaaataatgattcatttagtttgctgatcggcaaacactcttttaattaatacattaatacagccatttgctaatcaatgatttttgacattgacctctgtcaataattgaaaaactcgtggctgagtagcaacattgtgaggacaaagcccttttgcattatcagttattagttgttgttgcttttggggctataaaagggttagttatagaattgactggcacagtttaacagcgatcgttgaaatgaactcaactctggtgattctacttctttcggctctggctttggtgcaggccaggaatattcgttggtctgaggaggacaactcgtcccaaggtccaagtctaagccacccgcatccgcactctgtcaactggccctgtgatgtgggtcacttcccagaggcattcattctaatgcacaaggtggataagcgactggaacgaattgacaacgagagtaccaagaaacggatcgagaactacgccgtcaatcagttgaggcagtgcatcttggatggccagatggacgtgcactgcgttaggcgttcgattggatacaccatgtcattcattcaccaccaaatgagccaggcgaatggaatgtaagctcacgacttggtgatcagttgatataatttaaggacattcctttagccaccttttttttgcaaaatgcattttaataatcaaatcctttcaaacgaactaattagtaacaaattatcaaaataaattaagtttaaataataattaatttaaattcagctttgtcttatgggtttggattcccattcgtttcgcgcgaagcttgaggagcaagcttgtggcacttttcctgctcggccagctggcgctccttttccattttggcgaacttgctgcccatatagagctgctccttgaatcgattctttcgccgctcatccatactgtatcgtcgta

SEQ ID NO: 26249 - DNA, 644 bp, DROSOPHILA
caaatttcgatccccatgtgtttttacggacctgtttcgttcataaaaaagatcctgcccgcaggctctcagaaatcatgtctgctcattttaggattagacaatgcgggaaaatccacgttgacagaccgcctggcggaaattttcaatggagaatccaaggaatctaacaatcaagttagtgaatggagcttcaccataaataatttcagagtccagttgtgggatattaacggagaactgaagaatcgccagatctggccaaagtattataagaaagtgaatgttttgatttttgtactggatagcacggatgcactgcggctaagcgaggcgcgatgtgttttatgcgatgttttgatgcaccaggaactggataatgctccgctgctgatcgtgtccaacaagaaggacgcctcgggatccctgtccatgtccacggttatcgatttgatgggcctatatcgcctaactggtcgagattggacttttgaggaatgttccatgcggacagggtctggtgttcaggagatcgtaaattggattaacgaaaagatcaacaataacaggaagtgatttatcacatttttatattttcaaaaatttggcaacctattaactaatatattaaatatatatttaat

SEQ ID NO: 26250 - protein, 186 aa, DROSOPHILA
MCFYGPVSFIKKILPAGSQKSCLLILGLDNAGKSTLTDRLAEIFNGESKESNNQVSEWSFTINNFRVQLWDINGELKNRQIWPKYYKKVNVLIFVLDSTDALRLSEARCVLCDVLMHQELDNAPLLIVSNKKDASGSLSMSTVIDLMGLYRLTGRDWTFEECSMRTGSGVQEIVNWINEKINNNRK

SEQ ID NO: 26251 - DNA, 71962 bp, DROSOPHILA
tcaacccgatgacttcaaacccgaatttgtagaaaatttttggttctatattgtccacccgttgtgttttttgccaatacaaaagggggaaagagatagcgaagtatagacggaaagaaagagagacttgaacttaaaaccaagtcacaataacgggccaaaagcaatagcaattctagttcttcttgttcttttatggcttttggacagctgcatacaaatgttttgctctgctcttctcttgtgttgctatctttttctctcttccactctttttgctccttcttatttccggtatttaaactttgcgcatgcgcattctcttctaactgaaaaaaaaccggtcgctctctttttctttcatctctctttgcggtttttgttgacattttgatgcacttcccactcaagctcacacatacacacacacataaaactacgcttattgttgtcttttttctttctgctgtttcttttggtggtttctattcgtttccgttgcaaattcgatttacttctacttcgaaaaaatagccgagacacagtaacttcaaaactgtgtcgcactatcagcaactgctctcatgtatatttttatacattaatggatcattgttttccgcttaatttgccaatgacctactgcgagtaaatgagagcacagagataaggcagtggaaatcaccgctcttccaccttaccccgtatttgtgtcccactaccgactcttacccataaaatatgcaaataagtgtgtgaatgcagttcaaactttacttttcaaccagcctagaagtatgcagtaaaatatggaagcgcgctttttgatttgaagtacaatagacaattttaactattaaaaaaaggcaatttcgtgcgcgaaataagtgagatacccacaataacaaataacaattcaaataagcgattcacaatatattcttgctaaaattacagctaaataactaaagttatgttttattttcatttctcttgcagattaagtattataatttagcaaatatgttgctagccaaattctagttagctaaaaattaagattaagtacagggaaactcgagtgcaatcaaagtaaacacaagaggctgacgcagcacatacgcatccgtgaaaactcgggaaactccgcatcacgcagccacaagaaacggcaacaacacggcgtccccccgcaattacgtccgctcgcgctccaccccccagtcgccccactccccgcaggcggcactcctcggcggcgtcggaggcggtcgatcccacggatcctcccaccatcatcatcatccgtaccaccatcattcgccgtcaccatcgccatccgcaccatcgccgtcgtgccccacgttgcagttgcagccgcgattgcatcaatcggagcagcagctgtgccagcgacgccgcatctatgcgtccacggggagtgccgccaacatcatgatggatcgcgaatcccttagcgaatgggctaaggacaagccgctcagcatcctgcagctggatccggcggatcgtgcggttctccgcatagcaggtgagtgcatccacaaaacaatttcaattgagaacaattaaacctagaaaatgctacagtggtcgctcgtctttatttcttcaatgtgaagttctaaatgttttattattttaatgtatacaaatttaaaatgtatccaatgagcgactgctgtagttgatgattgcttaaattgccagaagtttgtgtaaaaagaacatttctatgtagccagcgaacactgtaacgcaattgaggtaatccccattcaaatggcaatatgttgagcaaatatttggccgactcgccgtgcccccacccacccacggggccacccaacggtggagcagcagtaccactcggcggttcattgcacttggcatgcggcagtgctggccaaactgtgctcgcatttccactcgcctttcagccattttgcatcgacgacgcagcattattatgcgctaattccacgctaacggttgcagcctccgcccagccgagctcccctcttatcccccccccctcttcgtttatccattcccatataacccgtccctgtgccagctttgctgttttgtctgtcagtcacttgtgattctatttctgttccgccaacggagtttctgcggcccacagaactatgtatgtatgtaccccccaatctccctccttttggcactttttgcaatggcaactgaaaaatcgaaatttatgtcgccgtcgcaatgcctgagggcattgttagtgccgcacaataatcaagtaaaaaggctaacacacaaatggaggcactagaatgcgatgtctattgaatacttgtcgcattgtgcccagggtatgtatatatgtctattataaagttctgacgctgagcagttcaagggattgtcgagcggtgaaagaatctcagatcgcagcccaactaaataaattgcatctcagatcggtagcaaacatgcgttttctggttcattgctcaaactaaacattgtagtattggagttatgaaaatttactagagttactagagtttctaacatgaaaagttgtaaagctgggcttgtgctaggattacggtttttatgtatggcattgttaagatctcaacaactcctatatatgaaagatttaatcttatttaagatataacacttccagcatgacaatgcacatgcgtcagcgttcagttgtaattgctttcaattgaaattgattcaataagtaagaaacgcccaagatcgtcaatgaaaatgaaaacaaaactcgttttaccttaacgagattggtgtatgtgtatgtatatgttggagatatttataaattgagattgatgtctgggattaaggcctccagagagtgagacacctccacaaaatgttctctcatgttccctcattccaatttcatagccaaatccaagcccaaatccgatttcacatgcgaaatgaaaagtttttcgatcgactaatggagtttttcgttttttttttttttgtacccagttttctgtatttccccccaatataattctcgttgttcgccgctgagttttaattagccctgagccagttagcccacacacaatttggccaaatgcatgtaacggaaagcggaaaacttgcccacaaacagttgccaactctatggaaaaagggggaaaaaaagcaaacaactaactattgcctttaaagagtataacaacgccccccttgaacgcatttctctggatcagctgaaagatgtgttaatgcctcgattaaataatatttgcttacggtcatctatttacaattgtgctttgtatgtatatatttttaaacttttactcttgcattttgattttctcacctattggctacgcctgcgcaaagtgaaccaattttggtgtttgaatatttggccgtttgcgtgtgggtatgaggcaatattttgtaggtttttggtttttggcttttggtttttggccatgctataatacgttaaagcgagccattttcgatttcgttttcggattactttgacagcaaattcgacagcatttatttttagatgggtgttatcacctggcctgtcccattaccattaatcgacagcgtcttgatgaagtgcttggctcgttatcgctttatcgttatcgaactttttggttagcgtgtcaaaaggcttggtcgaaatcgcatcgcaaattgtagagggggtgccgccaatcccctggatcgctgcatcgtacagatttcattaataaatctagcgagtgtctacgttctacgtttatgtggcggaaaactattagatattccaagcacatttacgtacacgatcggttttaatgggtaaattagcctggcaacaggcggcgtccgtcaccggaagtacagttgccacaaggaagtcagcagagttgtatttcaatgacatatttatgccactgggtcgaactgtctgagtttcaaagaaaagtatattagggaaatagagctttgaatttcataaaagtttatgatgattatgctcaataatgagcaaacattttaccaatttccctattgcttccccataaaaatcgtttgcatttttatcacacgaaatggttgtttttattttcggcattttgagttgtatctggaagttaaagatacgcctaccgacataacacgatgttgttaattgaaaactgataactgtttctctgtttcagactgttttattctccaattgttacccgtttctgcttctgtttctttgtgactttgggtgtatcgtactatttcgtattcgcattctctgttttcggcgattctcttttagcattggggttttttaattgtcgttatgtattctcgtgtctcccatatcgttctgcagctgtgtatctatatctcgatgggctgtgcctgtgtttgtatagatatctctaattagttttcaattcaatttgcatttctcgttcgttatgtttcgccacttcccataactttatctctctatttccagcgactgctttcggtaattattcgtcttaagttatgacacttttaaatgttctggaatgtaatgactaaagtctgatgacacatctgaatatataggagatgatttgatgtgtttttaagactaaatatttttaatttttttttggtgctctatattgcattagaaaaattcatgcaagaataatgaccaaaaatggagtaatggccaaacaaaactgtagcgcttgaagccaaacaaacatcttgatttcctggctggcaggtgatacttgtgattcatattcacacgcacatgcagtaaatatcttggtatctaactccccccaaggctacaaaacgccatatggcacctttcccagacaattgtctccccaatccacgggcgccttttgctccccccccacatccccatatatatatatatatgtatatataaccgagaaactcttctgactcattaagataagcaattttgtgtgtcaatttgtcaactccaaatgagaggcaaaaactgtggatcaaagcgtaggaccgccgaagtacttgaatataaataaaatctatataaaaatgtacgcaggaacacacgaatcgtacgaattatttgtacacaaatatttaattacgctactaattgccagtgacgatcgacagccacgaaatgagacactcggggactatgcgaggtcaagatactttatcgagggggaagatgtatgtatgtatatgcaatacgtataaattatatatttatactccgcagatgttgtgcaatgtttttatttcgctagatcaagtggcattacttttcagatctgtgggagtttcattcaaggcgttaccgcttttgtggctttcacagaaattgcaatgatctcagctccagccaatatcaatttatggatatttatgacctgttatatatatcacagcgatgttttttttttgccgatatcatacatacatacatgtgtgggtggagtgaccatgacgtcactgctgcgaaacaagttggcctttgtcagctatcgagcaatcatttaaatgacattacacgcaaataaaagtgaacagcaaaccgggtacactttgaaaaatactttgtgaaatacttaaaataaaaatactgaaagtgcttagttgggggaagtattttcattaattgtatgcgaaggtttaaactcactttttgtgatattatatatgaatgataaaaagtaatgaaatatttttaaatttggtatgaattacaaaaatatttcaaagtttggatatttatttcaagtgtaagaaacgcccactacttggtgttgtaaaccagttttactttttcgactgggggatgggtaacaacactcactactggggactgtctgacttcagtgggtcacccaaacccaattccattgaggagggtccacggggcagggcacccttggagtgaagtgaagtgagcttacacgaatattccatataccattgttttttcccgtttcgtcgccacctttgtttacaaagtcagtacaaaaataagggaatatcagtcagtcaaaaacgaaaatatgagggaaaaatgtaacttttttgtggtttggaagttttggggaagtgggggagtccacttagccggcattccatctcctgacttgtttacactgtgactgttcacaataagcctggccaaatgccacattgacacacatatcattctgattatttcgagagttgcaaaaacttaatgcggataatgtctcaattcgcagctggcgaacgttaaaaacgcagagcgatttaatttttaagggaacaatcttatttgtttaagtagtgtgtttatttcaataaatactttctgcatgcgtaatacatttgacatgtaatgttttttaattagtgatgtattaggaatgtctaaattgttttttagcttttttgtttcgctatagaaaaccttagagcttagtaacttgttgttcttgatataaaaataataaataattttagtgttagtgctagtgttatatttggcattaaaaaacatatttgaaaggtttaaaatgtataaacttgaatgacaatcataaattatgccaataatagttttcagctttatttcaaaaattcaataaacgtcacaataaaaaaagcctgtataaatttgtgtatctataagctgaaaatcaagaataattgtaagtttttcaccatttatgtgacaaagtgtgttaagcacatgacgtagtgcgaataaattgtcgtttcttctcgattgcaatttcaatttgccggcattccgagaccaaacgggaaattgtctgcagcggcgtctgagttcgagtctgagttttcagttgagtttctttttttttttttgtaaggttgttggggctgtgctgctggtggttgctggttgccttgagacggatgttggctgtgacaggcggaattccgaagactttgggcgggagcgtgggcagcggtttagtaatacatggcaatagagttatgggcggcagctgctgctggcccagcagtagttcagtgactatgtgggtgagtccactcaatcgttaataaaccattaagttttgttcaaacaattaaatcaaagcccaagttccttaggcttctataaaatcctcgcttgattggcatgcaaattgccagctcctcccaacagctcgatatatatgtatatttttgttgccccaactcaatggcgtgccagaaggcaattcaaaatgccataacaatcagttggcaattaaatggcgcccctcttcaaaacacctccacctcgcaacaccccccaattgcccaatgccaatggccatggtaattcaaaatctgctcaacgatgtgcgattgccaattactaattaaaaccacaacagcaagtgcatgaaaatacagttgaattacttatacacatatcgattgtctgggggttgagttgtgtccactcgaggaagtgggccggctggctgtttggccggccaagagggaaactagatgactgccaagtgttggagtagaaggattggattatctagatgcggcaatcactcgactgagactgagacccagacggagatcgcgactgaaactccagctgagcgacatgcaaatgagcgaaggcggacccaaagaccatacccacacggccggaaaatgctattgtattgcttaaataggtaaaataaacagcgaataaaatacaagaatgaactttgcttccgattgaaaatgattcaaaagccaagtattttcgattaaaaggtatatagattcgagtattcttcatctttattgataaaagtataatcttgtcatatgaattaccattatccaaaatgtgtgattttttcgctgtgtggctcccctttggttctataggtgtataattttggccaaagaaccgaaaaaaggccaacttggtcgcattaagcctacgccaaaaattcgatactcatttatggacacagagaggcttagtcacattttcgacctgactcacgttgatgatcgaatacaagtgattactactcattcgcacactcggttgactgaaattcgtctgcataggatttccgttgaaagcaaaacagctgttttcgttagctgcttttcagatcgatttacacttccactttttgtactcgtatgcaattccactttccattttcataacgcgtttttttttttttgaaaagccaataggcctaaaagctggtgcatctcagctgatcgaatgctcttagtttttgctcttgagtgggaaaattgaaaatcactcgattctctgcactctcatcttagtgcatcctacatttttatgggttcttcaactatttttacacatcattttttttatttttggccgccggtcgtgtttgtgtttatgacaaacagaagagttctttcaacctgcagctttcaaatttgtttacaagtgcgtgtcgatctgtggtctctcgatttccatgaccatttctttgcggcttgactaataaaccacaagaaagacgagagccaaattagggctttctgtttattaacggccatgaccattagcggtttatgttattttctttttgtacactcgcttctcggcgagcccacatgtttaagcggcttcctctggcccgcagaagaatagctaacgctctgaccaaatatgaggaatttcttttcatttcgcaagcactgcacgaaaaaatagtataaaagaatgaacaataaatgtggaggagtgattttgagtaatttgagtcctaaagtatatttgaataactcaaatatttccgaatgcattaagagatgtaaattgagatcaaggccttaagctgcaaagttatgttactaaatcatcatacatttttttcagtgcgctttatatcgctcgtattagaggcacaattttggtcattcttgttgcgacttaagcttcgaagtatgttggaacgctcaaagagcgttgacttgccgctcttacgctcttatcttcccacataaaaccggccacgcagtgggttttgagctgcttttgagtgaatccagataaaaagagttattcaaatgagtaaattgaacatgccgacaatgcattaatacatttgatccgcaattgatatattaattaattaatattaattaattaattaattaattaattaattaattaattaattattaatattaattaattaattaattaattaataattaatatattaattatacatattaatcccgaaattctgttttaatattacaccgcaatgcaaattaaattcatcccttttcgaacaatgatcatttgatcagtttgatcgaaatgaacttctaacgaccagcgagtgaataactgaagaaatgaacacgttagtgaacggagtatgtgcgtttattcactcgcagcaaattggacaagtgatcttgctcactgagagcactgttagcaacaacactatcacgcagtacacctgcttcgctcactcacactcacctgaaatcgctcgcccccgctccgctcccgctatttctctctctctcgctctgtatgctctctgcgctcttgtatctctgtggctcttgcagttgtatcggtatctcagcacccaagtgaattcgcttaacacagcggcgctcagtcaaatttgaaccgcgataccgagcggttgggcgtttatctgctagaacttcgttcccttaccagtgactgtgtgtgtgcgtgcgttgcgtccgtatatgaatgcatatatgtgtgtgtatagtgtggcaacaacaatttgttaacgcacacacttacgcgcagttaacgaacgcaacttggccctttaaaagtgagaagaaacctcaagcaaagtgcaaaattataatcaaattgccatcaaaatcaacactcaaaacttatataaaacaaaccgcgtttatctttagtgcaaaaattgtgttgaagcagcagtaaagacgtcaaaacactataaaaataaataaatgactaaatcgagtggactgtgatgtccatcgttgcgttatcgtcctaaataaacttaaccgataaaggaaatcataaatggaaaccatgaactcagaactacagagttctcaaaagcaaaaaaagaatccaagcagctgtgttgcatttctaagatatttgcttgtcgcaaacgagaaattttcaacttctcccaacttctttttagttgtgcgttgttgtttttgccatttttttgtggttcttgttattgttgttgttcttgttgttgttgtctgtcgtcggctggcttttcattcaataaccagtttttgtcagattttttttcctttagattttggtgagcttgaattgctctttaggggcgatctggtctcggatttttgatcgctgcacacgcactaaaatccacaaagtcgcaatgtagtgtgtatttcatttcatttaggtttttcctttataaagacaatttagtcatgccaaacgcatgcaccgctctatacacctaaagaaaatatatataaaaaatgtgtttcaaacacaaatatattgtatcgtaactgtttcgaataactgtaaaagtaaaagagtaaaagaaaaaaagagtaaaaagtaaaactgtaaaagtaaaaagagtaactgtaaaagaatatagaaaatataagtatttcatttttttaaagctaaaatcaaaaattctacatatagaatagaatactataggatttatctaaagaaaaggagttaagtaaattagatagctggattaaaaaccatttaaattttcctccaattcaataagatttttctcagtgcaccctcttttccgcccctatctcttcaccgcgttctctctttctttttacctgttagttctgaacacacggctttcttgacatgccaggcatacttaattccggctctcccgtttaaacctggcttagaaaatgagagaaaatgcacaactgccataactgtgccacaaagtgggggaggaagaggcggtggtgaaggtggaggaagaggtgtgggaggagaagtggaaggagggagaaagagagaggcgaaaagccaagttcagacagtggcagtggggaaatattttccgtgaatttattgtgtgaaattttgcatgtgaatggaaaatgcacacggaacaagcagccagcaaataacaataacaaaaaacccataataataacaagcaacaaaaaatatgagtgaaaattattgaaagccacttgcagcaaagtgaaagatgcaaaaaagacacaaaaaactgttgacgatggaaaatataaacaaaaaccgtgaaaaaaaaaccaaaaaatctttaaaaaaaatgagccaaaactaaaaactaaaccaaaattcaagtaaaagttcacagaaacggccaagaaaaattgtttgtttgtcatttagctacgttacgcccagcgtttgcataaataaattaaaaatttaaagcagacaatgcaaacaaattgacaaaagtgcagaaggcatgccgaagtttatacaccctttcaattaaagtagtattttaacaactgaacaataaaatttagttaattcaagttactttctgtaggaatattaatttgttaataggtacctatagctatgaattgattaacaataaacaattcgattttgtactacaaacttcagattagaatccatgtacctcattggaaaagtaaataaactacacaaactttgaatgaaaaatgagttgagagagcgaaagaaatttcgtacatatctacatacgacttttgggtatatataaatgtattcgtatctaatcagagcgacaacccgtctcctgggcccgcagctgtttgcgtgtctaggcatttatttatttatacttattgtgtgcttacgggtccgagccagaaatacagctccaagctgacctcatgaattgaatggaatcacccgccaaaaaacaaagcaccgaaagtaactttaaaatcggggcaaaagtggagattttgcaaatgaaagtacacgaataaaattggatcgcagttttgtcattgtgaagattgcaaaaatggaagaagaaatgaaatacaacatgagaaaaaaaaaagtggacacggaatgaaatgaattaagtgctcgcttttacttgagctttgtgtggtgcagctgcgtctgatttcagtttcaatttatctctataagtttcaatttggctgtcgggtaaaagtgaagcgatctcgatcgcgcccttctcccattgtgttccactatctcggtatcccatatctctggctgtatctgatggatacatggcgtcgccagttcgttcgcccctggcgacaaatgcaccatgtacaccagtgtatctgctagatacatttcgcccagcacgttttcttttggccaacggccaattggaacaaaatgccggcaacgcacaaaaacataaagtcaactacaccagctatatacaaaacgcttctgagatacacagtaaaaatgatggaataatatttatttaaaatattaaacttgatcttggggttagcaatggatattgaggagtaaagtttaaagggacctttaacacaagtaacaagtcttaacataacaaagaattaatacttggtatgaggaacatcttgtacaaaaagaaaaacttctacagattgttaaatgtttcagaatggaattgctttaaaaatagacaacatttatatttttgcaagttttcatagatcttttttttttgcgtgtgcaaatagtcgacttcctgaacgagaacttttacttaaatttagtttagtgcttagtacactcgaatttggtatctcgctaattgcaactcatttgcaattgctgttttctgatgatttcacgttcaagtacgcggatcgctgcgtctgcagctgaatcatctcagctaatttaggcgtacaaaattcacaatcatttgtatttaaattcgacaactccaacttcaggtccatccaaccgagagcaataaaaataaaaatcacaaagtgccatcgcaaaacaaacataaactccaaaacgtgctaaaaatcgtaaaaaaaagatcgacagcgaaaaagaatttgcggcgaaagttgaggagtgtgttgttcatcacccaaagtgtttcgagtgtatccgagtcttttaatgtgccacccgcaagatgacatcgcattcctactataaagaccgcctgggcttcgatcccaatgagcagcagccgggcagcaacaactccatgaaacgaagcagctcccgccagacgacgcaccatcatcagagctaccatcatgccaccaccagtagcagtcagtcaccggcaagaatttccgtttcgccgggtggcaacaatggaacgctggagtaccagcaggtccagcgggagcagcgggatcgggagctgtacagcaacaacggcagtcttcaccaccaccaacatcatcatcatcatcatcgccactcgacgacgggcagtgcatcatcgccgctgtacgagaacagcagcagtccggctgctcccaaaaaggccaagcactcgtccacccaggcgcagccgcagggtggctacgaggatgcactcactcagtttaaaggtagcatgtccatttgggatcattttatagaagattgggacataatgcgtaagtgggaaataggatttttgcgattcttttggcatgtgttgtgttccagttctttgatgttgcctccgtttttatttttattttttggaaatcaaagaaaaagatttattaattgccgcagcggaaatcatttgcatttcaagttcgcttcgtttgtatctcgtttgtatgaatttcaattatgaatccgtcgcggtttcatatatatttctaagcttaactaaccccaaacatgttttccaacgactgactacaactgacggaagccaagcttgggagcaaattataaagggtcaaggtcaagaccctctttaaatgctagcttagactccatagaagtttttaagtaaatatttaagcttagtcttcccaactggtttaaagatttggagttgaaatatatgcaaaatccgtaggaatgtgaaacagatacgaagaacaaacaattctaagctatgacaaataattatctcactttttagcaatgcatttcgtatcttttggcggacttttcaaggccttatcgagtgttataaatacatattacaaatccgacaatcaccaaattagaaggtgtgttgacacttcttggtgggcaaatacaaacacattcgcagaccattggtcgcacctttcttggcacatcaaatgctgatcaaatagaagggtgctgccatctcgaccttgaatttaataacagccaaataactgttcattacagttcattgggggtgaattgaatttagggtatgatctaccgtctaatcatccctgttctcttgggaacttgatatttccatcgttcggacgccacgaatactgtgttgtcaaattaacaaaatttcggttggcattagaattccacgaatttcgaaatgaactcatttgtccagtcgaaaaagaacgggtttatgcttattgacttttgtaagcatttatatgggcgttttatgcttatggttatacgttttcgattgcctggcactaatttgctggcgccattagttgggaattttgttttttgttttttttttgttgacttgcagataaaagcgggaagtactttgaattcaatttgaagtgcattttcctatgctaatagtaaagtgtgagttcattatttatatctggcaagtgagtgaattttcttatcactgattgcaaacgttcaaaacacgatcaagcaaccgtcgccctccataaaagtgaacaataaaaatgttcaactggtaaagccttaagccttaagccttgttgctaatttcctaatttagatatgcaaaaatatatctaacataatatatcttgtaaaatttgaaaatttgaaaattcgaattggattcctctccagtaagcgtttaaatgttttctttaatcagacttgtatgatcaaacgtccttctaaggttaagtgtgctaatcaatgagaatgactaaatgcaaaaataaacattaacaaatatcaaataagcggctccgaactcttctacaacaacttaacgaacgtttaatcgtcaaaaacaaattcaacttagaacgtgacatcatcacgcgctcttcaaaaagccgcatacagacacatatccagatagtgtgagctaccctgttatggtatttgtgccgtcggagtcgtacacctttgcacaatcattatttgtgtgaatatttatgaactctttgtgtgttgttcttggcctagaggatgataaaaataagctcgattacgaatcggcttggtgttgcatgcaatcgtgcagaaagatttctgcggaaagatcggatcacctcaatgaatggggcgagtttttgagagttcgaatctccgcttgaatggaaaattgcaaaccgatgagtcatcggattggaacaagttcaagatcttttcgcttctccatttctcacactctctctatctctttctgtcactctcttcgacttgacttagctgtaagtgaagagctggaaaattattgatagggtattaacggttttgggttttgtgttatattacaagcaaatatttatttggtcatgcaattccgaaaattgtattcgcctggaattcgatgaatcactgtaatgacatatgttctttttgaaatttttaacgaaggactttgtccgtttaagggagatatcttctgatattatgtgctccaaactttagttccttaaccacaacaaaagctataagtagcaacaaaatatttatagttatatatgtaacacctgctttacattgtatgtttacaacgaaggaccttgttcgcttaagagagttgtccgctctaggaagattttaccgtacttggatttggaccgtccattttccacaacgatccattacgtatttgccaattagtttgtgtacgactcttttacaaattgtttatcaataaacacgcttcttttgttgaccacacgactaagttaatttttggctcgttagactttttgtcgccttaagtgattaagcatgaacataaattggagtattggtaatccatttgcaagggcatttaagcttcgttcttaccatttaaaaaaggcgtagagagtgggtaatgtagagagaagagagttaaactggttgggatcgttcaactatagtcacttgttctctctggcacttattttccttatcttttagcgcttttgttttgcttttgagcttctgctttgagttgctcgttgttttcagatctactacgtttatggctttatgtgtttggcacttgaatttatcgggtttatcagccgaattaatacttttacaattggctcgacacttggaggagccttctcgttgacgttctaaattttctgtagggtttgcttttttttatggatctgcagaacatttcttttgttcctcgttgattagattgtgttgaaaaagggtggttaacttaaattattgctcagctctgcccctgcatggagttatcagtccacaaaaaagtttactaattacctcgaaatgtttaacaacttggaaatgcttgatttttgtgccgagagttgtggcaacatgaccattaggttatctgtagatgggctattcccacaaactaacacacgcacacaacactcacgccatgtgtcagccaacaaatcaaagccaaaagctaccttaactcctgcccgcccacttcttatcgattttcgaaaaacattgaccaaagttttccgagaccctgaacggaaataaagataggaaaagcgcaaatagggaaatcgcacattaattgccggcagttgaaacatttgttcaaacaagttaattaaggccctatgaagattgttcaacgcccgcacttgagttgctaaaattggttgaaaaagaaatctagaaataatcttttgccgataattaataactttgattgtgggcggttgaattttgagtgttttacataaacaattcacttctcaatcaacgatgacgccatacgaaatgtttcttctttcggcataaacttctcaatcattgcatggaattttgactactaacctacgaaatcaagtttatcgagaaattctaatatgcgctcttttttttttttaaataatttcccgttttagacgaacgcgatgccattcagaagaagactttcacaaaatgggttaacaaacatctgaaaaaggtgagttaatgatcgagctttaaatggtgaccaccacaaaagcataaaacttaactgaaatttgtgaaacctactgattttttttttttgaaatttccatttaacacctttcccacaagcagcattggaagtatgctaaggtactagccaataatcataaaatacaatttatagttcttattttttttaacatacgataaaatgaatttcctgcgattttcagacctatactatgctacatgtttgtgtaaccacaaatggcataccctgttgttctcagtctgtaagtcgagctaaaaaggattaccttcaactaaatatttcttgatgttgtttcataaagtttttattattttttttccaattgttaattttgttgagcaagattaaaattttctttttaactgcaagggttaatacaccacttttcattgatgttgttttcttgagtttttactagccgcttattcaaaatgtttaattttaccttgcggcttgtttcttttgctgttcagtgccagcagttttttgagttgttttacctgcatgtctgtttttttgtttttttgtttgggttactctctaatttatttgaatggacttttactggtattccactataacgcctcccccatctgcaggccaatcgtcgtgtggtggacttgttcgaagatctgcgcgatggtcacaatttactttcactcctggaggtgctatctggcgaacacctggtaagtgttattcaattgatttcttagcagttttgtcacgctctcgccaatgtcttttattcacttcggatttttatattttattttttatagccacgcgagaagggtaaaatgcgtttccatatgctgcagaatgcacaaatggctctggactttttgcgctacaagaagatcaaactggtcaacatacgcgccgaggatattgtggatggcaatccaaagttaaccctgggcctgatctggaccatcatattgcacttccaggtgagttgttgagcaaatactacaggtataccatatatatacctgtattgtacataactatatattttcattgattgagcaattggagcaaaactgtgggcgctgatttttggtgggcagctattcaaagtcagcgagtcagcaaaagcaaacgcccacgagccgctctttgcgactcaatgactggctgaatgactggctgactgactgactgactgactgaaggtgaccccccggtctagagtttgttttcatttgggcgtttggatcgattcattgagccgacttggcagcagcggcagcctacacagcaaccagatagctacagtcttgacacgctacgacaaactacgctcgatctttattttttatttttttttggcaaacacggcccagccttttaaggcaacccgattgccttctctttgccgccgccgatgactgacacacataacgatgctgctgctgctacagttcgtcggcagcaaggccgcgagttggctttaaaggcgtcgtggggggcggggggagtggttttggccacctacacaacaactggcagcaaggcaaggcaaagccggcccaataaaatgctgcgttgggatgcagtcttaaacaaaacaacaatccctgtgggatatcttttacaaaaatatgtcaaacgagatatttatgaagaaatttaaaagtaaacacacttgacaaataagcatgatatcaaaaatattctatgagtataaaaacaacatttagcttgatatatagcttaaatgttgaatttaaaatgacggatactgtgattaaagaacttcaattatattgtttttggcactgactgactcatcgatgagatacatttccgcagtatgtgtgtcaatacgaaactgggatatttcgcaatctgcgacgaacgcagatgcatttttcaagtcgtcgttgttggctgtcgatgtggctgcggcttttcttgactccaacttgatcgatggggcgcataaatgctcaatgatgctgccagttcaccgaccatgaggcaacagccgcagcaacagtcgcaacagcaacacgcaactgtggctgccaaatggcgttcattcaattgaggcgaacgaattgtaaatcacttgacaatgtgaaactcaatcgcgcgtcacttactgtttactgtttactgttttctggcttattcattatttcttgtctgcctgccgccaaggatttatgtatattgtcgctggctgttgcgggtgtctgatgtcatccgaatgtggctcagagaaaaaaaaaatatgcaaattaactgcgatcgacataaaaggatatttcttgttttgcataccaaatgatttgacttacagcattctcagtctcatttaattttttgttatccaaatctaaatccaaatcgcaatcgacatcttgcaattatgacataattcctatttccattcgtgtgcaaagctgttttgtatattcaattaatgatcggtgttttgtgggtcagcgcgttgggaaaatgaaaatatattgttaaaggcgaacaaaatataataataataagtgctggagcaattttctaaacagcagccgctggcagtttgtaacgctgcttagcttgtaattaagttataaactatgaaccacccacaacaacagtaaaaacaatacaatcaatcagagactttacctttacttgagaacataaaacctgttgagctgcattgtaatttctagtgcttaacacgtggtctcaatgattccgcaacaaattagtgcatatttatggcagcttttagcttaattattacaggttctagcgcgctctagttagttgcgagtacaactgatgataaattaaatataacaacttcattcaattggtttgagatacttttacctagatggatcatcaaactacaaaaatctttgtggcccaatttttttttggctttacacgaaactttaccaaaaagctgtacgattaaatagcaaaacatagtactctttttaatatacccaccaataactcaatttatgcagccaacgtattacgcgatttactgctttatttagtacacccaaagcgccatatcgagagctacaaatcttagagtaaccttgcggctgccacgtaaacttcctaagccgctcaattgctaaatttaaataataaattgccgcaatccccaaggcgacggtgtgtgccaaatcgttgagatctgtgtcgaattgttctgacaaacgttttcattatgagcatcagataatttccccagcaatttgccatttttcattgctcgttagttgttgggagtagtggtgcgggcatgtatgtatgccaatcatttatatttggccaaaatgccatgaccgatgtttagtcaggtcgcccaggcatgaaaactaacgccttgaaagaaagccaaaatacaatgaccaaagagccaccgaaaagccagacattctcacgtcatcgttcgaatttgaaaagattattatttgatattttttttttattttttgggactgctgtttgtggcgtttgatttattataatacgccaaggtatgtgttacaataaagtcaatgccagttgagaaacgccaacggacaataacgagaattacttgaaaaaaaaatcaggtggaataaaagtgttttttgtttagtgccctgcccatgacatcagcaatcctcggttcttgccaaacgaaagacttcaacgcaagcagcgaactcgaactctcgaccagctggctgtggagcatatcaaatggccaaaacggattgctaacagaaacaaaaacaacagatgcacttatttgtcttaatttatgacattgatgactgaatttttgaatagcttgtgttgtgtgtgggttcaatctcgatctcgaaatctatctatagccatcgcagataaaaacaaacagattttcattaataaatcgatagcttggcttttgaccaaataaggaaacaagctgcccgtgtccacctctctcactctctctctttctaattatgattcgccatccttttctgtttggtatgcaaatgtcatgagctgtctggaatagttatttgcactcgtgaagcgtttagccaatgtatgtaagtgtgtttctaatgacttgtaattaatatgaaaactcaacgctgtataaatttcaagtgtgtagatgaaattataggcgacgaggtaaacgattcgatctagctgccaatggtgatgatgatgagcccacacggtgatatccctaggaatgtcatacgtatttggtgcggtgcgagatgcgacacctacacctcactagtcactagacacccccacaagttccgttcgaggttcgggcgactaactagaacagcgagttgtacagagaacaaaaagataagatatttctatataattaattaaatgtcgattatatctgggcacttaattgagttttatagatgtagtattgttatatcgatcaatatgattatgattatgattatggcatatgacaaaattgcatatactacatatttttttctgcgtgtggagattcccgttgggttgtaagactatgagaggttaatatggatattagtagctactgattccgctttgttttcccaccacaaacaacacatttcaagtgcaaaacagttctcaaattacgaatagtggcaaacataatgcagcatttgtttactgggttgcatcatatcggtattaataagcatatgcccaatatgagtacttagccgtaatacctacaccccacaccccacaccccctccccgtcacaccccgcaccgcattccttgcagcggctaattagatttgcaattcagttgcacagtttctctgagccatgggaaactcaaggtgtggggtctactcgtacgtctgcctgtattgaccatattgactatagcgtttcgagagtgtgtgtgaatcgaaaaacaactgacagcagttaagcgtatttattacccatacataaatatggccagcaaatatgccgggccaacaacaacagatgtagttgtcgacgcagtcagtgccttttactccatatagggcaacgccatcgggggtttaagccatgtaacatgctaattaacccatgttggcagtacgcgagcgagtgtttcgaatgtttatttgtatcttaagcacacgcgaatcaaaggcacttccgtctggtttggcccagcctcgcatatagatttcgacacccacttgaatcgaaatcgttggactttctaagtgcaagattattgcaatagttctgacttgccagccttatttggccggagattgatgggggaaatgcatgccatgtgtcggtgattgttgctaatttgcattaattattgatgtagtgcttcccttacagtctttatataaatgcgaaattttcttcgggcactaaattaatttaactttgaaaattgtataatgcacacaaaatgttttaatttgcttcaagtaattttcagttttttcccattttctttgccattttccaacgcttttcgcggctgccctttatcatttcatttgctgtgagtgaaacctgttaacataagtggtcatttcgtctttttgccgtctttttgggtcactatgcgatgtaatgagttggtcgtgatgtgttatgagattgaaattcaaacctgcgaaatcccaaaaataccatggggtcatagcgaatcgctgttttctacgtttcttttgttttttttactacccaacagggtttttaatcaaaactcgttgttcataatctatgtactaccattttgactacttcttcatttatatttttttgcctctgtcttgttcttttccatcatcaagttcttcgtcttgtttccattattatcattcttcttcttctttggtcgggtgttcttgtactgctgaggatgacgtactaccgacgactttggttggaagcactgtgtgagttggggctaccacaacaaaatttcaaatgagagagggaaaactgaagccggtattgtataatataccatctctttttgggcttagctttatatgttttgtaagccttggagtaagagatcacaattcgagcggaagtattcaattagcttattaaagcatttaaattacttgggcttttagggcaattatttaacaggtaaaagtaatggtcaagttgaagtgtatacatttattccctttatcaaactttataccttttagtaagtagtttagaactagatgatcttaaagatacgcatttatttggaaggattaaaataccttaattaactcatttccgattgtaggcctttggttgaaagtgggcatctctataaatgacatatgtgtctccattaacaattatccagtttgtaagggtatttcaagcatcgctgcccttgtgttgttgttgttgctgccggcgtatgtgtgtgtgtgtgtgtgcgttagcgtgggcgtcgctgccagcgtcggcgtccgcgttgccatggcagcagcgtcaaacacacaggtgttggttgcaaatacgtcatcaaagagttaccgcgcagcggtggcagaaacaggtggaatggcagcagaggttgtggtcgaggcagtggagtgttgccaccaacacacgtacacacgcacagctgtcagcacgatcgcgattccatatccatatattccatattccactcgtgacgccgacgttgacgttaacgtcaacgacaacgccaacgcaggcagcgatcgccatgtgccaattccactttgtttcagcttcgcttctattctggcctgtaaacaaaaaaagcgaagcagcgccgcaacggcgacgtcgacgccgacagaagcgtcaacacctggccaaagccacactttaagcgttttaacttggcccgatcgcttttagttgttgtcgagacgccgccgcacacatttcacgatacctctccataaatatttgcaaaaattgtatagaaataaataaaacgcatgcgttcctcgggaaccgcggaattacaaaactgaacgaaaacaacgggaacgctttttcgtaaacccggaaaatctttataaagtgtgtgtgtgaactagaaagatccaaaacccaaagccaaagtgatttcaatcaattaatgcgacttcgcatgatgtcagaatcttgcgttataatcgctcagcctctctgatttattaaatgccgccaatttcaattgatttcaatctcttgcaatttagttccatttcaattatttttttatgacaagtttattaccgaaatgcggggcacggtttgtttcaattcgttcgtttgtttgcaaacaaaatgccccgcgaacggagtcaagtagctgtaaaataatgacgtacaccccactgttgaactcgaagccacccccccctccaccaccacctaccccctttcccgtttccatctcgtttcggttttggtttcggtctcggatttttcgccgctgttccagttcgtagctttgaaaaaccattttttttgtgcgttgtttgtgtctcgtattttattttgcaattttcaacgctctcctcaagtggtttattgtttgtctcgttggttctgaggatggtttattaattttaatttatatgcccacaaatcgtctaaatctgaaaatgctagtgaagatcacccatatctaaattaacagcttgtttgcttttcttcctttctttaatgagctttaatttatgaatctcccatctgaaagcgctttcaaatgatttagtgtttgattcactgcattttatatgttttcttaattgtctccaaaaccggaattttgtacatttcttttaaattaataaaatgccaaattagttgtcatagccattagtcttccaccctgccaagcttaactactgaaggtatttcgaaattttgattagcttcagatgcattatccatttaatttataacctcgagctgcaataattttctgaattaacgctccttgtcgtcgagcaatgcaaattggcaggcaccattgaaaatcgcacatctccaaactttgaacagtagccaaaaagccaaaataggcaaagaccagattcagttttttttttgccgcctttcaaaagactcattgagaatgtcaagccattaacgcctcttagagacgcctccacagacactttttcgagctgttcgttcgctcgccgccccaggtatttttcttatttctctatcatttttgtttttagtcataatcacataaaaaacatcgcggatcgtttatagtgtgcttaaaacgctgcaattagcatttttggtggaatggttgtgatatgtgtgtgtttgtttgtttgtttgtttgtcacggtgctgcgcaggcgttaaacgcagccgcaacctccatttaaaaagtccgttctccattaccaatgcaaaacaaacatttgtcgtgcctttttatgctgggtgggcgatctttttggcctggccaactgttttattgatcttgagctatatagattaatctggaggtttccattagaagcagaggttgtaacaaggcggtgcgaatatgtttacaagctaaccagctgttagctgtgattataaagacccttaacaattcgttcacttcctgtttattttatttttattagtgtaacgccaaaaaagagtcactctctgctgcattgtttttatacaattttgtcacacttgcgaattatttgccccttcacctgaacaattactgttgtttgttttgattaatattgaacctaaatatttgtttaaaaattttgtagtaagcacagaacgtaagtggaatatgtgtaattctgctattttagatttgagtaatgtcttggaatcttgatattctgtatactatgtatttacccctcaacatatgcaagttcaacattaaaaaagaggaaatttattcaaactttttcctacacttcctatagtgcaaatatgccgtaaggccagcggtgaatatgcccatattccctgttccactaccatatcgttcctctccccattttcctatgcaaaataggcttgcgtgttccgaaactaatgaatctctgcccatgaatcagcggtgtacattaactttttgcggtacgtatgtgtgtatttttgcaaaaaaaaaaatacaacaaaaaatgtcggcagcaaaagaagcaacaaaatagcgccaagagcaagacagacagacagttgggataattatgtgtacgtacaacacaataaataattcgcaacaacaatggggttgcccttactcccctcggcatacccacccccctcgctccactttggctcggttcggttaaatttacttcacttcagttctcgatggggtttctgaaaaaaaactccagggcaatgccacatagaaccagacatccggtgctggtttggggatttgactttggctttaggtttggcttaattaaactgaaattgtaaggaccggcaaataattaaacttattttggcaatcacgtagaattacgaaaatcggcgcaaaagaaacgcggcaatacgaaacgatcttctaacgaaccttagaacgaaacgacacaaagtgaaacaaacgaaagcatcgataactgcgtaagcagttcgattataacgataacatgcactccagctcacaatcgacgctgaagcgcacacaacaactggtgcggcagacaaatggtggcaggggcgatgttctgagcagcggatccgaagtggttcactcctcccgaggaccggcaataaccaccaatatcgatgactcgaacttgcgctatcgtcatgagacaaaaagggagcgcactgtggaagcggtgattacggattatccaggtgtatcaccccttggtagcgttccccatgaacgaaccaactttgagcgcactgtgaccttccaggatcccacgggaaattcacgtcgcctctcggagactggagctttggtaccggccggtgcaattccaacgtcgtcgactcattaccaacaggtgacgcgaaataaacgcatctccacagaggtattgggctccagcgtggaaagcaccaagacatcgcaaagagcgccaaatggccatcgccgtgtaaccacgcacattgtccggaaagtgaccactttgagcagggcggaggagaatgctcagcctgccgaggatttgttgcctccggctaaaatgattcgcagctcggagttggagtatcgtcgcgccctgccgccggctatagagtcgtcgtccacgcagcgcagagaggtaaaaactgatcctttttttttttttttttttttttttttattattattatatacggcaggaaaatgaaatcttctaaagataccatctaatgtccttggatggcatgcacgattcataaccctcagctgagggcttatgcctacgtactaaacaaaaacctccgctctctctcctgtccttgtcaagctcaccggggctgccagtcaaggtatttcatcggtgagcaggatgtggtgccaagttgcacaccatcttcttttgcggtgcacagcagcgcctttttacgaccaactgagcgtaccagtcgtagagttcttgccccgccaacatacgggggtactccttatctatagttccgattggccatctcgtccttacggacacgcttcatcatggtgacgatgatcacgtgagccccatcccaaacgattttgtccgccatcatagcagcaaccaagcctctcgggctgagaggtgacccagcgagcgccacgagttgcgccctctcctcggcgaacctggagcagtgcagtaggatgtgctctgcggtttccactgcgtctgtgcaataaaggcactggggctgtatccacgtggcggaacctacataggtaccctcgaaaacagccattggtccgtgaggaactgggtcatgtgggtagtccaccgttttgtgctcgcaatcagcccactccgttagttgcggaatgagtttgtaagtccagcgtccccgttgtgactcttgccacctggtctgccatactcctcgaatccactctttgatctctaattgagtgtatccctcactcgcaaggtatttgccctttatgtccaggtcaatgggtgtaatgcctgacagagcgtgcgttgcgtcgtccgatatggttctaaagcctctgattagcctgagagccattgtccgtgatactgcgccgggcactatctagataggttttctttgtggaaacgcagctccagataggcgcagcataaagcagcgttgcctttgaaaccgccactaacagtctcctagccggcagtctgggtcctcccacgttgggcatgattctcgccaaggctgctgctgtcattgccgcttttttgctggcataccttgcgtgagccttgaacgagagccttcggtctattagaacaccaaggtatttcaacgtttctgctgaggcgatttcaactcctttgacttctacacgcatgcactcaacggactttctgctgctcagcaggactacttcggtcttatgcgcagctattttaagtccgactttctcgagccattctatggccgccgtgattgccacgttacttatgtcctggagctccggtattgtcttggcgaccgctgttatcgcaacgtcgtcggcgaagcagtgcagctccacacctctgggcttgctaatgctcagtattccatcatacataatgttccacaagatcggtcctagtaccgacccttggggaacgcctgcagagacttggtggcttcttggaccatcttctgttacgtaccataacacacggtccctgaagtagttgccaattacgcctcgtatgtagtcgggaacgcccaagttgcgcatagccccgaggataatgggccatctcgctgtattgaatgcgttcttgacgtctagcgtgatgatggcacagtacttcttactgccgcctaaccatcggttaccgtcgagtgctttcctggcagcgtctgttacggatttgagagcgtcgagcgtacttttaccctttcggaagccatactgttggccctgaaggcctgtaggactttcagtgattagctcaatgcgcgcgtacagtatgcgctcaaagagcttgccaacaatgtccaacagacacaacggtcggtaactgcgtggaacatttgcgggccccttgcctttcggcagaaggacaaggtaaaaactgatcttgggaataaaataaaggatgtcgaaccattttatcggagaatttaaattaggcaaccacagtttagctctgctccagttaatcaatgaatttcctatcgtatagaatttgaaccttacttattacttaactttatcctgctcagatctccgatattgttgtgggcaaagaggacaacgtatccgctcgggaggctctgctgcgctgggcacgtcgctccactgctcggtatccgggcgtacgtgtcaacgactttacgtcgtcgtggcgagatggattggctttctcggcgttggtgcaccgcaaccgaccggacttgcttgactggcgaaaggcaaggaacgatcggccacgggagcgcctggagacggccttccacattgtggagaaggagtacggagttacgcgtctgttggatcctgagggtaagttaatccatgataatgcgtatagtgatccatctaactgcaattcctcgaatttagatgtggataccaacgagccggatgagaagtcccttatcacgtacatttcatcgctgtacgatgtgttcccggagccaccctctatccatccactctttgacatggagtcacaacgtcgcgttcatgaataccgcgacctggcccaacagttcatctactggtgccgcgagaagaccgcctacctgcaggagcgttccttcccgcccacgctaattgagatgaagcgtctgttgagcgatctgcagcgtttccgcagcgacgaggtaagcgcccgcaagcgcgagaaatccaagctcatccagatctacaaggagctggagcgctacttcgaaacagtgggtgaagtcgacgtagaggctgaactgcggccggatgccatcgagaaggcctggtatcgcatgaacacggcgctgcaggatcgcgaggttatccttcagcaggaaattgagcgactagaacggctgcaacgactggccgataaggttcagcgcgagatcaagcatgtagatcagaagcttaccgatcttgagggccgaattggcgaggaaggtcgccgcatcgagcgactacatcccgtggacgctaagagcattgtcgaggcgcttgaaaccgagatccggcacctggaggaacccatccaggacatgaaccaggactgccacgtgctcaacgagggtcgctatcctcatgtcagtgagctgcacaagaaggtcaacaaattgcaccagcgttgggctcaactgcgcaccaatttccacacgaacctggtacagaagctgtccggtttgaagtatcccgtccacgagaccacggtgacgcgtcaaacgcgcatggtggtcgagtcccgtcagatcgacacgaatccccatttccgcgatctgcaggagcacattgagtggtgccaaaacaagttggtaagtacaaataaataatatatgccgtcttttatatcaattaatcgattgttttcgtgttgcagaaacaattgcttgccgctgactatggcagtgacctgccgtcggtcaaggaggaactggatcgccaacagcacgagcacaagatcattgatcagttccacacgaaaatactcaacgacgaacgtcagcagaccaagttctctggagatgagctggctttgtaccaacagcgtctcaatcagctgcagaaggtgtatgccgagttgcttagcacctcgacgaagcgtctgtccgatttggattcgctgcagcacttcctgggacaggcctcggcggaactgcaatggcttaacgaaaaggagcaggtggagattacgcgcgactgggcggacaaacaactcgatcttccctccgtgcacagatactacgaggtaagtggtggcctatgccccgaatgaatccccccccttagagctagtgttatatatgtgttgttgtgcttctatccgtttacaagcgtgcatttggtaatggcgacgaggtaagaccccagattggttcataaataccatgagaaattttctattgcaaaaaaagagcaaccaaccaagtgcacttataaaaaaatttttaatatcgttacttataaaacgtttttaataaccactacagaaccttatgtccgaactggagaagcgtgagatgcactttgccaccatcctggatcgtggagaggcactgctgaaccagcagcatccggcctccaagtgcatcgaagcccatctgacagccctgcaacagcaatgggcgtggctgctgcagctaacactctgcttggaggttcatttgaaacacgccacggagtaccatcagttctttggcgagatcaaggatgccgagcagtggctggccaagcgtgacgaaatactcaacagcaagttctcacagtcagactttggcttggaccagggtgaaactctactcaggggaatgcaggatttgcgcgaggaactgaatgcctttggcgagacagtggccacactgcagcgaagagcccagacagtggtgcctctaaacaagcgacgacagccggtaaatcgacaaggacccgtgcaggccatttgtgcctacaaacaacagggtcaactgcagatcgaaaagggcgagactgttacgctgctggacaactcgggacgtgtgaagtggcgcgtgcgcactgctaaggggcaggaaggacccataccgggcgcttgcctgctattgccacctcctgaccaggaggctatcgatgccgccgaacgtctgaagcgtctgttcgatcgatcagtagctctttggcagaagaagcatctgcgactgcgccagaacatgatcttcgccaccattcgtgtggttaagggctgggactttgaccagttcttggccatgggtcctgagcagcgcacggccatccggcgtgccctcaacgacgatgccgacaaattgctgagcgagggtgatccaaacgatccgcagctgcgacgcctgcgccgtgaaatggacgaggtcaatcgcttgttcgatgagttcgagaagcgtgcgcgcgccgaaggtgagtgtgggagtactcgtatgggtatcggtattaataggggcctttgaagggtaggagatagttttcgcctcgcttttcaattgtcggcgctcgccagctgtccaaaacgtttaattgatggaggctaattgaatttaatgcctgtgtgttttctctgaggcaagtggcaagcaggaagccagaatgcgacttagtcttgtcaagtctagtcaacaatgaagaagctgttcgcaagtgccaaaacaaggggtaatcttgtgcgcttcggggatatctaatcttagcgatctaaacttttttgttaccatatttatcgttgttaatcccttgcagaggagagcaaacaggccagtcgcatcttcaccgaggaatgccttgccatcaagagcaaactggaggacatggcccgtgagctggatcagattatactggctccgttgccacgtgatttggactctttggagcatgtgctggaaattcattcggactacgagcgcaggttgcacctgttggagcctgagttgaaacacctgcaggaaacattccgcacgattgcgttgaagacgccagtgctgaagaagagcctggacaatctaatggagctgtggaaggagctgaacactcaaagtggcctgcacaaggaccgtctgaagttgcttgaggcttcgctggctggtctggaggacaatgagcatgtgatttccgaactcgagaacgagctggccaggcaccaggatctgccatcgaccgctgagggcctgcagcaagtgtttaagcaactgaaccacatgcaggacatcattacacaacagcagccgcaaatggataagatgaacgatgcggccgatcagctgggacgcatgggagtgcccaccaaggtgctcggcgacctcaagagactgcactcgaacgtggagcgcctgaacacgcgctggagtgcggtgtgcaaccaattgggtgaaaggtaggtccgctggcgccacctgctctctttttttttgtgtgggtgtcgcctcattggcgaccacagatggagatgaacctgcctctctaacaacgtgttactttgctttttcagaatgcgctcatgcgagacggctatcgggcttatgaagaatctccagtcgagcgtgcaagtggaggaatcatgggtggatggcaccacggagcgactgtctgccatgcccaccgccacttcggcatacgaactagatgtgagtacaaagacgctgcccctgtaaaaacgagtttagcatttcgataagcgatagtctctagctctagatttacatacatagatccttgtacagtttttccgaattttagctatcccttagggtctctgccagagatctcacttcgcaggccaaacacaaagtatatatacatagcctataaatggaaaccgtagtagccattgacccgcgtccaaagtagtttgctcccacagttgttgctcctatttttgttgttgggataaaacctgccggtgttggacatgtctccgtactcctatatatatatctatatattttatatatgtgtttatcttttttgtattttttgtttttgtactacatttccatttgttaactgtccccaaaagcagagagcaaatctccagtcccttgtccgtattccagcagtagttcttgtctaatctaacagcagtctttgacatgtagtgctggccaccacccacataagcataccacatgtacatatatatacacacagcagacgatcctccaaatgtggccaaatcgaccacctacacaacaatagccatattagtaatctgtagcgatattcccccgtcccacaacactgtaaattgataccaaatttgtgttgtagtttttaaacttacctacttttatgtttgtagtcttgtccccttagtattataagctgcacctatacatagaccgatatcgaatgatatcggttcctacattatatatttcttcacccagtattatcgtatttgtagttgaaaactaattgtatatgtatttttgtctaatttttgtattttcaccaaaatcaaaacaaaaattttaaactttttcacacaacaatcaaatattatcacacactataaaacgacacaaaacgatcaaattataaaaaaaaaaacaaatcgatttaaaaatcctgaaaatattcgaacaccaaaaatacccctcgaaaacccatagaaactgctcggagctgcaatcgaacgaaaaccaaaaatcgaaaatgtcaacgtggctggaggacgacttatacgcgaagctaaggtaaaaatttgaatgcctgttgtggtatgattggtctgattctaatgactgctgatccatcgtaacccatcgacttcagacatgtgcaattcgatcgcttgacatacgattcgatggactgactgggtctagtcaatgttgggttgcgataggtcagttggtggccgagtgccagcactttacgtatgactgtgtcgaatgattgtggatatttcgaacgaacaccgaaatccctccttttccgcaaggaaaacactttgtagccctataaacacctcttagctgtttctctaccgaatctcaaatatatttaatgctttttaaaccaattaccggactgtaagctccaattcttagttatcttgcgggttaaaggtgcgtgaataacacttgggtggaacagaaacagcctgacaaacaaactcttaaacacacaaacaaccaaaacaagaaatcaaccaaacaaacaaactaattaaaaagcaattttaccaaaacgtaatttcgtattgattaatcaataaaataaaaagcactaaatatatcaacaagcgccccccttctttccttgcctcctgaaaaataaactaaatttgtttaacacacaaaattactaacatttaaccgaaattaaccaaccaaccaaccaatcgaacaacaatgtcaccgtgggaccctgaattccgggagttagatctacgatagcaaatgcctacgcttcgtggactggctggtcgaggcccgtccgtcgttctcgccaccgcgccgggatctccggccggcggatagcgatccgggcgccacacagtattacagccaacgtttggacaacctgaacacgaagaacgacagattgctggaacaactgtcgcagcgtctgaaaacagcaatcgaagtcaatggcagcgatggtctggtgagtaatccaggtgaccctttcccctttttggaaggatctttgcgaggtggtgacgtcagggtatatttttcgcttcgtttgtctacctcgttagctggggttaggctcgaagtattcaattgtttcgtaatcgcaaagcggggttcaagttcagcaaacgagtttttacgctttcgttttctacaagtcaaaccgagttttcaaatgcaaatacgtacgtctacttctctgtggtatcattgtatctccccctccatcatctgtgcctgtgtctatctgtatctgtattattgtatctgttaccgctccgaatgcccggcagttggtatattattgaattaaccttcagaatcggtgcacactgacggcagaagcagccacataatgacatcacatcaaattgaccaaacattccgtcaatggcttgccgctataaatcacaacttgattaatttataaaaatttaaactatttttattttctgtcatcgtgaccgtcgttgatcgccgctgtcaactgatgcagcaatttgtttaatgtatcaaatttatttataaatattgcattatgtcaggggagtttcaatagaaagagtaacaaaaacgatagacattgtcatgcgcctgaccaattaggcaaattggagacagattcgaaattaataatgacgacgccgaattctataaatattaatgaggcccagcattcgtatggattcgtatatatactcgaaattcaatgccagggaacgtcatcaacgtctttgtcgccatctgtcaacttttcttttatttttttgaattccagttcccctcttattttgactatttttgctcaactggtttggaatttgtttatttcctagcagctccatcttcagaaattcaattaagaatattattaagcaaccagcttgtgcctgctacgaaaatatttgtttgcaaatatttaggaggcaattaccatattgtttaaatggagttcagatcgccggacatggtgtaaacataagttcaataaactttttaggctaatgctgtaataaatagcatcattaatactacagtgagaaaaaccaatttttctaaatttaatgataaataatataatatatatatatctgcttaaaaaacaaactataaatgccataaaattgaacatctttagcctcaatttctttctatgtagttgatccatttcaaagtaatccgaatttgttgttttgggatctattgaggcttttcgaaggtgttgccttcgcctcgagcgttggagtgacatcataactgctccattaccacttcgccttcaagccaacttgatatgcatagcaggggcgggcgctgaagctccgctggcttaactagactgaaaagcgaaataagttatttagaaggttagatggcggcacaaactggtttgatctgttcttctgatactttgttctcgacttccgtgtattgttttcgactttaatttggagccaactccagcagcgtatactcccttcccttccctttccttcccatcgccaatctccaccatttcatgccatgccattgtaaatggattgtttataatgttttggcgcaacagctggggaatgctcaccgaaaactagccggcatttgtaagctctccctctctctctctctcagtggcaattgctttctctcaatctcaacaaaagctcgctctcgctctccacttaaccatttgattctcggagtggcgctgctccattcagtaccgaaagcgacgtggttgtgtaacgtcgcgtatccgctgtgtgtgccgacttgctgccggtgaacgaaatttaacaaaggccaaaacctttaaaacctccggtttttgttggcaaccaaagtctatggaatttgaattcgaatcgagcgtgtaattattagtgaatagttgtgataactaaacgggcaaataacttcccaaaactcaaatagagaacattgctcatacgccgcatgggcagacatgatgtcacatatacggccggatagaaagtgtgtccgtgtcgttgtcttagtgccttaaatttcaattaaatgcgaaccgtgtcgcattggttcgcttttattttgttagaagaaatttaaattcgctgccatttgaatttgtgccgcaaagagttctattatagcccgaaatgaagtcactcgtcgagtgctttgcaacaacttaaatataaccgaaacgcaaacagaagagtgtgaaaacgaaaataaaagaaatacattattaatatagccttgaacatgtcgcaagaatcggaatgttgatattttcggccgtctgttttggtgttaatgaaagcgcacacacaaaaaaaaaaaaaaagaaaaaaggagaaaatgaaaatctatggctgaaatttcgtagtgagtcagcgagttttagggtcattataagttgcataaaaccataaaatgctgcacttaaaatgagaaacccgaaaaactgtggaaattattctcccgctcgattactagctgactagcgtgaattatgacttgctatcaacaggaggatcgcgggagtgtcagggctggcgcttatctaatctatgaggtgcaatccatcagaactaaatgtgatgcttggaattgagcgatcggtttaccaggaaatgccacccggaatgccgatggaagagtatttgtttgttcgcctagcatccatgcactttccctttgattttatcgattaaactagatgccttggtataccttctatatatacttcgttgcatatatatatatatatatttttagcggcattctaacgataaatcaggaatgaaagcgagcgttttggggtctatgcctccactgaagcaaaagggaggcgcctattttcatagtgccacaaaggcgaggtccaattgcaggctgtggtgcatgctgcacgctctcgttagagcttttcctctctcgtttgttcgctcttacccccatttaaagccggtacaacgtggcgtattagtcatgttatcaatgtcaagcgcatctcagccgattagggccaagaatctgtttaatctgcttgcggactcataggccattattttgtgctttagttcagctttagttactcgttgtgcgggcgctcgacaaacttgtttcggtttcatttataatcaaatattcgccactctgatgacatcattgttctcgtacttgtatattaactgtctaaatgtgtgtcggtgtgtgtttcgttaattataatttatttgttgcttttaccaactctagggcaaccttgaaaatcagcagcagcaacagcagattagttgtttattttgaaaatgcaaatcataaacgttgatcactttgtagattcgccattcaatgacttcatttgcagccctcttttgcaaagttgtatgtatgacgtcaatgcaattttaagttggggctacgacctgcagccatatgtcagtcatttgccattgaatcactgtctctggcaaatggtaaataaagataaaaattaaattaccagatcccgtcgataagacgcactccggatccccaactctttccgggtaatcacccatttattatggttgggacctcttgagagagtttgcactacatatttgcaggccgattgattgaggacttctccgtcatatagcgtcatttctattttcataaagcctttgggttcgctttttgtttgcgttttttccttattttttttttttttgttttcacttaactatacatatgtgcttcgtgtgatttgtgtgcgtcggtgcggggctgataaaaatgtatccttgtgtgtgactgaaagaactgaatctagtgaatgaattaagtgaatcaacaaacagagtagtataggacggtttaagggccgattaataatgaaagtccagcgatggctaccgtaaaattgtagagttcatgtcttttgacaatcttggaagtatttttagttactttatcgccggtgactttatcacgcggccatatcaaatcacgctcacgcatgccataaacattccacaaaaatggtttgagactctagggcaacttcaaagtgacgcgtctgccaagaaatctcgactcgtaaatttctaattgcttttgtcacaattaaatctcgcgcagtgtattcaagaagcccctaagccaacgaaacaaataccaattgctgactatgactttgtcgaactgaaccaaacgaaagccttagacatgcctcagcatagatcgggtcgcaaggcgactaaaaccaaatccaaaacccaaaccacgactgtccaagtggcagaggaaagtgactacgactttgcgttcgagtttcaggtaatacttcatctatcctccccattccctgctgccctgttttttttcccctcgcaaagatttcaacgaaccgagtttaatttgcctgttgcccagttgttaacttttactaaccgaaattgctttcatttggcatttagcaatacgctgagagtctacagaaaccgctcaagacctttagggttgacttcagtgcgggcagcgtgccaactggcgatggttacgctgcgcgccaggaggatctctacaccactacctacagcaccacacagtaagtacaatttatacaaaatttataatatatattaagtggatattattctccagaaagaaagaattttactgcattctgaaatcaacaaaatgattcatttaaatctacaatctacaatattatgcgaaagaaacgataacaacttttgacaaagttgtagaactatgaataatcttatatgtagatttgtagtcatacattcttttattatatactaataaagttctaatcgaatcctttcagaatcagctcaacgaagacaacgaaaagctctacgaagagcgtctatagtagcgatggcttggacgccgctagtcaggaggttagcactgctggcctgcctcaatcgcagatccaattcaacgaaatccgtacgctcaaacgctctcaacagctgggtggccattccgtgctggatatagccggaatacgcgatcctcgtacgggtcgcgttctaaccatcggtgaagccatccagcttcgcattctggacgtgcgcaccggcgagatgctagtgggtgatcgccgtatcacgctggaacaagctgccgaccaaggactgatcgatttgcaactggcaaagcaattgcttgagcctggtgccggccgagatgccagcggacgggagctgtcgctcctggaggttattcagcgcgagattagcgaagcggaatccggttacgagacggccgagaagcggatcaaggtaaacaacacagtcaccgtagagcaaacttccggagagctgggctctcccgagaatccacgcaacattgccgacgccattactgcggggagtgtggacaccaaaaccggcctgtatcgcgtcaaatccggacagacaatcagcctggcggaggcctacgagcgcggctacctcatccggcacgagtcggtgacaatcaaatcgaatgcgctgtgcctgagcgatgcgattgcgcatggcctggtcgatggcgccggctggatagcggatcgcaactccggcgacaagttccgactggattcggccattgccaatcaactaatagacgcgagtgtgcgcgaagtggtggacgcgaaacgcgatacgaagatcacactgcaggaggcactgcagtcgggcgtactgaatgcaaaaacgggtcgttatgtgaacgaggtgaccaaggagaagttaaccttcgcagaggcgcgaaaccgtcagttgatcgtgaaaccgtacacgctgaaggacatctgtgatctgaatctgctcgataaacaggctcagatcacgagtcccatgcgccgcgaaaagttaagcattatgcaggccatcgaggccggtgtactcgacggtaatttgctcaagtgtatcaccaaacgtaagggtgaattggtcacccttcaggaggccattgccgatggcatcgtgttgccggccgagtgcaagtaccgcgactttatgaccggtgagctaatcagcattccggaggcagtggaacgcggtctgattagctcggtggcgcagcgttcgatcttcgatattgacgggttcaaggatctgaggagcaatgactatgtaagctttaatgtggccctctcgcgcgatcttttgcgtcgcaagagcacgggctttgccttagagacgggtagggatagtctggtgccactagaggtggctgttagtgagggactggtgcgccaggaggtgtacgagatgtttagccgtggcattggcgttcagaatgccagtggtaaggagcttagcgtctttgatttggtctatcacaatctgattgacccgaagactggttatcttttggatcccaagaccggggagacagtgcccctggacaccgccatcgagcggaagtttatcactcccgagggtgctctactactaagtagtttgctcaatatcactttgacaacggaaacggtgacgcggacgatcaatcgttatgtgacaatcagggctggttcccaggagccagtcgacagcgtgttgctcaccttcacggaggcagtgcgtcaaggtttcattgacgaggagaggcaacttttcaaagatcccaaaacgggaaatatttactcagtacagcaggccctcaactatggcttgttggttcccgatagcaatcaaacagttccggagccaacaaataggaaaaagacaaaatccactattaccattgtgaccaagcaaatcataccggaagcagagcccatcaagctaaacacacagcacaccaagtacgtcgagaagtcggtggagattcctatttctcaggaactagtaaagccgcatcgtgtggtctccgaatttattaacttggaaaagtctagctatatcgaacaaaatgtaacggagcgtcagatcatggagttgcctccaggaggatggcgactaaaggacgccattgagcagcgcctgtttaatccagatacgggagtattccatgtccagggcacagatcgattggttaattttgaggagtgcatcaacaagcagataattaacaatctatcgctctccgtaattgatcccaacactggcgacaagatctccgtgcaatcagcctttgaacgtgatatcttggacagttatggcaactatacgaatagccggaaacaggtgcagggtatgcgtagcgctattgacgagagtaagatcattctggaaactgtcccggctacgagaggagccaaccaaaagacaattcttcgcatcactaaagtaaacaacattccagatgtgttagaggtttccacgcccctgaaagatgcaccgcccaagtttgtcgaggtgctcacctgccaacgagagctcgcctctccagagcccctgcaaattgcaccgggcgccatctatgatccgtccactgccctagtaatcttcacgcaaaccggagagactgaaaatatcttcgatgccgcccgtcagggtctggttgatgagcagctaattaaaatcgtggatccgacaaccaagcaacccatttccgttaccgaggcgatagcgcgttccatttacgatcccaagacagccactattcttgattctgagggacagccggtggatttgatcacagcaactaaacttggactattgagtgtggtaggtgctccattggttgccgccgagggagccctgcgaactgtgcgtttcgtcacagatccacgaactggtgagcaaattccagtggaggtggcctacgagcgaggcattgtctctcgggatcagttgcatcgcggaaggtcctttgacagtgaacccgcaacggtagaggacaaagttgtagtccttcagagaatgcgtaaggtcattctcaagccaaaggatgctttacgaaagggaatcatcgacgaagagacttgtgaaatacttgaaaacaccagtaacttcactaatcccaaaggagaggtggttaacataactgaggcactgaacaccggtctaattgatggacgacgtggtcaggtgatcgatccccaaaacaatagagtcttaaatttgaggcaagcagtggagcagaagattattgattccgagcagactaaccatattcttatgccgttggccaagagcttatcggtgccgcgtctggcagaccagggattaattgatccacaaactcagactattgtccatcctgagagtggttatccactgagcatccatgaggccatagtatgtgaggttctggatccgcattcaaaactgcataaacccgaaaaatgcacactagaggaagcgatcaccaagggcattatcaatgcagatgattccacattcaactataagaacaagacactcaacattactgaagccattgaagcgaagctctttgatcccagttacgatcagcaaaaatctaaggtggaaattccgccggtgggtatgatattccctgttgctgttgaaaagagccttgtggaaccgtccaagcgtgttgttctgcatccaagtacaaagaaagcacttccaattaagcaagccattgaggagaactttatcatgtccattccctattctcccaagccagatgctatcgaagtggttactgccatggagcaggatctcatcgatgtagctgcccaaacactaactgtaccgtccactggtgaacgtatacctctacgacaagctatggaaaatggtgttctggtggtaaagaatctctcagattttgtgattacccagaaacccattcccaaaacggagatcatggagacggtgcgtgcagtgcacacggtgactactaaaaccattgagcttatgcaaggctacgtcctcatttctaacaatgaagtgcagaacgttaacacaggcgaggtatgcagcttggaggaagctaaggagctgggaattctgcgcgaagaatccacaactcgggagacaaaagcagcggccggcgaaagtccggaatcggtgggcgacgttggtaccagtggcgatcaaactgttattgtagaagagcgcacccagacagttgtggtcagttcggatacccgcaagcaagagatgcaagtagttagcacgacgcaatccacgaaggatacatccgttccaagtgtaagtgaaatcgagacaaagggcagcaaggagccatcgaagacgttgcaaaatgtgaaagatgccgccaaattgggtgcattgggcgtaatcgcagctcctgtactggccggaggtgccatcgtaagtggcgttaaaagccttatcaaatctgtgaaatctcccacggaagatgccaagagcactgaaaaacctaaggaacctcaaaccagcttcattgaacaggagcgccgtaaagagctacagccgcaacaagtgccaagtgaggtggataatctcctcagtgaaacggagaattttatcagctctacgactgccaactttattgcaaacgaaaaacagcaggataagcccgatacgttgccacaggaaagcaatctgcccttggaagttgaatcaacaagcactctgaccacaacaacagtaacaacaattactacatcaagtacaacaacggagaccggaaatctggagccagttgtggtagaagatgtctcgaccacagttaaggaggataaagtggtggttaagccaagtacagttccagaagataaaacagaggtttccaaaataactgaaaccataaccacagtgacttctaatgaaacagatactgtaccagaaaagatatcacagaaatcagcttccgaggagtcagcaaagaaggatccagtggttacgaaagacacaagttccaggccagctgaaacggagacatctcctaagcctgttcaaaaggaaccaactcccgatccagctcaaaatacagaatttcctgaatctattaaaaaagatcctactcctgagccggattacaaggaaaccgctaccgaggcagcacaaatcacaccaaaggaagcttctcctgctccaaccaataagaacgaacaatcagctgaacctacctcaaagccagagccaatgccccgaactgctaaaaaggaggagatttctgaaattgagcccccgttcacagcaccactggctccatttgttgatcaattagcggaaaccaagatcactgaaattaaaacagaatttaaagaaccagttacaagttcccaaactatcacaaccatcaccacaacggttaaaacagtcgatgaacaccccatagtcgaggaagtagatgaggtcagcaaatctgagaaaattgtggatgtggaagaaccaacagttcaccaacaagaaccgattaaggtgaatgagacgagcgatgattccaccaggactgaacctaccaatgaaatagtgcatgaagaaagagttgtcactgtcgaagagccgacgatcacagaaactaccgtaacaacaacaactatcactacaacaacaacatcttcaagtgaggaaaccctgccccaagagaatacagccacagtaaaggaaacgcctttgaatgagcctgtgccttcatctccagctgaaactaaagagattgagcagacaactaatgatgatcaaaagaagccggaagaaattgtagataccgaaaagaaaacaacagagcagaagccggtggaaactatcccaaccgagccaataagcacatctgaaacaacaacagtgactcttaccaccaagacaacaattgttgatgaaggaaaactacatccaccaagtgatattgagcaaattattcaaccgcattctacttcggacaaacatcaatctcttgttgatttcattgaacaggagaagggcacacagccagcggaaggtggtagcaatattttgcagaatgtgaaggatgctgccaagctgggcgctctagccattgtaggagcaccagttcttgcgggcaaggctttggtagatgctctaaccacagaaaagacacttaagccagaacactccacatcacaagttgtaaccgagacagtggaagaactaccaacagagataattaccacaagcactgctacattagttaccaaagtcaccactacaactaccaccacaacgacatccaccagtgagggcactcccgatgatgaggctctggatgtagttaaactgcctgctgaattggttgaaagctctgtaaagcgagaagtgcccaggacactggccattggcgatgccatctcccaaaagttgattagccccgatgagtgccaggtgatcgtagatggagaacagcagtcgcagaccgtttccacgctactcaaggaggagcagcttagcccattggacgaagtacagatcatcgacgacaaactaattgttctgcagcaggtgtcttacctggtagacgcagacacagaactgacgccacagaatttgtatgaacttaacatctacgatcccgagaaccaatactttattgatcccagtactggccagaagatttccttccatacgctggtatttgacatgaatgtttttaacccagaaactattttggtaaagaactttagtaccggcaaatacgagactcttacagcagccttggagcgtccacttctggacaggcacacgggtcacatggtggatccgaagacaggcaagaaaatcccattctttgagtgcgttgaccgccaatggattatccgagccaatccggaagagcaaaagccatcgggcatcgagaacgtgacgatagacacacagactggacaggtggtgcttgacgatggtcgggtttgctccattgttgaggccatcaacagtggcaagctggacattcagtcgatatcggtgcgcgacccagtcagcggtgaggtgattccactgcgtatggcaattgagttgggggtggtagacatgcaggcgggcacagtgatagacattcagacgctcaaagagattcccatggagctagccttccagctgggtttcctagtgcccggtgcccgcaaacccatttccctggaggccgccgtacgcaaaggtctctacgacccggagacgggaaaactcttcgactcagagagtcaaaaccaggtcgatgttcagaagtcgattgaaattggtttagttgacccgaagatctcattgattgtggatactgtcactaagaaggaagtcaagctggattgcgctatcgaagacgatttggtgctgcccgccacgggtcaaatcaaagacaacaagaacaacactttggtgcccttcgatgtaggtgtacaacagtgtttgctgaaaaccgacaacgtcacctggagcctgccagagttgcttcagcgcgaatactacacgcccagcactggcaaggttcttaatcccgtcaccggcgaggagattcttcttcagcaagccattgaaatgggctttgtggagctagaaacgactttggtcaaagatgtcgatcatgataaaattttgccaggcaaggaggcggccaaggtgggtcttttggacactgttcgcggaacactaagctcgcccaacataagtctcgacgaggctttcgtaaagggctatcttataagcacgaaaaagccgctttccctggtcgattgtctgctgcgtggtctttacgatccttcgacagcaaaattcaccatcgacgacaagcagttggacctgaaggccgccattgcccaaaagctcattaatcccgaagagctggttttgcttgaccccaagacagagtctattatttccattacagaagctatcgcgaagggttatcttgatccgattgagggctatgtgattaacccatatgcctccaccaaactgtccctacacgaagccctggagaatcgtattctcatcccgcccaaacgaaagcgcagcttgcccgatgctgtctaccgcggtctttacgaccccaagactggtcaatttagcaatacggtgacccgcgaaaagctcacaactgaacgtgccattcgtaggggcatcctcgatcccgattcgacggtcgtcaatgtgggctcgggacagatcattccatttggggtagccaccgagactggaatcgtggacagtaaacatggtacggtgagggatgccgatgatcacccgattgactttaaggaagcattcgatcgtggtattttggttgaagccaagaagcctcttcgtcttattgaggctgtggtgaagaatgtctacgacgaggtggatggacactttgtcgatccgaagtcgggtgagaagctaaactttgccgaagccttaaacacgaatttactggacgagcatagtgtgcagatcagagacttcaagactggtctgtacaagcagctgaacctaacgcacgctaaagacaccggcattattgatgcccaaaattccaaactactgtataacaaccagacaatgacccttaagcacgcctttgatattggaatcctaatggatgtcaatgcgcccatcagcattcagcgagcaattcatcagggactattcgacgacaagaccggaaagctaagcgatcccagaactggtcgccagattacattacttgaaagcatgaggagtttcgttgttaatcctcacctgccctgttacttcgatgagcagaccgaacagatgtatactctgagcgagacctgtagaaatggcatcatcaatagaagggagggtgttttccgggagccgggaagcaattcgtttgttcctctgggcgaggccctaagcctgggtctcattgtggacattgagaatgccggttttggtttgtacgaactattgtcgatgggcttctatgaaacttccacacgtaaggttctgcatccagtcacaaatcgcaagcttaatctcaacgaagcttgcgtggaggatgtagttagcctatcatccagcttagtcaaacaccacgagaccggcaagtaccttcggcttgccaatgctattaaggagcagttagttgatgactctagaggttgttacaatctgggcaacgaacagttggatctccaggcggctagggccaggggtttaattgtttccaatcgtcgcctcctcagccttgaactcgtattgcgccaacaactttatcgccccgaaactggcaaattctgcgatccaacaacgggagaatatctagacctaatcgaagccatccattcgggtttcatagatcccgcgactaccgtatttaaaaaccagcttactggtaaggagttaccgctaacagaagctattgagaatggtgatattgatgtgtccaagggtagagtatttgatcccaagtctaagtcagcttataactacgacgtggcactctcgcgcggaatcctggtcaccattactcggccactaaccgatcgcaatgatgtggtacgtcgccaggatagcgttgaattactaaatcaaacacccgtgagtgttgtgattagcaaaccgcgtgaaatgtctctcgaagaggccattcgttacaacataatcgatcccaagaccgcgctcgttcgcgatttcgatagctttaagttcctgccttactcggtagccgtggaacgcggtctcgtggacaccaccaagcgcacactcgtggatccaaaggccctgtactttgccttcgatcccactttaatagtttacgtacgtgaaccggtcacctttgaccaggcggccgagtccaagtgtctggacttgcagaccggactgctgacctatgtgccagcaagtgtacctggatccgcaacagcggcaccagccagcgacgatagcgcaaacgattcgctgactgtcatcgagacgcccaaggtatacacgctcaaggaggccgccagtgccggtgtggtggatcccgactcggctctagtcaaggacttggccaaggctaagctggtccgtttgccagaggccttccgaaagggcctaatggatgccaacaaggcgaacgtgctcaacacccagacctcgaagctctgcaccctgcaagaggcctacgaaagtggcctgatctgcacgcctaagcgttcattcggtttgctagaagccatcacctttaacttgtacaacccaaccaatggctgcctagttgatcccttccaaatgcatccagatatcatccggcggcgcaagttcacgctggccgaggccattggctcaggtctggttgatccatcgtcgacagtggtgcgtgaccccagcactggagtcattgtcccactgacggctgccattagcagtggtctaatcgatgccaccgagggacgcctgaccgatgccaacgagccgaagaacaacatcgacctagtgaaggccgccgagaagggtctgctcctgccggcagaacagagggtaagtctcagaacactcgaggtgtactctttcaatttctatcaacaccgatctcgaaaacggaattgcgaatgcaagaaattactgaattattgcaagaaattacagcaaaattattctaattctaaattaaaagctttgttcgtggcatgtttggtattgtactatcgatattgatttcgatttttttttgagacattttgatcagcgcgctgtctttctatttctttctgtctatctctgtctctgccttaatctcaaattctatatcatcagactaaccaagatgtgagctttccacaatgaaaaaaaaataagaatcattctgcaaatttactttgcaaatcatatttattattattttgcaaatctcttatattgcagcgcatggcattcagttttatgttctatatatcgtatttttcgctgagatcgctttaagttctcaagcgacagcagccaaaaataatgcaatcaatcagagtcagcaagtacatcacagatcacatccaacagacatgcatccataaatatcgtactccatcgatcgcgctttatcaagccgaagagcaatgcgttatgtctcatactcctccgcataaatgacgtcggcaataggacaccatatgcaatactctatatactcaatattctatcgatttgtctataacactagcatacgaatcttttttcattcgaactcgcactcatctatttcttgttatttcttttccctatatccaattgtatcccaggcagtattttatgtaggatcagatcaatttttaactgactctaatatgcggttaaaaactgatctgactgagttagtgggattttccccgaaatatcccacaattcactagtctctatttagctcttagttttggagtaaggttacatatcctttttcagccccaatgcaatagcccaggctttagttattatttttgaaatcttgtttaaataccaattttctacctattttcagcaaccatatataaatattttttacatattatttcgtttgcagttttaatttgaaaaaataaacccaaaccacaattaacactaaccaatataaaaatccaacaaaacgaaaccaaaccaaaaacaaaaaaacaaaaccattaaaccgtagttagtgcatactaaaagtaaaacaactcgtagttgctagtccccagtagtgctcgttacccaaagtagtgaaccttggtgcttgtatgtctatattattgctttggtttatgttaactgcctatatacttcattgtatcttaatgcttgttataaaaccgctttgccctaagtctttgccttgcaatattttcaacaaacaaatgtgtttcttccagctatgtttgtgttttatatatattttgtgttccatttatctattgacacttatacgatatctatgaaatctctatatgaatccctttatagcgacccgtatcgagctaagaagtcatttcttttcttaccacttttctaataaattatttgctttgccctcccccacccataatatgtcacatatatagcaagcagtattcgagaagttcaacatgtgcgaagagaatgtcaacgatctgttgaaatgggttaccactgtggaacagaaaatctcaagtgtcggcggacctcgtgaaaagattgatgagttacgcaaccagattaatgcccttaaggttggtactattgatttatatacttgttacaaaattgaaaacaatgtattctttgtttaaatagcaaatcaaggatgagatcgagtctcagcaacggccagttgccacttgtttggagcaaatccgtcagatcgtgctcaccggtggtgatgttttgtctgcccccgaagtgaccactctggagaactctggccgggagttgcgttcgcgtgtggatcgtgtcaacgatcgcaccgtgcgtttgctccggcgcctggaagcaggtcgagatgagctcaccaaactgcgcagcgaattggatgtattctccgattggttgcaagtcgcccgacgcactttggaggacaaggaacgttccctgtccgatttgactcggctgccctctcaggccgattcggttcgtgagtttgtcagcgatgtgattgggcaccaggccgatctgcggttcatcacaatggccgcacagaagtttgtggacgagagcaaggagttcttggccatactgaacgacttccgtacttcactgcccgaacgcttgccacatgttgagccactgtccagtgccgagagtcccatacgccaagaggtatcgctggtctcggcacagtacaaggatctgttgaaccgtgtgaatgctctgcaagatcgcgtctccggtttgggtggacgccagcgtgagtaccaggatgcattggacaaggctaacgagtggctgaggagtgtacatccgcgtgtgtcgcgcattatctctgaaccgattgccggcgatcctaagggagtacaggatcagatgaacgaggccaaggctctacacaatgagctgctttctagtggtcgcttggtggacaatgcgcaacaggcacttgataatctgctgcgcagccttggtggccaactcagtcccatggagatcaatcagttggaactgcctattgccgatctgaagaacaactaccagcagcttctggataatcttggtgagcactgcaaaactctggacaaaactttggtgcaatcgcagggcgtacaggatgccttggacagtcttgtgggatgggttaaccaggccgaggataagttcaagatgaatctgcgacccgcctcgcttatcaaggagcgtctgcaggagcagatccgcgagcacaaggtcctgctagccgatcttcaatctcaccaggccagcatcgacagcgttcaagtttcggccaaacatctgcttgccagcgcatcgaatgcacgcattgccaagaaggtggaatcgaatctaaacgatgtgaccgtcaagtttgagaagctctacgagaaggccaacaaacgtggtgaattcttagatgacgtttacaaccgattaagccgctatctggatgaaatcagcaccgtggagcagcgtatggccagcttacaggaggctctagatagccgcgagacaagcctgctttcaactgaagagttggctcgccgcatgaacgaactgtcgcgtgacaaggaccaactggctccgcagtttgaggattgcgtgcgcagtggcaaggatctaattagcctgcgtgatgtcaccgatactggagttttgcgcgatcgcatcaaggcactggaatctcagtggcgcaacattaacatcagcatcgatgagcgcgccaagctgtccaagcaaaaggccgaacaacaactggcctacgagggactgaaggatcaggtcctctcctggctggccagcactgaagcgcgagttaacggccttccgccggtagcaatcgatctggacaggattaagcagcagcatgacgagctgaagcccatatgcaaggattaccgcgactatgcaccaactattgataaaattaacgatattggagcacagtacgatgcgctaatccgtccagagagtcctgcccgcaaacgctccacttatagtccgattaagcggaccagtccgttgcgccgcatgtccggagacgctagaagccccagccccaccaagggaggcatcctgtcgccactatcgactggttccagtggattcggtagccgcagatcctcccaggatggtttccagctgtctgagctatctccggtgcagcagcagctgagcgagatcaacaatcgctacgggctgattggcgtgcgtctcaatgaccgccaacacgagctggacaacctgaacgaggaacttcgcaagcagtacgagaatctgaagggactagctcagttcctggagcgcattcagcgccaattgcccaaggagtccgtatcaaacaaggatgaggccgagcgctgcattaagcaggcgcgcaagatcctcgaagacatgtacgagaagcagagtcttcttgacaccaccaaggctcaggtgaaggatatcctccgccgcaagtcagatgtgcccggtgccgaacaattgcgccaggagaacgatagcatccaagagaagtggaagaatctcaacgacatctgcaagaatcgcattgccttctccgagaagctgcgtgactttttggacacccatggaaatctgaagagctggctggacagtaaggaacgtatgttaaccgtgctgggacccatctcttccgatccccgtatggtccagagccaggtgcagcaggtgcaagtgcttcgcgaggaattccgcactcagcaaccacaactgaagcatttccaggagcttggacatgatgttgtcgaccatttggccggcacacccgatgctcaggcggtcgaaatcaaactgaaggacattctgggcaagtgggatgatctggttggaaagttagacgaccgggccaatagtttgggcggtgctgctgacagttccaaggagttcgatgctgctgtaaatcgcttgcgtgaggctctgcagaacataagcgataatctggatactttgcccacggatggcgatcaccaggagaatctccgcaaaatcgagaacctggagcgacagcttgagggtcaacgcccgctgttagccgatgtggaacaatccgccgccactctatgcaacattctgggtgatcccgcctcgcgcgctgatgtcaactctcgtgtcgcagctctggagaaacagtatttggcccttcagaagaaactggataccaagaaggcagaaacagaggcttcccttcgggatggccgccactttgccgagaattgctcaaagactcttggttggttgggcggagagctctccaacctgaccgacaggcttttggtctctgcacacaagccaacactgcagcaccagattgacacccatgagccgatctatcgtgaggtaatggcccgtgagcatgaggttattatgctaatcaacaagggcaaggatctaaccgatcgccagcaggatcgcggagttaaacgtgatttggatcgcatccagcagcagtgggagaaactgcgccgtgaagccgtcgatcgacacacacgactgcagacgtgcatggagcactgcaagaagtactcccaaacttcggagacattcctggcctggctgcgtaccgcggaggataagttggctgatcttacacccggcgtattgtcgaaggcaaagctggagacgcgtctgcgtgatctgcagaccttccgtagtgaggtttggaagcattccggtgaattcgaaaacaccaagggattgggagagacattcctcagcagctgcgacatcgataaggaacccattaaggcggaacttcaagacatccgcgatcgttgggagagactcaacaatgatctgattgcccgtgctcatgaaattgaaaactgctcgcgtcgtttggacgattttaatgatgagttgcgaaacctggatcattctttaggtcgttgcgaggatcgacttgctgcccacgatgctctcggtggagctgccaaggatcccaaacttttggagcgtgttaaggccatacgcgaagagctcactaacttgagcaagcctttgcagtcacttaaggctctggccaaggatatcagtgctgaggctagagctgctggcggagatgctgatcatttgaccagtgaagtcgatggcctggccgaccgcatgtccgagctacagggtcgcctggatgatcgctgcggagaactgcaatctgcagccaccgccgtatcccaattcaacgaacaaatgaagagtttgggcattgatctgaacgatctggagaccgagattgaaaagctttcaccgcccggtcgagaaatcaagattgtccaagtgcaaatcgacgatgttggcaagatccagaccaaattggatcgccttgtgggtcgtttggaggatgcagaacgtgccgctgatgttttggtagatgcaggattcgctgcagacaccacccagacccgtgagcaaatctccacgctgcgtaagacattgggtcgtttggacaacagagttcgcgatcacgaggataatcttcattccactttgaaagcacttcgcgaattctacgaccatcaatcgcaaactctggatgacattcaagacgtaagcgatgagttcaagcgcatgaagcccgttggctcggagttggatcagattcgccgccagcaagaggacttccgtaacttcagggagcgcaaggtggaaccactggccatcaatgtggacaaggtaaacgttgctggcagagacctagtgcgttcggctggcagtggtgtttctaccacggccattgagaaggatctggaaaagctaaacgaccgctggaacgatttgaaggagcgaatgaacgagcgcgatcgccgtttggatgtggctctgctgcaatctggaaagttccaggaggcgttggccggtttatccaagtggctcagcgacaccgaggagatggtggctaatcagaagccgcctagctccgattataaggtggtaaaggcacagcttcaggagcaaaagttcctcaagaaaatgcttttggatcgtcaaaactctatgggctctctagccaatctcggcaaggaagttgccaaccactgtgaacccggcgaacgtgcctccattgagaaacagttgaacgatttgatgaaacgctttgatgccctgaccgacggagccgagcaacgtgagttggatcttgaggaagccatggaagtggctaagcgattccatgacaagattagtcccttggaactttggctggacaacacggagcgatctgttaaggcaatggaactgatacctactgacgaagagaagatccagcagcgaatccgcgaacacgaccgtctacacgacgaaatcttgggaaagaagcccgacttttccgaccttgccgatgtcaccgcccagctgatgcatttggttagcgacgaggaagccgttaatctgggcgagaaggtgcgcggtgtgacagagcggtacacaggattggtggatgccagcgacaacattggggctctgctagccgaatcacgccagggattgcgtcacttggtcttgagctatcaggatctggtggcctggatggaaagtatggaagccgagttgaagcgctttaagtccgttcccgtttacgctgaaaagctgctggaacagatggatcatctgttggagctaaacgagaacattgccggtcacgcttcgaatgtggaatctactgtggaatccggagccgagctgatgaagcacatttccaacgatgaagctatccaactgaaggacaagttagactccctgcaacgtcgctatggcgatttgaccaaccgtggtggagatctgctgaagagtgcacagaatgcactaccattggtgcagcaattccatgaagctcacaaccgtttagtggaatggatgcaaagtgctgaagctgctcttgctcccagcgagccacgtcaagctgatgtgcttcggctggagggtgaattggctgatatgcgtcctattctggacagtatcaatcaagtgggaccccagctgtgtcagctttctccgggagaaggtgctgccaccattgagagcattgtgacccgggacaaccgtcgcttcgattccattgtggagcaaattcaacgcaaggcggagcgtctccacctgagcaaccagcgcgccaaggaagtgacaggtgacattgatgaactgcttgagtggttccgcgaaatggacaccactcttcgtgaagccgatctgcctgccatggagcccaagttggtgcgtgcccaattgcaggagcatcgttctatcaacgatgacatttccagccagaagggacgtgtacgagatgttactgcggcctccaagaaggtgctccgcgagtccccacagagcgagaacaccgccactcttcgtgagaaattggatgatctgaaggagatcgtcgacactgttgctcaattgtgcagcgagcgtctgggcatcctggaacaggctctgcccctgtctgaacatttcgccgattcccatcagggactcaccgcctggttggatgacatggagcagcagatttcgcgattgagcatgccggctttgcgtcctgaccagatcactctgcagcaggacaagaacgaacgtcttcttcaatccatagcggaacataaacctctgctagacaaactgaacaagactggtgaggctttgggtgcattggtggccgatgatgatggtgctaagatcaacgagattttggacacggacaatgcccgttatgccgcactccgcttggaactccgcgaacggcagcaggcgctcgagagtgctctgcaggaatccagccagttctccgataaactggagggcatgctgcgtgctctggccaacaccgtggatcaggtcaatcaattagatcccctgtccgctcttccgcagaagatacgtgagcagatcgaggataatgatgctttgatggacgatctggacaagcgacaggatgccttcagtgctgtgcagcgtgcggccaacgatgttatcgctaaggctggcaacaaagctgatccagctgtgcgtgacattaaggccaagctggagaagctgaacaatctctggaacgatgtacagaatgccaccaagaagcgcggcagctcgttggacgacatcctaagcgtagccgaacccttctggaagcaactgaacagcgtaatgaagaccctaaaggatctagaggaaacactatcttgccaggagccaccagcggcccagcctcaggacattaagaaacaacaggtggcgctgcaggaaatccgccatgagatcgaccagaccaaaccagaggtcgagcaggtgcgacgtcacggaagcaacctgatgaacatgtgcggcgagcccgacaagccagaggtcaagaaacacatcgaggacttggacaacgcatgggacaacatcacggcgctgtatgccaagcgcgaggagaacctcatcgatgccatggagaaggccatggagttccacgagacactgcagaacctcctcaagttcttgaccaaggccgaggacaagtttgcccatctgggagctgtgggttcggacattgatgccgtcaagcgacagattgaacaactcaagtcgttcaaggatgaagtcgatccgcatatggttgaagtagaagcattaaacaggtaaggccttctatatatatttatatatatatattcttattcaatcgaatctattcaaatttaaaaatctaatgttccattgccgtggtgtctatctcaacttgtgaattggcagaggtctcaaaaggcaagatagtttcaaaaaagtctagttcgttcgtgcgttgttgttgtgaatattgattacatttaagtgcttgcaactgcaatgatttaagatctccggtatctttgaacaaagttgagccgagcatgttttttgattgccacagtttatccagttgcatgcaatttcaaaatgaaaacaaaaaacacttgccatttattgtttttgcgcttgcttatgttacactgcagtttttgtaaattcttcggctaattgttaattgaatcttacagacaagctgtggaactgacggaacgcacttcacccgagcaagcggcatcgattcgcgaacccctgtcggtggtcaatcgccgctgggaggccctactccgtggcatggtcgagcgccagaagcaactggagcacgctctgctgcacttgggtcaattccagcatgctctcaacgagctgctggtatggatcaacaagaccgacagcacactggaccaactgaagccggtacgtagatatatatttcatgcttgagagaaacccaaatcattttccattatgtaaacttttagattcctggagatccgcaactgctagaggttgaattggccaagctaaaggtgctggccaacgacattcaggcccaccagaactcagtggacacactgaacgatgcgggccgacagttgattgaaaccgagaagggatctgtggaggcgtctactacccaggagaagctgcgcaaactgaacaacgagtggaagcagcttctgcaaaaggccagcgaccgtcagcatgaactggaggaggctctacgtgaagctcacggatatattgccgaggtccaggatattctgggatggctgggcgatgtagacgcagtgattggagctagcaagcctgtgggcggacttcccgagactgctactgagcaactggaacgtttcatggaggtgtacaacgagctggatgaaaacagacccaaggtggagacgattcaggcccagggccaggagtacatcaagcgtcagaaccaaatgaaggtctcgtccagcaacttacagcatacactccgcacgctgaagcaacgttgggatgccgtggtatcccgtgcatccgacaagaagattaagttggaaattgcactcaaggaagccaccgagttccatgacacactgcaagcctttgttgaatggctgacccaggccgaaaagctgttgtccaatgctgaacccgtctcacgcgttctggaaaccattcaggcccagatggaggagcacaaggtgctgcagaaggatgtgagcactcatcgcgaagccatgctgctgctggacaagaagggaactcaccttaagtacttcagccagaagcaggacgtgatcttgattaagaacctgctcgtgtcggtgcaacatcgttgggaacgagtggttagcaaggctgcggaacgcactcgtgctctggaccatggctacaaagaggctcgcgagttcaacgacgcctggagtggcatgatgcagtatctgcaggaaaccgaacaagtgctggatcaaattatcgaggaagccacagcgtccaaggaaccacaaaagatcaagaagtacattggcaagctgaaagagacgcatcgtcaactgggcgccaagcaatcggtctacgacggaaccatgcgcaccggaaagaatcttttggagcgagctcccaagggcgatcgccctgtgttggacaaaatgctgatcgaactgaaggaacaatggactcgagtgtggtccaagagcatcgatcgccagcgcaagctggaggaggctttgcttctttctggacagttcagcgatgctctgggtgagcttcttgactggttgaagaaggctaagagccgcctgaacgaaaatggaccagtccacggagatttggagacggttcaaggtctatgcgagcaccacaagcacattgagcaggatctgcagaagcgcgctgcgcaaatgcaaggagtgctcaagactggacgcgacctggagcgatctggaaacaatcccgaagttggacgtcagctcgatgagatgcagtccatttgggaggaggtcaagagtgccgtcgccaaacgcggcgagcgtctccaggtggcccttgttgatgccgagaagcttaatgcccgtgtccaggctctctttgattggctggatcatgccgagcacaagctacgatatgccaagaatgcccctgatgacgagaaggtgtcccgtgaaatgatggacatccacatggacttcatgaaggacctgcgagtgcgcgagcgtgaaaagaccgagacttttgagtacgccgaggacattatcaacaaggcctatcccgatgccattccgatcatcaagaactggctttcgattatccagcagcgttgggaggaggtgcgccaatgggccatcaatcgtgagtcgaagctggagcagcatctgcagtcgctcaaggatttggacgacaccattgaggagctgttggcttggctcagcggactcgagggcaccttgttgagtaagtattgattattaaattatttgagatagattttaattgacgttctctgcagacctgaagcacgaacagctgccggacgagattccacccgtggagaaattgatcgaggaccacaaggagttcatggaaaacactgctcgccgtcaaaacgaagtggaccgcgcatgcaaaccaagacagttgccaccaggagcgcgcaagccgtcgcgcagcggcaagacgccagtgtgagtagaataatagattcgcaagtagctgccgaaactgtagctctgctgtacatatccttggtatattattattattttgtatatttattttttccaatttctttttgtatactttcttttgtatccaccaccttattgctacaatattccaaacaaaaaccaaaaaacccccgcaacgtcttgcacacctatctctctgcctatccaaaaaccacaccaaccaatgaaccaactacctaccgaccaacagtcgtggctccagtcacgatctgcgtgagcagtcacccgacggcaccctgaggcgtcaaaggtttggccgcaagtttatactgtaatgcttgctactcgtttcatccacttgccaagtggcaaatgtgcttactcaccatctaatcacgaatggagttagtgattgcctaacatctgatataccgaaaccataccaagatacttgtttaaatccccaaagtagcgctaaaatacgtagctgctaacgcacaattcataccaaccgagcactcgtcaaaataaaaaaaaaaacaccctgcttaatcactgccgcttaacctattgcttgtttaatccgatacctaagtataattttgtaactaacgatatatattctcttttttcacagctttaagggatctcgtgaccagggactcaatgcccgcaagggaaggtgagttctcgttgggcttgtattattttttttgtaattcaagaatagatagattccgcatgtacttcgaaattctcaaatcgaatttgttttgttttcaacttttcaactacttttggaaatgctgcgtctacaactattcgaaatatttgtatatttaaatttgtaatatccatgtattatctatgttaatgtgttttgcgtattttgttcgttactgtaccattttgttttgtctctttttgattctactttcatcttgtctacacactacgctactacgtaaacgttgctcataccgctcgaatatcaaatatcaaaactttgcatcttgccgctttatttgcctatgtctatgtcaaaaaccaaaatctctgagcagtcgtatcacgcccacacgtgacacgcccgacagagatcgcctgccgcactatggcccccgattctcgccaaggtaagtccttgaaatcctccaaaatcatccatatcatctcaagctgtgcatgtccagtacaattgtttgtatttagtttggttcatgatgttcaccgggtttgaagaacttctaattaacagaaatatcacattttaatatagcacctcgggaccggaactggaattccgttcgccacgcgcgaagcttctgtggaccaagtggcgcgatgtctggatgctctcatgggagcgccagcggctgcttaacgatcatcttctgtatctgaaggatgtggagcgtgcccgcaacttcagctgggacgattggcgcaagcgcgtaagtatttttaactaacagtacttcactaagaatatgatttttaatatttctatccattcatagttcctcaagtacatgaaccacaagaagtcgcgcttgacggatctgttccggaaaatggataaggataacaatggcatgattccgcgcgatgtcttcatcgatggcatactcaatacgagtaagttcctccgatgcttatccttctatactaaactatattaacaacaaatataatttccttagaattcgatacatctggcttggaaatgaaggctgtagccgatttgttcgatcgcaatggcgaaggcctcatcgactggcaagagttcattgctgcccttcgtcccgattggcaagagcgtaagccagccaatgattcggacaaaatacacgatgaggtcaaacgtctggtcatgctgtgtacctgccgacagaagttccgtgtgttccaagttggcgagggcaagtacagagtaagtagcaagagtagtgtgtcacctggtcggcagttactaatgtgtaaaataacttatttcagtttggagactcccagaaactgcgcctcgttcgtatccttcgcagcactgttatggtgcgcgtgggtggcggttgggttgccctggatgaattcctgcagaagaacgatccttgtcgcggtaagtggtccatctatccatccgagtttagtcaaaacaccctatttagttgtgttgcgtacacacaatctcgaaatttgttggatttcatccattccacatccataccagccacataaattccatacatatatctaaaataataatctagcgtaatctagtagttcacatttttaatattccacccaaatcatgcattttgtctatacccagatactgtgcatcgtttgctcatatcatttaaatgcattcatatcacatctaggtacagttgtgcttaacaactaattatactataatgccaaataataataataataatattaccaaacggatatggtcatttaaccaaccaacaaacaaccaaccaacaataaactactgtgcctaaaataactagtcaatgaacccggaatataaaaagagaaacctttgttaaaacctcatcattaattcaggtccaaaagttgcctaaacaagctaaaatgatattaacagtgtgccttagggcgaattttacctttaattgccattcagccagcgccaaaagccacatcatatacacaattacccagcaaccaaaaccaattaaatataaaactgaccaatctagccaagggttgtaccatctactctactcatgctcatttttgtcgcttctatctaactgcgtaccaactagctgctataagaccatgaaaacacacacaaacgctcaccaaaaatatcccgccaattgtaggttcttctatttcctattagttagtgttattaaccaggtttctccacccaattcttagtcgtagttacattaaccctttgtttttaaccattagttgagaatgatattttgttaatcctatcctgctttcaaactaacatcctgctttatttgtttaacagtctagcatgctctgttaactaacagggtttgtgcacactgtacttcatgtcacccattttatgtttgaatcctcatcaatttcgttgtacgtcctgtatttaaattaaaattgttgtattaatttgtgttatttgtttttcgttttttactaatcaaactttatgtttacccctttttctttttttccaaaatggttttctttattataccgaaaatcgattgaatcttgataaaccgaacccgataaatatacatatatgtatactctacgcttgcgctgcccgctcgccacgcccacgaccacgcccgacatgcacccgcctgtgcccacaccaaatactaaacaacaaaaaaacaaaaatgttgtaaaacacaccatactgaaaacaaactgtgacaaatactttgcggtaacgaactttcgttgttattgttgttgtttatatgttcgccctacaacaaaacattgcctatccgtgtaaatgtgttatatgtgggtgcatctgccatgccaatgcgtacaaatgcgtatataaatgcatctgtgcatctgccactgcaactgcaatcgctaccaaaaccaatgccactgttatccgggagcagccaaaggacgcactaacatagagctacgcgagcaattcatattggccgatggcgtctcgcagagcatggccgcattcacgcccagacgttccacgccaaatgcggccgccactgcctcctcctcaccccatgcccacaatggcggcagctccaacttgcccccatatatgagtggacagggtcccatcatcaaggtaaatcaatcagcaaattgaatctgcaacggaaagtaaaggggagcctaagtgtcacaccgaatccatttccatcgtttttgtcgccaatcggaattaacttcttttgaagaacttaatacccaattatctactcttaaatattctttacttaaaaaccctcaaaattctaaactttggtcaaatcaatatgatatgtatattcacttaaaatcatttcaactaacctattatatttctgtttgctttaaacattttaactttctttaaatttaactataatatccaaaaagtattttaaaaagaggttctagctttatagaagaacaaatattctattatttctgaaaatgacaaatttaaacgaaattgagaaatgagaagaggtgccaaagtgttaagtggttaacgtcaaagggttaaacccttgctcaaatcccgatcccaatccatttacccatccaaacatatttccatccagcgagggcacaaggtaagtgctcctttcgtccttttttttgggttcgttgtgtgtgttgttgacaaagaaaagctattgctgctgcgccgccgactcttaaaatataatttctatatatctgcatgagaaccgaatacttggtaacaatgtgttcacattttttttgtatttgtatttgattaagtaattgcgacattttttagttaatgctagagcatacatatagtacaccccacactattcattgatgaggctatgaggtttttaggccaggttaggttgttgtccacggcttaaatgatcataaaccgtttgccaaatgaaatgcgttaattcattgttggttaaacatatcgaaattatatccttagccgacgaacacttggccgaactaatgccaatatttgagaaaatccgcgctcaagaccaggttccatgcgcctttcccattcacatgggtgccggcggcacggtattcgtccgttgcaataccagccgttcggtgccgctgagtccacacgtgctgcattgtcatccaacaacacactgggtaagttcgcaggcagcaggagcagaagacgccgaagctgctccagcaggagtgcccgatattggtttcatctttcacgggagagggggtgctaaacctacatgaatgatcccacattataatatttgtttatttatttttctgtaaaggtacgcgagcgctccgtccgctcgattcccatgtcacgaccgtcgcgctcctcactttcggccagcactcccgactccctgagcgacaacgagggtagccatggaggaccttccggccggtacacaccacgcaaggtcacctacacgagcacgcgcacgggtctcacgccaggaggctctcgtgccggctccaagcccaactcgcgcccgctcagcagacagggatcaaagccgccatcgcgacatggctccacgctgtcgctagatagcacgggttagtagcaagcaaatgagctcgtttgcagatctttggctgactggcatgtacttcctatttttgtagacgatcacacgccctcacgcattccgcaacgcaagccttcaacgggcagcacagccagcggtaccactccgcgtccggcgcgactttcggtgaccaccaccacgactcccggcagtcgtctcaatggcaccagcaccattacccgcaaaaccgcctccggatcggctagtccggcgcccacaaggtagggattttattattaaggcatctcatcgaatcaaatcgaaaatagcggggaaagtgggtgggatcaaacactattaattattcaaactcttattaatttattatttttattttcacactattttcggtttaccgcattaactattgaccactcacacaaaacaatcaacatcatgaaacgctaacttacaactgcaattggcatttgaaccatttgaaatttgcttgaacgcaactaaaaaaatgcaactaaaactcgtgcctgacaccaccgcccctcccaaaacaaacaaaaaaaaaaatatcaaaaaatgaaacagcaacggaggcatgagtagatcatccagtataccagcactaacaggcttcggcttcaaaccaattaggtaatacagccacgaacggcatagaacacgtaacataaatacatactcataagtttaggctagatttaagatcgatcatgtatcttaggcagcggttatggtttatctttgctaactatcgttgtacttactacctcccccaacataccaaaaagccggccatcacggataccgattaagataccctcattcgattccaagtcaacatcgcccagctcgactacgaatccaaccagcttggggtaaagttgataagcttacaacaaagacatttactagtcaatttcaactcagtctatagcaagtaattattatttgatacccgtctaaagttattgttaagtttcctcgtttgttcaaccttttccgcgcatgtgtatgttgatgtgcatgtccatgccacaaaaagaaaaaaaaaacagaataacaagcaaaaaatgctttcgactaatgcttaagttcgattaccagattacaatacatatttttgttatttttatgtgttatattgttgtgatcaactattgaaagaacagtcactaatcctgatacttttcgatcccaggcgaaacatcagcggtagctcaacgccctccgggatgcaaacgccgcgaaagagctcagcggagcccacattcagctccacaatgagacgcacttcgcggggaaccacaccgacggagaagcgtgagccattccggctataggaagccaccgttatggctgaggacgacgacgatagagaagcaaaagaatgccaatatttaaaccacatacaaaacactcaactctacgtactaactacgcactgaagttctaaactaaaccccccaaaaaccactccccaaactaatcgaggctacattagcaatgaatgtagcagcaggaacagcacacagttctacaaaagagactaactttgaagtgccctaatggattggtggagcgaaacaatttatagatgtttatactatatatattttgtaaaagacacagttaagatgaaagttatgcagacatatagctagcacacaaagttgatcagacaagcaacctacttacgagtactactactactaatactaccttttgctactactaatttgtaatgcccactacctttattcactagttatacacgtttccaaaattatgatttgtatatacttataaagcgaaaagcaagcgtaaattaatgaaaaatacactccaagtgctctacggcaattaaacaaacaaaaacaaaaaaaatacaaacaaaaacacataaaaaatatcgaaaaacttaagtgaaaaaaataaaacattcgaatgaaatgccgcggtctctgctgcaaaccatcttgagtctcagttctccactggaatcgccagtccggtggaattctagccaggagtggcacgtggcagaggcggaacggccaaaaaaataataactaaacccgttaaagagataaaatttgattttgttctgttattaaactaataggaaagtgaaaattgtaagccgcataaagaaaatatttaattatatactaaaagtcattactataagtttaattaatatttaactgttaagcgacaaacacacacacacacacagattttgtattgcataattattatgttttttatatgcaatatatcagcgaatgaattacgatgcagatgcagaagggcgaaagaaatcgaacccgtttctataaatactgtaaaatactaatactaaattattttgttgtacgaaacgaaagaaatgcattaaaactcgtgttttgtaattctatttaattaaaacaattcaaatgcgaaataaacatttacaaaaaaaaaaaataacaacataacccgacgactttttactttaatacccggcgataagaaataaaacccatgattctgttgattttcgaatttgatttattcattgaagttctcaatcgtagtagttatttgacacattgaaattgaattttcgatataataccatgatcgatccgtgcggatcactatttggttttctacaaaacactcaattaattgtgatatttaaatatgtgtgcatgcatgctaatgcagatgccctgtatcggggttactcctcctcctcctcctccttctacgttccctctattctgaccaccatttactgactagaaatgccgcttcaactttaatcatccaactaactcaagtacaagctgggttcatacgtttctttgtgctatgggctgccagagggggtttcatttcgactaaactttgaagtgcagttgcagattatgcgtaagtggatatcaataccgtctcctcctcgttcgtcccgatgctgtggtgtaatctcgtcaacgccagcgctgccagttggtgctcctaaatacatgctgctgctctacgcgctagctttcaaaggccctaataatatcggcttggcatgatgccgcaagtcttttgtaaattattataaatatcattatagttaaggtacaactaaatatcatcattaatatagtccaaattagctaacacggctcgctaaagctaactaaacataaatacataaatacatatatacgaacgtacgaacacaaacaaagtcacagaagtgcgcctcataaaactaaacctgggccgtttgggttggtgcttcattgtgtattagcagcatggcaacgcaatgggtatccggatccccatttctaccggaagccatcgtcacctggcaagcccggaactggctgactgggccttcgcctgcttgctattcgtgttgaccgcattcgatgtggagccacctgcgttggctggagctgcagccgcattctgctccccccgt

SEQ ID NO: 26252 - DNA, 17678 bp, DROSOPHILA
ttaagtattataatttagcaaatatgttgctagccaaattctagttagctaaaaattaagattaagtacagggaaactcgagtgcaatcaaagtaaacacaagaggctgacgcagcacatacgcatccgtgaaaactcgggaaactccgcatcacgcagccacaagaaacggcaacaacacggcgtccccccgcaattacgtccgctcgcgctccaccccccagtcgccccactccccgcaggcggcactcctcggcggcgtcggaggcggtcgatcccacggatcctcccaccatcatcatcatccttgcagccgcgattgcatcaatcggagcagcagctgtgccagcgacgccgcatctatgcgtccacggggagtgccgccaacatcatgatggatcgcgaatcccttagcgaatgggctaaggacaagccgctcagcatcctgcagctggatccggcggatcgtgcggttctccgcatagcagacgaacgcgatgccattcagaagaagactttcacaaaatgggttaacaaacatctgaaaaaggccaatcgtcgtgtggtggacttgttcgaagatctgcgcgatggtcacaatttactttcactcctggaggtgctatctggcgaacacctgccacgcgagaagggtaaaatgcgtttccatatgctgcagaatgcacaaatggctctggactttttgcgctacaagaagatcaaactggtcaacatacgcgccgaggatattgtggatggcaatccaaagttaaccctgggcctgatctggaccatcatattgcacttccagatctccgatattgttgtgggcaaagaggacaacgtatccgctcgggaggctctgctgcgctgggcacgtcgctccactgctcggtatccgggcgtacgtgtcaacgactttacgtcgtcgtggcgagatggattggctttctcggcgttggtgcaccgcaaccgaccggacttgcttgactggcgaaaggcaaggaacgatcggccacgggagcgcctggagacggccttccacattgtggagaaggagtacggagttacgcgtctgttggatcctgaggatgtggataccaacgagccggatgagaagtcccttatcacgtacatttcatcgctgtacgatgtgttcccggagccaccctctatccatccactctttgacatggagtcacaacgtcgcgttcatgaataccgcgacctggcccaacagttcatctactggtgccgcgagaagaccgcctacctgcaggagcgttccttcccgcccacgctaattgagatgaagcgtctgttgagcgatctgcagcgtttccgcagcgacgaggtaagcgcccgcaagcgcgagaaatccaagctcatccagatctacaaggagctggagcgctacttcgaaacagtgggtgaagtcgacgtagaggctgaactgcggccggatgccatcgagaaggcctggtatcgcatgaacacggcgctgcaggatcgcgaggttatccttcagcaggaaattgagcgactagaacggctgcaacgactggccgataaggttcagcgcgagatcaagcatgtagatcagaagcttaccgatcttgagggccgaattggcgaggaaggtcgccgcatcgagcgactacatcccgtggacgctaagagcattgtcgaggcgcttgaaaccgagatccggcacctggaggaacccatccaggacatgaaccaggactgccacgtgctcaacgagggtcgctatcctcatgtcagtgagctgcacaagaaggtcaacaaattgcaccagcgttgggctcaactgcgcaccaatttccacacgaacctggtacagaagctgtccggtttgaagtatcccgtccacgagaccacggtgacgcgtcaaacgcgcatggtggtcgagtcccgtcagatcgacacgaatccccatttccgcgatctgcaggagcacattgagtggtgccaaaacaagttgaaacaattgcttgccgctgactatggcagtgacctgccgtcggtcaaggaggaactggatcgccaacagcacgagcacaagatcattgatcagttccacacgaaaatactcaacgacgaacgtcagcagaccaagttctctggagatgagctggctttgtaccaacagcgtctcaatcagctgcagaaggtgtatgccgagttgcttagcacctcgacgaagcgtctgtccgatttggattcgctgcagcacttcctgggacaggcctcggcggaactgcaatggcttaacgaaaaggagcaggtggagattacgcgcgactgggcggacaaacaactcgatcttccctccgtgcacagatactacgagaaccttatgtccgaactggagaagcgtgagatgcactttgccaccatcctggatcgtggagaggcactgctgaaccagcagcatccggcctccaagtgcatcgaagcccatctgacagccctgcaacagcaatgggcgtggctgctgcagctaacactctgcttggaggttcatttgaaacacgccacggagtaccatcagttctttggcgagatcaaggatgccgagcagtggctggccaagcgtgacgaaatactcaacagcaagttctcacagtcagactttggcttggaccagggtgaaactctactcaggggaatgcaggatttgcgcgaggaactgaatgcctttggcgagacagtggccacactgcagcgaagagcccagacagtggtgcctctaaacaagcgacgacagccggtaaatcgacaaggacccgtgcaggccatttgtgcctacaaacaacagggtcaactgcagatcgaaaagggcgagactgttacgctgctggacaactcgggacgtgtgaagtggcgcgtgcgcactgctaaggggcaggaaggacccataccgggcgcttgcctgctattgccacctcctgaccaggaggctatcgatgccgccgaacgtctgaagcgtctgttcgatcgatcagtagctctttggcagaagaagcatctgcgactgcgccagaacatgatcttcgccaccattcgtgtggttaagggctgggactttgaccagttcttggccatgggtcctgagcagcgcacggccatccggcgtgccctcaacgacgatgccgacaaattgctgagcgagggtgatccaaacgatccgcagctgcgacgcctgcgccgtgaaatggacgaggtcaatcgcttgttcgatgagttcgagaagcgtgcgcgcgccgaagaggagagcaaacaggccagtcgcatcttcaccgaggaatgccttgccatcaagagcaaactggaggacatggcccgtgagctggatcagattatactggctccgttgccacgtgatttggactctttggagcatgtgctggaaattcattcggactacgagcgcaggttgcacctgttggagcctgagttgaaacacctgcaggaaacattccgcacgattgcgttgaagacgccagtgctgaagaagagcctggacaatctaatggagctgtggaaggagctgaacactcaaagtggcctgcacaaggaccgtctgaagttgcttgaggcttcgctggctggtctggaggacaatgagcatgtgatttccgaactcgagaacgagctggccaggcaccaggatctgccatcgaccgctgagggcctgcagcaagtgtttaagcaactgaaccacatgcaggacatcattacacaacagcagccgcaaatggataagatgaacgatgcggccgatcagctgggacgcatgggagtgcccaccaaggtgctcggcgacctcaagagactgcactcgaacgtggagcgcctgaacacgcgctggagtgcggtgtgcaaccaattgggtgaaagaatgcgctcatgcgagacggctatcgggcttatgaagaatctccagtcgagcgtgcaagtggaggaatcatgggtggatggcaccacggagcgactgtctgccatgcccaccgccacttcggcatacgaactagataaactgctcggagctgcaatcgaacgaaaaccaaaaatcgaaaatgtcaacgtggctggaggacgacttatacgcgaagctaagatctacgatagcaaatgcctacgcttcgtggactggctggtcgaggcccgtccgtcgttctcgccaccgcgccgggatctccggccggcggatagcgatccgggcgccacacagtattacagccaacgtttggacaacctgaacacgaagaacgacagattgctggaacaactgtcgcagcgtctgaaaacagcaatcgaagtcaatggcagcgatggtctgcaatacgctgagagtctacagaaaccgctcaagacctttagggttgacttcagtgcgggcagcgtgccaactggcgatggttacgctgcgcgccaggaggatctctacaccactacctacagcaccacacaaatcagctcaacgaagacaacgaaaagctctacgaagagcgtctatagtagcgatggcttggacgccgctagtcaggaggttagcactgctggcctgcctcaatcgcagatccaattcaacgaaatccgtacgctcaaacgctctcaacagctgggtggccattccgtgctggatatagccggaatacgcgatcctcgtacgggtcgcgttctaaccatcggtgaagccatccagcttcgcattctggacgtgcgcaccggcgagatgctagtgggtgatcgccgtatcacgctggaacaagctgccgaccaaggactgatcgatttgcaactggcaaagcaattgcttgagcctggtgccggccgagatgccagcggacgggagctgtcgctcctggaggttattcagcgcgagattagcgaagcggaatccggttacgagacggccgagaagcggatcaagcaagcagtattcgagaagttcaacatgtgcgaagagaatgtcaacgatctgttgaaatgggttaccactgtggaacagaaaatctcaagtgtcggcggacctcgtgaaaagattgatgagttacgcaaccagattaatgcccttaagcaaatcaaggatgagatcgagtctcagcaacggccagttgccacttgtttggagcaaatccgtcagatcgtgctcaccggtggtgatgttttgtctgcccccgaagtgaccactctggagaactctggccgggagttgcgttcgcgtgtggatcgtgtcaacgatcgcaccgtgcgtttgctccggcgcctggaagcaggtcgagatgagctcaccaaactgcgcagcgaattggatgtattctccgattggttgcaagtcgcccgacgcactttggaggacaaggaacgttccctgtccgatttgactcggctgccctctcaggccgattcggttcgtgagtttgtcagcgatgtgattgggcaccaggccgatctgcggttcatcacaatggccgcacagaagtttgtggacgagagcaaggagttcttggccatactgaacgacttccgtacttcactgcccgaacgcttgccacatgttgagccactgtccagtgccgagagtcccatacgccaagaggtatcgctggtctcggcacagtacaaggatctgttgaaccgtgtgaatgctctgcaagatcgcgtctccggtttgggtggacgccagcgtgagtaccaggatgcattggacaaggctaacgagtggctgaggagtgtacatccgcgtgtgtcgcgcattatctctgaaccgattgccggcgatcctaagggagtacaggatcagatgaacgaggccaaggctctacacaatgagctgctttctagtggtcgcttggtggacaatgcgcaacaggcacttgataatctgctgcgcagccttggtggccaactcagtcccatggagatcaatcagttggaactgcctattgccgatctgaagaacaactaccagcagcttctggataatcttggtgagcactgcaaaactctggacaaaactttggtgcaatcgcagggcgtacaggatgccttggacagtcttgtgggatgggttaaccaggccgaggataagttcaagatgaatctgcgacccgcctcgcttatcaaggagcgtctgcaggagcagatccgcgagcacaaggtcctgctagccgatcttcaatctcaccaggccagcatcgacagcgttcaagtttcggccaaacatctgcttgccagcgcatcgaatgcacgcattgccaagaaggtggaatcgaatctaaacgatgtgaccgtcaagtttgagaagctctacgagaaggccaacaaacgtggtgaattcttagatgacgtttacaaccgattaagccgctatctggatgaaatcagcaccgtggagcagcgtatggccagcttacaggaggctctagatagccgcgagacaagcctgctttcaactgaagagttggctcgccgcatgaacgaactgtcgcgtgacaaggaccaactggctccgcagtttgaggattgcgtgcgcagtggcaaggatctaattagcctgcgtgatgtcaccgatactggagttttgcgcgatcgcatcaaggcactggaatctcagtggcgcaacattaacatcagcatcgatgagcgcgccaagctgtccaagcaaaaggccgaacaacaactggcctacgagggactgaaggatcaggtcctctcctggctggccagcactgaagcgcgagttaacggccttccgccggtagcaatcgatctggacaggattaagcagcagcatgacgagctgaagcccatatgcaaggattaccgcgactatgcaccaactattgataaaattaacgatattggagcacagtacgatgcgctaatccgtccagagagtcctgcccgcaaacgctccacttatagtccgattaagcggaccagtccgttgcgccgcatgtccggagacgctagaagccccagccccaccaagggaggcatcctgtcgccactatcgactggttccagtggattcggtagccgcagatcctcccaggatggtttccagctgtctgagctatctccggtgcagcagcagctgagcgagatcaacaatcgctacgggctgattggcgtgcgtctcaatgaccgccaacacgagctggacaacctgaacgaggaacttcgcaagcagtacgagaatctgaagggactagctcagttcctggagcgcattcagcgccaattgcccaaggagtccgtatcaaacaaggatgaggccgagcgctgcattaagcaggcgcgcaagatcctcgaagacatgtacgagaagcagagtcttcttgacaccaccaaggctcaggtgaaggatatcctccgccgcaagtcagatgtgcccggtgccgaacaattgcgccaggagaacgatagcatccaagagaagtggaagaatctcaacgacatctgcaagaatcgcattgccttctccgagaagctgcgtgactttttggacacccatggaaatctgaagagctggctggacagtaaggaacgtatgttaaccgtgctgggacccatctcttccgatccccgtatggtccagagccaggtgcagcaggtgcaagtgcttcgcgaggaattccgcactcagcaaccacaactgaagcatttccaggagcttggacatgatgttgtcgaccatttggccggcacacccgatgctcaggcggtcgaaatcaaactgaaggacattctgggcaagtgggatgatctggttggaaagttagacgaccgggccaatagtttgggcggtgctgctgacagttccaaggagttcgatgctgctgtaaatcgcttgcgtgaggctctgcagaacataagcgataatctggatactttgcccacggatggcgatcaccaggagaatctccgcaaaatcgagaacctggagcgacagcttgagggtcaacgcccgctgttagccgatgtggaacaatccgccgccactctatgcaacattctgggtgatcccgcctcgcgcgctgatgtcaactctcgtgtcgcagctctggagaaacagtatttggcccttcagaagaaactggataccaagaaggcagaaacagaggcttcccttcgggatggccgccactttgccgagaattgctcaaagactcttggttggttgggcggagagctctccaacctgaccgacaggcttttggtctctgcacacaagccaacactgcagcaccagattgacacccatgagccgatctatcgtgaggtaatggcccgtgagcatgaggttattatgctaatcaacaagggcaaggatctaaccgatcgccagcaggatcgcggagttaaacgtgatttggatcgcatccagcagcagtgggagaaactgcgccgtgaagccgtcgatcgacacacacgactgcagacgtgcatggagcactgcaagaagtactcccaaacttcggagacattcctggcctggctgcgtaccgcggaggataagttggctgatcttacacccggcgtattgtcgaaggcaaagctggagacgcgtctgcgtgatctgcagaccttccgtagtgaggtttggaagcattccggtgaattcgaaaacaccaagggattgggagagacattcctcagcagctgcgacatcgataaggaacccattaaggcggaacttcaagacatccgcgatcgttgggagagactcaacaatgatctgattgcccgtgctcatgaaattgaaaactgctcgcgtcgtttggacgattttaatgatgagttgcgaaacctggatcattctttaggtcgttgcgaggatcgacttgctgcccacgatgctctcggtggagctgccaaggatcccaaacttttggagcgtgttaaggccatacgcgaagagctcactaacttgagcaagcctttgcagtcacttaaggctctggccaaggatatcagtgctgaggctagagctgctggcggagatgctgatcatttgaccagtgaagtcgatggcctggccgaccgcatgtccgagctacagggtcgcctggatgatcgctgcggagaactgcaatctgcagccaccgccgtatcccaattcaacgaacaaatgaagagtttgggcattgatctgaacgatctggagaccgagattgaaaagctttcaccgcccggtcgagaaatcaagattgtccaagtgcaaatcgacgatgttggcaagatccagaccaaattggatcgccttgtgggtcgtttggaggatgcagaacgtgccgctgatgttttggtagatgcaggattcgctgcagacaccacccagacccgtgagcaaatctccacgctgcgtaagacattgggtcgtttggacaacagagttcgcgatcacgaggataatcttcattccactttgaaagcacttcgcgaattctacgaccatcaatcgcaaactctggatgacattcaagacgtaagcgatgagttcaagcgcatgaagcccgttggctcggagttggatcagattcgccgccagcaagaggacttccgtaacttcagggagcgcaaggtggaaccactggccatcaatgtggacaaggtaaacgttgctggcagagacctagtgcgttcggctggcagtggtgtttctaccacggccattgagaaggatctggaaaagctaaacgaccgctggaacgatttgaaggagcgaatgaacgagcgcgatcgccgtttggatgtggctctgctgcaatctggaaagttccaggaggcgttggccggtttatccaagtggctcagcgacaccgaggagatggtggctaatcagaagccgcctagctccgattataaggtggtaaaggcacagcttcaggagcaaaagttcctcaagaaaatgcttttggatcgtcaaaactctatgggctctctagccaatctcggcaaggaagttgccaaccactgtgaacccggcgaacgtgcctccattgagaaacagttgaacgatttgatgaaacgctttgatgccctgaccgacggagccgagcaacgtgagttggatcttgaggaagccatggaagtggctaagcgattccatgacaagattagtcccttggaactttggctggacaacacggagcgatctgttaaggcaatggaactgatacctactgacgaagagaagatccagcagcgaatccgcgaacacgaccgtctacacgacgaaatcttgggaaagaagcccgacttttccgaccttgccgatgtcaccgcccagctgatgcatttggttagcgacgaggaagccgttaatctgggcgagaaggtgcgcggtgtgacagagcggtacacaggattggtggatgccagcgacaacattggggctctgctagccgaatcacgccagggattgcgtcacttggtcttgagctatcaggatctggtggcctggatggaaagtatggaagccgagttgaagcgctttaagtccgttcccgtttacgctgaaaagctgctggaacagatggatcatctgttggagctaaacgagaacattgccggtcacgcttcgaatgtggaatctactgtggaatccggagccgagctgatgaagcacatttccaacgatgaagctatccaactgaaggacaagttagactccctgcaacgtcgctatggcgatttgaccaaccgtggtggagatctgctgaagagtgcacagaatgcactaccattggtgcagcaattccatgaagctcacaaccgtttagtggaatggatgcaaagtgctgaagctgctcttgctcccagcgagccacgtcaagctgatgtgcttcggctggagggtgaattggctgatatgcgtcctattctggacagtatcaatcaagtgggaccccagctgtgtcagctttctccgggagaaggtgctgccaccattgagagcattgtgacccgggacaaccgtcgcttcgattccattgtggagcaaattcaacgcaaggcggagcgtctccacctgagcaaccagcgcgccaaggaagtgacaggtgacattgatgaactgcttgagtggttccgcgaaatggacaccactcttcgtgaagccgatctgcctgccatggagcccaagttggtgcgtgcccaattgcaggagcatcgttctatcaacgatgacatttccagccagaagggacgtgtacgagatgttactgcggcctccaagaaggtgctccgcgagtccccacagagcgagaacaccgccactcttcgtgagaaattggatgatctgaaggagatcgtcgacactgttgctcaattgtgcagcgagcgtctgggcatcctggaacaggctctgcccctgtctgaacatttcgccgattcccatcagggactcaccgcctggttggatgacatggagcagcagatttcgcgattgagcatgccggctttgcgtcctgaccagatcactctgcagcaggacaagaacgaacgtcttcttcaatccatagcggaacataaacctctgctagacaaactgaacaagactggtgaggctttgggtgcattggtggccgatgatgatggtgctaagatcaacgagattttggacacggacaatgcccgttatgccgcactccgcttggaactccgcgaacggcagcaggcgctcgagagtgctctgcaggaatccagccagttctccgataaactggagggcatgctgcgtgctctggccaacaccgtggatcaggtcaatcaattagatcccctgtccgctcttccgcagaagatacgtgagcagatcgaggataatgatgctttgatggacgatctggacaagcgacaggatgccttcagtgctgtgcagcgtgcggccaacgatgttatcgctaaggctggcaacaaagctgatccagctgtgcgtgacattaaggccaagctggagaagctgaacaatctctggaacgatgtacagaatgccaccaagaagcgcggcagctcgttggacgacatcctaagcgtagccgaacccttctggaagcaactgaacagcgtaatgaagaccctaaaggatctagaggaaacactatcttgccaggagccaccagcggcccagcctcaggacattaagaaacaacaggtggcgctgcaggaaatccgccatgagatcgaccagaccaaaccagaggtcgagcaggtgcgacgtcacggaagcaacctgatgaacatgtgcggcgagcccgacaagccagaggtcaagaaacacatcgaggacttggacaacgcatgggacaacatcacggcgctgtatgccaagcgcgaggagaacctcatcgatgccatggagaaggccatggagttccacgagacactgcagaacctcctcaagttcttgaccaaggccgaggacaagtttgcccatctgggagctgtgggttcggacattgatgccgtcaagcgacagattgaacaactcaagtcgttcaaggatgaagtcgatccgcatatggttgaagtagaagcattaaacagacaagctgtggaactgacggaacgcacttcacccgagcaagcggcatcgattcgcgaacccctgtcggtggtcaatcgccgctgggaggccctactccgtggcatggtcgagcgccagaagcaactggagcacgctctgctgcacttgggtcaattccagcatgctctcaacgagctgctggtatggatcaacaagaccgacagcacactggaccaactgaagccgattcctggagatccgcaactgctagaggttgaattggccaagctaaaggtgctggccaacgacattcaggcccaccagaactcagtggacacactgaacgatgcgggccgacagttgattgaaaccgagaagggatctgtggaggcgtctactacccaggagaagctgcgcaaactgaacaacgagtggaagcagcttctgcaaaaggccagcgaccgtcagcatgaactggaggaggctctacgtgaagctcacggatatattgccgaggtccaggatattctgggatggctgggcgatgtagacgcagtgattggagctagcaagcctgtgggcggacttcccgagactgctactgagcaactggaacgtttcatggaggtgtacaacgagctggatgaaaacagacccaaggtggagacgattcaggcccagggccaggagtacatcaagcgtcagaaccaaatgaaggtctcgtccagcaacttacagcatacactccgcacgctgaagcaacgttgggatgccgtggtatcccgtgcatccgacaagaagattaagttggaaattgcactcaaggaagccaccgagttccatgacacactgcaagcctttgttgaatggctgacccaggccgaaaagctgttgtccaatgctgaacccgtctcacgcgttctggaaaccattcaggcccagatggaggagcacaaggtgctgcagaaggatgtgagcactcatcgcgaagccatgctgctgctggacaagaagggaactcaccttaagtacttcagccagaagcaggacgtgatcttgattaagaacctgctcgtgtcggtgcaacatcgttgggaacgagtggttagcaaggctgcggaacgcactcgtgctctggaccatggctacaaagaggctcgcgagttcaacgacgcctggagtggcatgatgcagtatctgcaggaaaccgaacaagtgctggatcaaattatcgaggaagccacagcgtccaaggaaccacaaaagatcaagaagtacattggcaagctgaaagagacgcatcgtcaactgggcgccaagcaatcggtctacgacggaaccatgcgcaccggaaagaatcttttggagcgagctcccaagggcgatcgccctgtgttggacaaaatgctgatcgaactgaaggaacaatggactcgagtgtggtccaagagcatcgatcgccagcgcaagctggaggaggctttgcttctttctggacagttcagcgatgctctgggtgagcttcttgactggttgaagaaggctaagagccgcctgaacgaaaatggaccagtccacggagatttggagacggttcaaggtctatgcgagcaccacaagcacattgagcaggatctgcagaagcgcgctgcgcaaatgcaaggagtgctcaagactggacgcgacctggagcgatctggaaacaatcccgaagttggacgtcagctcgatgagatgcagtccatttgggaggaggtcaagagtgccgtcgccaaacgcggcgagcgtctccaggtggcccttgttgatgccgagaagcttaatgcccgtgtccaggctctctttgattggctggatcatgccgagcacaagctacgatatgccaagaatgcccctgatgacgagaaggtgtcccgtgaaatgatggacatccacatggacttcatgaaggacctgcgagtgcgcgagcgtgaaaagaccgagacttttgagtacgccgaggacattatcaacaaggcctatcccgatgccattccgatcatcaagaactggctttcgattatccagcagcgttgggaggaggtgcgccaatgggccatcaatcgtgagtcgaagctggagcagcatctgcagtcgctcaaggatttggacgacaccattgaggagctgttggcttggctcagcggactcgagggcaccttgttgaacctgaagcacgaacagctgccggacgagattccacccgtggagaaattgatcgaggaccacaaggagttcatggaaaacactgctcgccgtcaaaacgaagtggaccgcgcatgcaaaccaagacagttgccaccaggagcgcgcaagccgtcgcgcagcggcaagacgccagtctttaagggatctcgtgaccagggactcaatgcccgcaagggaagtcgtatcacgcccacacgtgacacgcccgacagagatcgcctgccgcactatggcccccgattctcgccaagcacctcgggaccggaactggaattccgttcgccacgcgcgaagcttctgtggaccaagtggcgcgatgtctggatgctctcatgggagcgccagcggctgcttaacgatcatcttctgtatctgaaggatgtggagcgtgcccgcaacttcagctgggacgattggcgcaagcgcttcctcaagtacatgaaccacaagaagtcgcgcttgacggatctgttccggaaaatggataaggataacaatggcatgattccgcgcgatgtcttcatcgatggcatactcaatacgaaattcgatacatctggcttggaaatgaaggctgtagccgatttgttcgatcgcaatggcgaaggcctcatcgactggcaagagttcattgctgcccttcgtcccgattggcaagagcgtaagccagccaatgattcggacaaaatacacgatgaggtcaaacgtctggtcatgctgtgtacctgccgacagaagttccgtgtgttccaagttggcgagggcaagtacagatttggagactcccagaaactgcgcctcgttcgtatccttcgcagcactgttatggtgcgcgtgggtggcggttgggttgccctggatgaattcctgcagaagaacgatccttgtcgcgccgacgaacacttggccgaactaatgccaatatttgagaaaatccgcgctcaagaccaggttccatgcgcctttcccattcacatgggtgccggcggcacggtattcgtccgttgcaataccagccgttcggtgccgctgagtccacacgtgctgcattgtcatccaacaacacactgggtacgcgagcgctccgtccgctcgattcccatgtcacgaccgtcgcgctcctcactttcggccagcactcccgactccctgagcgacaacgagggtagccatggaggaccttccggccggtacacaccacgcaaggtcacctacacgagcacgcgcacgggtctcacgccaggaggctctcgtgccggctccaagcccaactcgcgcccgctcagcagacagggatcaaagccgccatcgcgacatggctccacgctgtcgctagatagcacggacgatcacacgccctcacgcattccgcaacgcaagccttcaacgggcagcacagccagcggtaccactccgcgtccggcgcgactttcggtgaccaccaccacgactcccggcagtcgtctcaatggcaccagcaccattacccgcaaaaccgcctccggatcggctagtccggcgcccacaagcaacggaggcatgagtagatcatccagtataccagcactaacaggcttcggcttcaaaccaattaggcgaaacatcagcggtagctcaacgccctccgggatgcaaacgccgcgaaagagctcagcggagcccacattcagctccacaatgagacgcacttcgcggggaaccacaccgacggagaagcgtgagccattccggctataggaagccaccgttatggctgaggacgacgacgatagagaagcaaaagaatgccaatatttaaaccacatacaaaacactcaactctacgtactaactacgcactgaagttctaaactaaaccccccaaaaaccactccccaaactaatcgaggctacattagcaatgaatgtagcagcaggaacagcacacagttctacaaaagagactaactttgaagtgccctaatggattggtggagcgaaacaatttatagatgtttatactatatatattttgtaaaagacacagttaagatgaaagttatgcagacatatagctagcacacaaagttgatcagacaagcaacctacttacgagtactactactactaatactaccttttgctactactaatttgtaatgcccactacctttattcactagttatacacgtttccaaaattatgatttgtatatacttataaagcgaaaagcaagcgtaaattaatgaaaaatacactccaagtgctctacggcaattaaacaaacaaaaacaaaaaaaatacaaacaaaaacacataaaaaatatcgaaaaacttaagtgaaaaaaataaaacattcgaatgaaatgccgcggtctctgctgcaaaccatcttgagtctcagttctccactggaatcgccagtccggtggaattctagccaggagtggcacgtggcagaggcggaacggccaaaaaaataataactaaacccgttaaagagataaaatttgattttgttctgttattaaactaataggaaagtgaaaattgtaagccgcataaagaaaatatttaattatatactaaaagtcattactataagtttaattaatatttaactgttaagcgacaaacacacacacacacacagattttgtattgcataattattatgttttttatatgcaatatatcagcgaatgaattacgatgcagatgcagaagggcgaaagaaatcgaacccgtttctataaatactgtaaaatactaatactaaattattttgttgtacgaaacgaaagaaatgcattaaaactcgtgttttgtaattctatttaattaaaacaattcaaatgcgaaataaacatttacaaaaaaaaaaaa

SEQ ID NO: 26253 - protein, 5385 aa, DROSOPHILA
MMDRESLSEWAKDKPLSILQLDPADRAVLRIADERDAIQKKTFTKWVNKHLKKANRRVVDLFEDLRDGHNLLSLLEVLSGEHLPREKGKMRFHMLQNAQMALDFLRYKKIKLVNIRAEDIVDGNPKLTLGLIWTIILHFQISDIVVGKEDNVSAREALLRWARRSTARYPGVRVNDFTSSWRDGLAFSALVHRNRPDLLDWRKARNDRPRERLETAFHIVEKEYGVTRLLDPEDVDTNEPDEKSLITYISSLYDVFPEPPSIHPLFDMESQRRVHEYRDLAQQFIYWCREKTAYLQERSFPPTLIEMKRLLSDLQRFRSDEVSARKREKSKLIQIYKELERYFETVGEVDVEAELRPDAIEKAWYRMNTALQDREVILQQEIERLERLQRLADKVQREIKHVDQKLTDLEGRIGEEGRRIERLHPVDAKSIVEALETEIRHLEEPIQDMNQDCHVLNEGRYPHVSELHKKVNKLHQRWAQLRTNFHTNLVQKLSGLKYPVHETTVTRQTRMVVESRQIDTNPHFRDLQEHIEWCQNKLKQLLAADYGSDLPSVKEELDRQQHEHKIIDQFHTKILNDERQQTKFSGDELALYQQRLNQLQKVYAELLSTSTKRLSDLDSLQHFLGQASAELQWLNEKEQVEITRDWADKQLDLPSVHRYYENLMSELEKREMHFATILDRGEALLNQQHPASKCIEAHLTALQQQWAWLLQLTLCLEVHLKHATEYHQFFGEIKDAEQWLAKRDEILNSKFSQSDFGLDQGETLLRGMQDLREELNAFGETVATLQRRAQTVVPLNKRRQPVNRQGPVQAICAYKQQGQLQIEKGETVTLLDNSGRVKWRVRTAKGQEGPIPGACLLLPPPDQEAIDAAERLKRLFDRSVALWQKKHLRLRQNMIFATIRVVKGWDFDQFLAMGPEQRTAIRRALNDDADKLLSEGDPNDPQLRRLRREMDEVNRLFDEFEKRARAEEESKQASRIFTEECLAIKSKLEDMARELDQIILAPLPRDLDSLEHVLEIHSDYERRLHLLEPELKHLQETFRTIALKTPVLKKSLDNLMELWKELNTQSGLHKDRLKLLEASLAGLEDNEHVISELENELARHQDLPSTAEGLQQVFKQLNHMQDIITQQQPQMDKMNDAADQLGRMGVPTKVLGDLKRLHSNVERLNTRWSAVCNQLGERMRSCETAIGLMKNLQSSVQVEESWVDGTTERLSAMPTATSAYELDKLLGAAIERKPKIENVNVAGGRLIREAKIYDSKCLRFVDWLVEARPSFSPPRRDLRPADSDPGATQYYSQRLDNLNTKNDRLLEQLSQRLKTAIEVNGSDGLQYAESLQKPLKTFRVDFSAGSVPTGDGYAARQEDLYTTTYSTTQISSTKTTKSSTKSVYSSDGLDAASQEVSTAGLPQSQIQFNEIRTLKRSQQLGGHSVLDIAGIRDPRTGRVLTIGEAIQLRILDVRTGEMLVGDRRITLEQAADQGLIDLQLAKQLLEPGAGRDASGRELSLLEVIQREISEAESGYETAEKRIKQAVFEKFNMCEENVNDLLKWVTTVEQKISSVGGPREKIDELRNQINALKQIKDEIESQQRPVATCLEQIRQIVLTGGDVLSAPEVTTLENSGRELRSRVDRVNDRTVRLLRRLEAGRDELTKLRSELDVFSDWLQVARRTLEDKERSLSDLTRLPSQADSVREFVSDVIGHQADLRFITMAAQKFVDESKEFLAILNDFRTSLPERLPHVEPLSSAESPIRQEVSLVSAQYKDLLNRVNALQDRVSGLGGRQREYQDALDKANEWLRSVHPRVSRIISEPIAGDPKGVQDQMNEAKALHNELLSSGRLVDNAQQALDNLLRSLGGQLSPMEINQLELPIADLKNNYQQLLDNLGEHCKTLDKTLVQSQGVQDALDSLVGWVNQAEDKFKMNLRPASLIKERLQEQIREHKVLLADLQSHQASIDSVQVSAKHLLASASNARIAKKVESNLNDVTVKFEKLYEKANKRGEFLDDVYNRLSRYLDEISTVEQRMASLQEALDSRETSLLSTEELARRMNELSRDKDQLAPQFEDCVRSGKDLISLRDVTDTGVLRDRIKALESQWRNINISIDERAKLSKQKAEQQLAYEGLKDQVLSWLASTEARVNGLPPVAIDLDRIKQQHDELKPICKDYRDYAPTIDKINDIGAQYDALIRPESPARKRSTYSPIKRTSPLRRMSGDARSPSPTKGGILSPLSTGSSGFGSRRSSQDGFQLSELSPVQQQLSEINNRYGLIGVRLNDRQHELDNLNEELRKQYENLKGLAQFLERIQRQLPKESVSNKDEAERCIKQARKILEDMYEKQSLLDTTKAQVKDILRRKSDVPGAEQLRQENDSIQEKWKNLNDICKNRIAFSEKLRDFLDTHGNLKSWLDSKERMLTVLGPISSDPRMVQSQVQQVQVLREEFRTQQPQLKHFQELGHDVVDHLAGTPDAQAVEIKLKDILGKWDDLVGKLDDRANSLGGAADSSKEFDAAVNRLREALQNISDNLDTLPTDGDHQENLRKIENLERQLEGQRPLLADVEQSAATLCNILGDPASRADVNSRVAALEKQYLALQKKLDTKKAETEASLRDGRHFAENCSKTLGWLGGELSNLTDRLLVSAHKPTLQHQIDTHEPIYREVMAREHEVIMLINKGKDLTDRQQDRGVKRDLDRIQQQWEKLRREAVDRHTRLQTCMEHCKKYSQTSETFLAWLRTAEDKLADLTPGVLSKAKLETRLRDLQTFRSEVWKHSGEFENTKGLGETFLSSCDIDKEPIKAELQDIRDRWERLNNDLIARAHEIENCSRRLDDFNDELRNLDHSLGRCEDRLAAHDALGGAAKDPKLLERVKAIREELTNLSKPLQSLKALAKDISAEARAAGGDADHLTSEVDGLADRMSELQGRLDDRCGELQSAATAVSQFNEQMKSLGIDLNDLETEIEKLSPPGREIKIVQVQIDDVGKIQTKLDRLVGRLEDAERAADVLVDAGFAADTTQTREQISTLRKTLGRLDNRVRDHEDNLHSTLKALREFYDHQSQTLDDIQDVSDEFKRMKPVGSELDQIRRQQEDFRNFRERKVEPLAINVDKVNVAGRDLVRSAGSGVSTTAIEKDLEKLNDRWNDLKERMNERDRRLDVALLQSGKFQEALAGLSKWLSDTEEMVANQKPPSSDYKVVKAQLQEQKFLKKMLLDRQNSMGSLANLGKEVANHCEPGERASIEKQLNDLMKRFDALTDGAEQRELDLEEAMEVAKRFHDKISPLELWLDNTERSVKAMELIPTDEEKIQQRIREHDRLHDEILGKKPDFSDLADVTAQLMHLVSDEEAVNLGEKVRGVTERYTGLVDASDNIGALLAESRQGLRHLVLSYQDLVAWMESMEAELKRFKSVPVYAEKLLEQMDHLLELNENIAGHASNVESTVESGAELMKHISNDEAIQLKDKLDSLQRRYGDLTNRGGDLLKSAQNALPLVQQFHEAHNRLVEWMQSAEAALAPSEPRQADVLRLEGELADMRPILDSINQVGPQLCQLSPGEGAATIESIVTRDNRRFDSIVEQIQRKAERLHLSNQRAKEVTGDIDELLEWFREMDTTLREADLPAMEPKLVRAQLQEHRSINDDISSQKGRVRDVTAASKKVLRESPQSENTATLREKLDDLKEIVDTVAQLCSERLGILEQALPLSEHFADSHQGLTAWLDDMEQQISRLSMPALRPDQITLQQDKNERLLQSIAEHKPLLDKLNKTGEALGALVADDDGAKINEILDTDNARYAALRLELRERQQALESALQESSQFSDKLEGMLRALANTVDQVNQLDPLSALPQKIREQIEDNDALMDDLDKRQDAFSAVQRAANDVIAKAGNKADPAVRDIKAKLEKLNNLWNDVQNATKKRGSSLDDILSVAEPFWKQLNSVMKTLKDLEETLSCQEPPAAQPQDIKKQQVALQEIRHEIDQTKPEVEQVRRHGSNLMNMCGEPDKPEVKKHIEDLDNAWDNITALYAKREENLIDAMEKAMEFHETLQNLLKFLTKAEDKFAHLGAVGSDIDAVKRQIEQLKSFKDEVDPHMVEVEALNRQAVELTERTSPEQAASIREPLSVVNRRWEALLRGMVERQKQLEHALLHLGQFQHALNELLVWINKTDSTLDQLKPIPGDPQLLEVELAKLKVLANDIQAHQNSVDTLNDAGRQLIETEKGSVEASTTQEKLRKLNNEWKQLLQKASDRQHELEEALREAHGYIAEVQDILGWLGDVDAVIGASKPVGGLPETATEQLERFMEVYNELDENRPKVETIQAQGQEYIKRQNQMKVSSSNLQHTLRTLKQRWDAVVSRASDKKIKLEIALKEATEFHDTLQAFVEWLTQAEKLLSNAEPVSRVLETIQAQMEEHKVLQKDVSTHREAMLLLDKKGTHLKYFSQKQDVILIKNLLVSVQHRWERVVSKAAERTRALDHGYKEAREFNDAWSGMMQYLQETEQVLDQIIEEATASKEPQKIKKYIGKLKETHRQLGAKQSVYDGTMRTGKNLLERAPKGDRPVLDKMLIELKEQWTRVWSKSIDRQRKLEEALLLSGQFSDALGELLDWLKKAKSRLNENGPVHGDLETVQGLCEHHKHIEQDLQKRAAQMQGVLKTGRDLERSGNNPEVGRQLDEMQSIWEEVKSAVAKRGERLQVALVDAEKLNARVQALFDWLDHAEHKLRYAKNAPDDEKVSREMMDIHMDFMKDLRVREREKTETFEYAEDIINKAYPDAIPIIKNWLSIIQQRWEEVRQWAINRESKLEQHLQSLKDLDDTIEELLAWLSGLEGTLLNLKHEQLPDEIPPVEKLIEDHKEFMENTARRQNEVDRACKPRQLPPGARKPSRSGKTPVFKGSRDQGLNARKGSRITPTRDTPDRDRLPHYGPRFSPSTSGPELEFRSPRAKLLWTKWRDVWMLSWERQRLLNDHLLYLKDVERARNFSWDDWRKRFLKYMNHKKSRLTDLFRKMDKDNNGMIPRDVFIDGILNTKFDTSGLEMKAVADLFDRNGEGLIDWQEFIAALRPDWQERKPANDSDKIHDEVKRLVMLCTCRQKFRVFQVGEGKYRFGDSQKLRLVRILRSTVMVRVGGGWVALDEFLQKNDPCRADEHLAELMPIFEKIRAQDQVPCAFPIHMGAGGTVFVRCNTSRSVPLSPHVLHCHPTTHWVRERSVRSIPMSRPSRSSLSASTPDSLSDNEGSHGGPSGRYTPRKVTYTSTRTGLTPGGSRAGSKPNSRPLSRQGSKPPSRHGSTLSLDSTDDHTPSRIPQRKPSTGSTASGTTPRPARLSVTTTTTPGSRLNGTSTITRKTASGSASPAPTSNGGMSRSSSIPALTGFGFKPIRRNISGSSTPSGMQTPRKSSAEPTFSSTMRRTSRGTTPTEKREPFRL

SEQ ID NO: 26254 - DNA, 6288 bp, DROSOPHILA
catgagcaccaaagtaattacaggtcgggaaaaggtgaacctgccggtggccagtatcaatatggccaagatgtgtgtgcgctatggcgaggatgtgagacaaatgagagttttgcgacaactccttcaaaacgaagtttacaaggaggtcgatgtgtcggactggttaacctatctgaacaactttctgagctatgaagagtccatgtctccagtagactctgcgtcttcctccttattgggaggcatatgagggcccaaatacgaaaatatatctaaggctccattaaatttaaggaatttcataccgaaagttcaaacttaattattttaagcccgttaattagtatttatctaaatggtttcaaataagaatgcatttgattcgttaccgtttgtcataaattccgtttctgtatttctccattgcaaatatatatttatgctgtaactaaatacacaattacgtacacatttacatataaatacagctactgcgcatgtacatacatacattaataaatatatatgtgtataattacataatattatcgcgatttgtttttaagccttttgcttgttggtttttttgcagttcctcatccttctgccatctcgatttgcctaacgtgtcttgtctttgttcattgtatgtctaaattctttgcagtttacattttacacactcaactatcattaaagtaggcgcttaaatgctaatctcactacgtcatttttatattaagtatatgcatacgctggggagggttagaaaagctgggtgcagagctcagatgttacaaagagcagaatccgatctgcatcaaatattaagcattcattttagagcgacctttcaaattctctagggatcttagatcctggcgaggatctgcattcagggccttgaaaaacatagcacggattcaagcgttgctcttatcattgctctactaggttgggatttcggttttttgtttctgctgtcttgtctttaatttgtttaacactacacatttatcaacatttatttaatattcattccatataggctaggtttctttgaatgtgtctccacttcccggcttgcaattgattcgtatacatttggggacatccgtgtttgttgcgctttgaattctataggaacttgatacaggagtcttttcggtttgacccttgctgcagtttttaaaggtatttaaaggcgaccggcgtttgaaacaaaggacagtcgggatgtgaggaaaccaagggtaacatacataaattaaagggctaacataaaaagtcacatgttgtatttttagaaaatattattttctcttttaaaaaggttttcgtttacaatttagttaaactctttcgctttcgctttatacatacaaattggagttgggctttgtacagaacttgttgctttactatctcataatcgtaattagttatgaattaattagcgttactttgtgtttacttcattaactaatatttaaacgaaggctagcgtgacagcttttgtgtttccaaattatgccaatgctgaaattaaaactactaagactaatcaattaaaattaacaaaacgctgatttaaaaactatggctctctagggactaagagctaattagatagtttcgaccacttaacactattagaatatttttctttgccgttttctgttcaggatatttttttaagttttgctgacaagtttacgaagttaaataattaagctattgattttataaacaaattgtatttgtgttagcccagactaaaacacgcccttgcaagatggcgaaaaacgtcaccaactttgagttgtacaacaatttttcttaagctttaaatgctaaattaaacaacttaaaagtgagtcgggtcaacaatttacaatctgaaacgggttgcactttgggaaatattttaattaagttcttcgtacacgtaatgctttttgccttttgggtttagtttgctcttgctattagcaaactattttcactctagttagggttaggttattttataagtgagtagagaggggtttaatctatttccggggctgagagggttgtgaatgtgagatggggtgcgctgctatagagacaactctctgcaaaggtctttcatctggtttttagtttagctttactattattttagtatttttgtttctgtttttgtttacggtttgtgttatttttttgggagctctgggtgctggtgtcggcgcctttcgtttacctacttttgaagcgtttgctatacaatcatcttggtaagttcttagtcacacatttaaaccttaacaacaacaacaatgttcgctacaattaaacaactaacaacaacgtaagcgtacacaccaaacatggctcacttctggctcgatcgctgctcctctttctgctcctgaatttccactacatccgcatccacttccgactcatgctcctgttcatcctcttcatccgcattctcctccttgagcatgtactcgaggagcagctcatcgactcatccctcgcgttgcgtttccgccgtcgctgacgtcgtggctgtgccaccattcgatggtgactccaccttgatcactccaagctgctgcagttcctctcgtgtgtgctggatgcgacccaccacaacaccgcccatggtcacaaagctcccgtccgccgtcacagcgcccaattgcatagcgctggataagtcccctagagcggccacattaaaatgatggtgcggcgagccatcctgaatgtgctgatgctgctggtgatgttgggccactgtcgtggcggagggcaacgtggttatggtgactccacgctgatcgatatgctgctgctgctgctgggacggaggcggcgggtggtgctgatgctgctgctgttgatggtggtgctggtgttgctgctgctgatggtggtgcgccgccaacggcattcgtcctagtcacccctcatcctcctctgttttgatcttaacaggaacgtagactttgtccatgacgtgtatttttatgtggttgttgagcgtgctggactgtcggaactgcttcttgcagatgacacactcaaaaggcttttcacctaaagaataagacacaaatcagtttcggtcaaaattgtatggtagcacacttcatcactcacccgtgtggatcttcacatggttggccagcgtgctcagttgtcgaaaatgcttgggacaaaagttgcagttataaggcttctcgcccgtatggatcttcagatggttcgtcagcgtcgacgattgacggaaggtcttatcacaaacgttgcatttgtagggcttctcgccagtatggatctttacatggttggtcagtgtgcttagctgtcgaaagcgacgatcgcagacggtgcagtggaaaggtttctccggctcgcggacagctccccctacgccaacggcagcgttgccctctccgggatgctcgctatgtccattggccaggtaatgctcactgtggatcgttgtcggactatgcgtggtcaggtgcgtcagatgtgaagttggtggcggcggttgctgttgttccgccgcagcagcttgggctgctgcagcttgggcagctgccatagccgctgcttgggcggcactatgcgcctccgccgagatcccgcttaagtgcatctggaagggcaaggggagttccgtgggtggcggcggcacagagggtggtccgctcgactgctgttgctgctgctgatgatgttgctgctgctgttgctgttgttgttgctgctgctgttgaaccgccgccatgtgagccggatgcgtggcctgggtgaccgtctcattgttattattgtttgctatggtggtttggggctgggcggccactatgacaatgtcgcagttactgctcatcgccgtagcagcggcatgggcatggggcaggcttttgatatgcatcatggactgctcttgctgggattaggtagtctggattcgggattcgaagctggatttgaatctggtggaatagtggagggagactgcggtacctcggtgacttgaacagaaagctggctaacaaactaagatcgatgcttcaaaaatgccacgacatgctcatcttgggcgcttctctgatgttgttgctgctagtgcctgtgtttggagaagggagattgggattagttgagtcggcggcttggctttttggtatgcaaaaatatgtgaggaattcccaaaacatacgaaatacctaactgcgaaattataaatctaaattattcaatagctgacacactttgatagctgggctcccggctccagctccacttcctccccttgaagccccctttccatatggttcctatggttctttgtgtgcccttattagtgaaacgcattgaagcccattttgtgtcctaactagcatattactccttcgtctcctttaggcaagcctctctacataaataagtatttggaactacacggcttacatatccatacatgtttgtaaggaggtaactggcttactttacggtgtgaaactatgttttaaatcattcaggtataatgattaacgtattaagcgttcaaagcaatattcttgcgagagtaaatattttcgggctttataacatttattaaagagccatactaatattaaactcacaaacaaactgtgatgagtaatttttaaataagatccataacggatgaccgaatccttaaaagatttttatgacttcgatggtatgaaaacttcgaatatacgtcaaagagcataaattattaaacatacgattgattatgcattttgaaacaaaataaaacgcgcgctgcttgcatgcatgtaacttttaatatattttttgaacgctggtttttacgttcgccggacaagttacctgacccgccccctgctcacccaccagacaagatagacactgaggccaacacaacacgcacacacatggagcactcaggtatctctctttttgtgttgaattgacagcgtgttactttctcgccaaattacatgtgtttttctggcaacttaagaacttagtgataactttaccaattggataacaatctcaacggaggcgagatcgacaggattccgaactgaccttttttgggcgggctttttgggggatattttccccttttttcaaaagcagtttttccactaacacgttgcctctagatcgcccctcgcgctcccttcttcagctaaaagtcacaaccactttcagtcgcacacacgtatggacatcactagcgcacacacgtacacgtactgtgtaaaagctcttttgaggttaggatacttttaattttggagctctccgctcgaaaatgtccattgtttttcacacgtctataaacgctatttttgccaaatgattccagacggaattgggtatactgagtgacacacttgaactcttttcgggcgcccacacattgacctacctttccattttgtggctgtgctgtgtggggcctttcaggtttagatttcccccgttttacatcatttttcgcactcgattcggttttttgggggatatgggcctttcggagggtgttcgcgtattgctctcgcctatcagaatcgggtcctcacagcattatctgtggctggttcttcatttataaaaagcgtataaacgttagaaaaatagtacaaatatttcttttcttttttttactgtttcgcgtacaaaatagacgcgaatgaactagtgccaattggggatgggcgatagctatgggggacctgttactgatcacgagtgtgaaggaatcacgatgactgccccgaactcaatgggaaagttggtataagagatcaaatttgggaaaattctcagatttatttaggccagcacatctttataattattttttttcccaccatattaatataaaatcattttctaatgtgacttctcgtgaatatcgaattgccatctctatgctaaatgagctagttccactgaagtcattcacataggaatatgtaagttttctttcgtttttgagaggttttcctcccgccacagtacggtcacactgcccggtgcagaacttttgtataggaatttcgtttgcattattttttattaaattgtacttaaagaccaaatgcaattgctcagaaaagtgcaggtgcaagttttataaaatcgtgcagacccgcgaagcctgcgactgatcaccatgtgcctgcccattggttaaactcagctcgctgttaactttgtttgtgtttttgttgtgacttccag

SEQ ID NO: 26255 - DNA, 3248 bp, DROSOPHILA
tacgtgtgtgcgctagtgatgtccatacgtgtgtgcgactgaaagtggttgtgacttttagctgaagaagggagcgcgaggggcgatctagaggcaacgtgttagtggaaaaactgcttttgaaaaaaggggaaaatatcccccaaaaagcccgcccaaaaaaggcactagcagcaacaacatcagagaagcgcccaagatgagcatgtcgtggcatttttgaagcatcgatcttagtttgttagccagctttctgttcaagtcaccgaggtaccgcagtctccctccactattccaccagattcaaatccagcttcgaatcccgaatccagactacctaatcccagcaagagcagtccatgatgcatatcaaaagcctgccccatgcccatgccgctgctacggcgatgagcagtaactgcgacattgtcatagtggccgcccagccccaaaccaccatagcaaacaataataacaatgagacggtcacccaggccacgcatccggctcacatggcggcggttcaacagcagcagcaacaacaacagcaacagcagcagcaacatcatcagcagcagcaacagcagtcgagcggaccaccctctgtgccgccgccacccacggaactccccttgcccttccagatgcacttaagcgggatctcggcggaggcgcatagtgccgcccaagcagcggctatggcagctgcccaagctgcagcagcccaagctgctgcggcggaacaacagcaaccgccgccaccaacttcacatctgacgcacctgaccacgcatagtccgacaacgatccacagtgagcattacctggccaatggacatagcgagcatcccggagagggcaacgctgccgttggcgtagggggagctgtccgcgagccggagaaacctttccactgcaccgtctgcgatcgtcgctttcgacagctaagcacactgaccaaccatgtaaagatccatactggcgagaagccctacaaatgcaacgtttgtgataagaccttccgtcaatcgtcgacgctgacgaaccatctgaagatccatacgggcgagaagccttataactgcaacttttgtcccaagcattttcgacaactgagcacgctggccaaccatgtgaagatccacacgggtgaaaagccttttgagtgtgtcatctgcaagaagcagttccgacagtccagcacgctcaacaaccacataaaaatacacgtcatggacaaagtctacgttcctgttaagatcaaaacagaggaggatgaggggtgactaggacgaatgccgttggcggcgcaccaccatcagcagcagcaacaccagcaccaccatcaacagcagcagcatcagcaccacccgccgcctccgtcccagcagcagcagcagcatatcgatcagcgtggagtcaccataaccacgttgccctccgccacgacagtggcccaacatcaccagcagcatcagcacattcaggatggctcgccgcaccatcattttaatgtggccgctctaggggacttatccagcgctatgcaattgggcgctgtgacggcggacgggagctttgtgaccatgggcggtgttgtggtgggtcgcatccagcacacacgagaggaactgcagcagcttggagtgatcaaggtggagtcaccatcgaatggtggcacagccacgacgtcagcgacggcggaaacgcaacgcgagggatgagtcgatgagctgctcctcgagtacatgctcaaggaggagaatgcggatgaagaggatgaacaggagcatgagtcggaagtggatgcggatgtagtggaaattcaggagcagaaagaggagcagcgatcgagccagaagtgagccatgtttggtgtgtacgcttacgttgttgttagttgtttaattgtagcgaacattgttgttgttgttaaggtttaaatgtgtgactaagaacttaccaagatgattgtatagcaaacgcttcaaaagtaggtaaacgaaaggcgccgacaccagcacccagagctcccaaaaaaataacacaaaccgtaaacaaaaacagaaacaaaaatactaaaataatagtaaagctaaactaaaaaccagatgaaagacctttgcagagagttgtctctatagcagcgcaccccatctcacattcacaaccctctcagccccggaaatagattaaacccctctctactcacttataaaataacctaaccctaactagagtgaaaatagtttgctaatagcaagagcaaactaaacccaaaaggcaaaaagcattacgtgtacgaagaacttaattaaaatatttcccaaagtgcaacccgtttcagattgtaaattgttgacccgactcacttttaagttgtttaatttagcatttaaagcttaagaaaaattgttgtacaactcaaagttggtgacgtttttcgccatcttgcaagggcgtgttttagtctgggctaacacaaatacaatttgtttataaaatcaatagcttaattatttaacttcgtaaacttgtcagcaaaacttaaaaaaatatcctgaacagaaaacggcaaagaaaaatattctaatagtgttaagtggtcgaaactatctaattagctcttagtccctagagagccatagtttttaaatcagcgttttgttaattttaattgattagtcttagtagttttaatttcagcattggcataatttggaaacacaaaagctgtcacgctagccttcgtttaaatattagttaatgaagtaaacacaaagtaacgctaattaattcataactaattacgattatgagatagtaaagcaacaagttctgtacaaagcccaactccaatttgtatgtataaagcgaaagcgaaagagtttaactaaattgtaaacgaaaacctttttaaaagagaaaataatattttctaaaaatacaacatgtgactttttatgttagccctttaatttatgtatgttacccttggtttcctcacatcccgactgtcctttgtttcaaacgccggtcgcctttaaatacctttaaaaactgcagcaagggtcaaaccgaaaagactcctgtatcaagttcctatagaattcaaagcgcaacaaacacggatgtccccaaatgtatacgaatcaattgcaagccgggaagtggagacacattcaaagaaacctagcctatatggaatgaatattaaataaatgttgataaatgtgtagtgttaaaca

SEQ ID NO: 26256 - protein, 308 aa, DROSOPHILA
MMHIKSLPHAHAAATAMSSNCDIVIVAAQPQTTIANNNNNETVTQATHPAHMAAVQQQQQQQQQQQQQHHQQQQQQSSGPPSVPPPPTELPLPFQMHLSGISAEAHSAAQAAAMAAAQAAAAQAAAAEQQQPPPPTSHLTHLTTHSPTTIHSEHYLANGHSEHPGEGNAAVGVGGAVREPEKPFHCTVCDRRFRQLSTLTNHVKIHTGEKPYKCNVCDKTFRQSSTLTNHLKIHTGEKPYNCNFCPKHFRQLSTLANHVKIHTGEKPFECVICKKQFRQSSTLNNHIKIHVMDKVYVPVKIKTEEDEG

SEQ ID NO: 26257 - DNA, 6726 bp, DROSOPHILA
catgagcaccaaagtaattacaggtcgggaaaaggtgaacctgccggtggccagtatcaatatggccaagatgtgtgtgcgctatggcgaggatgtgagacaaatgagagttttgcgacaactccttcaaaacgaagtttacaaggaggtcgatgtgtcggactggttaacctatctgaacaactttctgagctatgaagagtccatgtctccagtagactctgcgtcttcctccttattgggaggcatatgagggcccaaatacgaaaatatatctaaggctccattaaatttaaggaatttcataccgaaagttcaaacttaattattttaagcccgttaattagtatttatctaaatggtttcaaataagaatgcatttgattcgttaccgtttgtcataaattccgtttctgtatttctccattgcaaatatatatttatgctgtaactaaatacacaattacgtacacatttacatataaatacagctactgcgcatgtacatacatacattaataaatatatatgtgtataattacataatattatcgcgatttgtttttaagccttttgcttgttggtttttttgcagttcctcatccttctgccatctcgatttgcctaacgtgtcttgtctttgttcattgtatgtctaaattctttgcagtttacattttacacactcaactatcattaaagtaggcgcttaaatgctaatctcactacgtcatttttatattaagtatatgcatacgctggggagggttagaaaagctgggtgcagagctcagatgttacaaagagcagaatccgatctgcatcaaatattaagcattcattttagagcgacctttcaaattctctagggatcttagatcctggcgaggatctgcattcagggccttgaaaaacatagcacggattcaagcgttgctcttatcattgctctactaggttgggatttcggttttttgtttctgctgtcttgtctttaatttgtttaacactacacatttatcaacatttatttaatattcattccatataggctaggtttctttgaatgtgtctccacttcccggcttgcaattgattcgtatacatttggggacatccgtgtttgttgcgctttgaattctataggaacttgatacaggagtcttttcggtttgacccttgctgcagtttttaaaggtatttaaaggcgaccggcgtttgaaacaaaggacagtcgggatgtgaggaaaccaagggtaacatacataaattaaagggctaacataaaaagtcacatgttgtatttttagaaaatattattttctcttttaaaaaggttttcgtttacaatttagttaaactctttcgctttcgctttatacatacaaattggagttgggctttgtacagaacttgttgctttactatctcataatcgtaattagttatgaattaattagcgttactttgtgtttacttcattaactaatatttaaacgaaggctagcgtgacagcttttgtgtttccaaattatgccaatgctgaaattaaaactactaagactaatcaattaaaattaacaaaacgctgatttaaaaactatggctctctagggactaagagctaattagatagtttcgaccacttaacactattagaatatttttctttgccgttttctgttcaggatatttttttaagttttgctgacaagtttacgaagttaaataattaagctattgattttataaacaaattgtatttgtgttagcccagactaaaacacgcccttgcaagatggcgaaaaacgtcaccaactttgagttgtacaacaatttttcttaagctttaaatgctaaattaaacaacttaaaagtgagtcgggtcaacaatttacaatctgaaacgggttgcactttgggaaatattttaattaagttcttcgtacacgtaatgctttttgccttttgggtttagtttgctcttgctattagcaaactattttcactctagttagggttaggttattttataagtgagtagagaggggtttaatctatttccggggctgagagggttgtgaatgtgagatggggtgcgctgctatagagacaactctctgcaaaggtctttcatctggtttttagtttagctttactattattttagtatttttgtttctgtttttgtttacggtttgtgttatttttttgggagctctgggtgctggtgtcggcgcctttcgtttacctacttttgaagcgtttgctatacaatcatcttggtaagttcttagtcacacatttaaaccttaacaacaacaacaatgttcgctacaattaaacaactaacaacaacgtaagcgtacacaccaaacatggctcacttctggctcgatcgctgctcctctttctgctcctgaatttccactacatccgcatccacttccgactcatgctcctgttcatcctcttcatccgcattctcctccttgagcatgtactcgaggagcagctcatcgactcatccctcgcgttgcgtttccgccgtcgctgacgtcgtggctgtgccaccattcgatggtgactccaccttgatcactccaagctgctgcagttcctctcgtgtgtgctggatgcgacccaccacaacaccgcccatggtcacaaagctcccgtccgccgtcacagcgcccaattgcatagcgctggataagtcccctagagcggccacattaaaatgatggtgcggcgagccatcctgaatgtgctgatgctgctggtgatgttgggccactgtcgtggcggagggcaacgtggttatggtgactccacgctgatcgatatgctgctgctgctgctgggacggaggcggcgggtggtgctgatgctgctgctgttgatggtggtgctggtgttgctgctgctgatggtggtgcgccgccaacggcattcgtcctagtcacccctcatcctcctctgttttgatcttaacaggaacgtagactttgtccatgacgtgtatttttatgtggttgttgagcgtgctggactgtcggaactgcttcttgcagatgacacactcaaaaggcttttcacctaaagaataagacacaaatcagtttcggtcaaaattgtatggtagcacacttcatcactcacccgtgtggatcttcacatggttggccagcgtgctcagttgtcgaaaatgcttgggacaaaagttgcagttataaggcttctcgcccgtatggatcttcagatggttcgtcagcgtcgacgattgacggaaggtcttatcacaaacgttgcatttgtagggcttctcgccagtatggatctttacatggttggtcagtgtgcttagctgtcgaaagcgacgatcgcagacggtgcagtggaaaggtttctccggctcgcggacagctccccctacgccaacggcagcgttgccctctccgggatgctcgctatgtccattggccaggtaatgctcactgtggatcgttgtcggactatgcgtggtcaggtgcgtcagatgtgaagttggtggcggcggttgctgttgttccgccgcagcagcttgggctgctgcagcttgggcagctgccatagccgctgcttgggcggcactatgcgcctccgccgagatcccgcttaagtgcatctggaagggcaaggggagttccgtgggtggcggcggcacagagggtggtccgctcgactgctgttgctgctgctgatgatgttgctgctgctgttgctgttgttgttgctgctgctgttgaaccgccgccatgtgagccggatgcgtggcctgggtgaccgtctcattgttattattgtttgctatggtggtttggggctgggcggccactatgacaatgtcgcagttactgctcatcgccgtagcagcggcatgggcatggggcaggcttttgatatgcatcatggactgctcttgctgggattaggtagtctggattcgggattcgaagctggatttgaatctggtggaatagtggagggagactgcggtacctcggtgacttgaacagaaagctggctaacaaactaagatcgatgcttcaaaaatgccacgacatgctcatcttgggcgcttctctgatgttgttgctgctagtgcctgtgtttggagaagggagattgggattagttgagtcggcggcttggctttttggtatgcaaaaatatgtgaggaattcccaaaacatacgaaatacctaactgcgaaattataaatctaaattattcaatagctgacacactttgatagctgggctcccggctccagctccacttcctccccttgaagccccctttccatatggttcctatggttctttgtgtgcccttattagtgaaacgcattgaagcccattttgtgtcctaactagcatattactccttcgtctcctttaggcaagcctctctacataaataagtatttggaactacacggcttacatatccatacatgtttgtaaggaggtaactggcttactttacggtgtgaaactatgttttaaatcattcaggtataatgattaacgtattaagcgttcaaagcaatattcttgcgagagtaaatattttcgggctttataacatttattaaagagccatactaatattaaactcacaaacaaactgtgatgagtaatttttaaataagatccataacggatgaccgaatccttaaaagatttttatgacttcgatggtatgaaaacttcgaatatacgtcaaagagcataaattattaaacatacgattgattatgcattttgaaacaaaataaaacgcgcgctgcttgcatgcatgtaacttttaatatattttttgaacgctggtttttacgttcgccggacaagttacctgacccgccccctgctcacccaccagacaagatagacactgaggccaacacaacacgcacacacatggagcactcaggtatctctctttttgtgttgaattgacagcgtgttactttctcgccaaattacatgtgtttttctggcaacttaagaacttagtgataactttaccaattggataacaatctcaacggaggcgagatcgacaggattccgaactgaccttttttgggcgggctttttgggggatattttccccttttttcaaaagcagtttttccactaacacgttgcctctagatcgcccctcgcgctcccttcttcagctaaaagtcacaaccactttcagtcgcacacacgtatggacatcactagcgcacacacgtacacgtactgtgtaaaagctcttttgaggttaggatacttttaattttggagctctccgctcgaaaatgtccattgtttttcacacgtctataaacgctatttttgccaaatgattccagacggaattgggtatactgagtgacacacttgaactcttttcgggcgcccacacattgacctacctttccattttgtggctgtgctgtgtggggcctttcaggtttagatttcccccgttttacatcatttttcgcactcgattcggttttttgggggatatgggcctttcggagggtgttcgcgtattgctctcgcctatcagaatcgggtcctcacagcattatctgtggctggttcttcatttataaaaagcgtataaacgttagaaaaatagtacaaatatttcttttcttttttttactgtttcgcgtacaaaatagacgcgaatgaactagtgccaattggggatgggcgatagctatgggggacctgttactgatcacgagtgtgaaggaatcacgatgactgccccgaactcaatgggaaagttggtataagagatcaaatttgggaaaattctcagatttatttaggccagcacatctttataattattttttttcccaccatattaatataaaatcattttctaatgtgacttctcgtgaatatcgaattgccatctctatgctaaatgagctagttccactgaagtcattcacataggaatatgtaagttttctttcgtttttgagaggttttcctcccgccacagtacggtcacactgcccggtgcagaacttttgtataggaatttcgtttgcattattttttattaaattgtacttaaagaccaaatgcaattgctcagaaaagtgcaggtgcaagttttataaaatcgtgcagacccgcgaagcctgcgactgatcaccatgtgcctgcccattggttaaactcagctcgctgttaactttgtttgtgtttttgttgtgacttccagccggcggacgcagttcatctatttggaaggtaagcagaatttaggtaagtatatactgaaggactatactgaaaggtaccttcgatcctgaccgctttttcgttacggcacgagagcctgtccatcacctgcttcacgaatcccttagcatcttcctccttctgctgggccacagcttgaatatgggaatttgccctcagttgcatggcccgaatgtcatcctgcatcgccttcttactgcgctccaccactgcatctagagggtcttcaaaggtagtgcttggctcgaagatgttgccattaccattgccatgtcctgcagaattgtggtttgagtttacagaggccgttgttcgttcatcctcctcgttggaacccaacgttgtggtggtctttggtgccccctctttgaaggacaagtcatcctcgccgcgaggt

SEQ ID NO: 26258 - DNA, 3278 bp, DROSOPHILA
attttgtacgcgaaacagtaaaaaaaagaaaagaaatatttgtactatttttctaacgtttatacgctttttataaatgaagaaccagccacagataatgctgtgaggacccgattctgataggcgagagcaatacgcgaacaccctccgaaaggcccatatcccccaaaaaaccgaatcgagtgcgaaaaatgatgtaaaacgggggaaatctaaacctgaaaggccccacacagcacagccacaaaatggaaaggcactagcagcaacaacatcagagaagcgcccaagatgagcatgtcgtggcatttttgaagcatcgatcttagtttgttagccagctttctgttcaagtcaccgagactacctaatcccagcaagagcagtccatgatgcatatcaaaagcctgccccatgcccatgccgctgctacggcgatgagcagtaactgcgacattgtcatagtggccgcccagccccaaaccaccatagcaaacaataataacaatgagacggtcacccaggccacgcatccggctcacatggcggcggttcaacagcagcagcaacaacaacagcaacagcagcagcaacatcatcagcagcagcaacagcagtcgagcggaccaccctctgtgccgccgccacccacggaactccccttgcccttccagatgcacttaagcgggatctcggcggaggcgcatagtgccgcccaagcagcggctatggcagctgcccaagctgcagcagcccaagctgctgcggcggaacaacagcaaccgccgccaccaacttcacatctgacgcacctgaccacgcatagtccgacaacgatccacagtgagcattacctggccaatggacatagcgagcatcccggagagggcaacgctgccgttggcgtagggggagctgtccgcgagccggagaaacctttccactgcaccgtctgcgatcgtcgctttcgacagctaagcacactgaccaaccatgtaaagatccatactggcgagaagccctacaaatgcaacgtttgtgataagaccttccgtcaatcgtcgacgctgacgaaccatctgaagatccatacgggcgagaagccttataactgcaacttttgtcccaagcattttcgacaactgagcacgctggccaaccatgtgaagatccacacgggtgaaaagccttttgagtgtgtcatctgcaagaagcagttccgacagtccagcacgctcaacaaccacataaaaatacacgtcatggacaaagtctacgttcctgttaagatcaaaacagaggaggatgaggggtgactaggacgaatgccgttggcggcgcaccaccatcagcagcagcaacaccagcaccaccatcaacagcagcagcatcagcaccacccgccgcctccgtcccagcagcagcagcagcatatcgatcagcgtggagtcaccataaccacgttgccctccgccacgacagtggcccaacatcaccagcagcatcagcacattcaggatggctcgccgcaccatcattttaatgtggccgctctaggggacttatccagcgctatgcaattgggcgctgtgacggcggacgggagctttgtgaccatgggcggtgttgtggtgggtcgcatccagcacacacgagaggaactgcagcagcttggagtgatcaaggtggagtcaccatcgaatggtggcacagccacgacgtcagcgacggcggaaacgcaacgcgagggatgagtcgatgagctgctcctcgagtacatgctcaaggaggagaatgcggatgaagaggatgaacaggagcatgagtcggaagtggatgcggatgtagtggaaattcaggagcagaaagaggagcagcgatcgagccagaagtgagccatgtttggtgtgtacgcttacgttgttgttagttgtttaattgtagcgaacattgttgttgttgttaaggtttaaatgtgtgactaagaacttaccaagatgattgtatagcaaacgcttcaaaagtaggtaaacgaaaggcgccgacaccagcacccagagctcccaaaaaaataacacaaaccgtaaacaaaaacagaaacaaaaatactaaaataatagtaaagctaaactaaaaaccagatgaaagacctttgcagagagttgtctctatagcagcgcaccccatctcacattcacaaccctctcagccccggaaatagattaaacccctctctactcacttataaaataacctaaccctaactagagtgaaaatagtttgctaatagcaagagcaaactaaacccaaaaggcaaaaagcattacgtgtacgaagaacttaattaaaatatttcccaaagtgcaacccgtttcagattgtaaattgttgacccgactcacttttaagttgtttaatttagcatttaaagcttaagaaaaattgttgtacaactcaaagttggtgacgtttttcgccatcttgcaagggcgtgttttagtctgggctaacacaaatacaatttgtttataaaatcaatagcttaattatttaacttcgtaaacttgtcagcaaaacttaaaaaaatatcctgaacagaaaacggcaaagaaaaatattctaatagtgttaagtggtcgaaactatctaattagctcttagtccctagagagccatagtttttaaatcagcgttttgttaattttaattgattagtcttagtagttttaatttcagcattggcataatttggaaacacaaaagctgtcacgctagccttcgtttaaatattagttaatgaagtaaacacaaagtaacgctaattaattcataactaattacgattatgagatagtaaagcaacaagttctgtacaaagcccaactccaatttgtatgtataaagcgaaagcgaaagagtttaactaaattgtaaacgaaaacctttttaaaagagaaaataatattttctaaaaatacaacatgtgactttttatgttagccctttaatttatgtatgttacccttggtttcctcacatcccgactgtcctttgtttcaaacgccggtcgcctttaaatacctttaaaaactgcagcaagggtcaaaccgaaaagactcctgtatcaagttcctatagaattcaaagcgcaacaaacacggatgtccccaaatgtatacgaatcaattgcaagccgggaagtggagacacattcaaagaaacctagcctatatggaatgaatattaaataaatgttgataaatgtgtagtgttaaaca

SEQ ID NO: 26259 - protein, 308 aa, DROSOPHILA; identical to SEQ ID NO: 26256

SEQ ID NO: 26260 - DNA, 4532 bp, DROSOPHILA
agataaataaatgtaatcgaaaagtatacataatggttaatttttggatatgtctgcactgatcatgagtattattcgggtatttaattttatcaactcgcccgattatgtttgtgatcttcacaactaaacaaatttaaaagtaaatctatttttaacaacagtcttatccaggacaatatcggttttcaactaatacatgccccaataatcagcacattttcctaatcgtatattcattcagaaagcgtcccaagaagtttaaagaggctaattcacgatgcaggtaatgagaagatcactctctatctagttttccctgctatctaggctactttgattgctcaccatcaaccgaatttgtgcggactccgaatccgggattcaggtggtagttgccgaagaagagtccgaagttgaattcacccttggcgtccgacgagttcttgcggcgtggagtggcccgcacccagtgattagtggtcatgctgacgagcaagaggccaatagccaggcagctgccaaagaaggtggagaacactaacgcccgtgtgtgcaagctcatcttgataatgctcatggaagaccggtggcatatgtagaaggctatgctgttttcaccattaagaaatgtctagggcccgactccagctgcagcgaagaaagttagtaggaaacgttagtaagcggaggacgcaatgccagtggccttgcagcgtattgcttacccttttatgactatgtcggcgggatcaattgcaaatatagtctttgttcgcggaacaaaagattgttgcacaggtaaacaattaatataaactgtcttgcccttgtttttttctcagaagagaagactgagcggatattttttctcaaagagtacggtagcattaatttgggatttggtctggcaaccacggcccgtctagtatattcgataacgatacaattctcataccaaaatggctcgacaaccctggttccatgcaaaaatagcgcgaagtttttgtgtttacggcggtgaaaaaatagatttcgtgtaaatatgagcagtcgcaagcacagaggctccgaaaacatggaaaatttgtgcccggtgaccaggtgagttttcctttgcttggggtgtgggttcaagcagcagaccactgaactggtcgcgtgacgtcacacgcgccacaagtgtccaaaagaggtcaagaaagtaacttattgaattgcagggttcttgaccctttctttcatcagccattctgctgatgaagcacgatcgaactgcacacttttaataaattttcgactattgcagaaagcgctcgactaataagaaccacgtctctgttgtgggcgctctagtttccactacgaagtcatcgcactacgagcacccttcctcgccctcggcactaacttttgaggccctagaagagatgggaatcggaatgcttgattccgaagaaagcagctcctcagccctctcggccatcgctttggcggttagcgccaccagcgacgacaactcaaatgagacgaccccgtgcgccagtgtgtcgcgcatggcgcaccagctacagcacacgcaacggctaagtctgggctctacgggggacatcacactggatagcccagctgtggaggattcactgtcgatgtcccgtcaatcggccgagaagctgcagattctggcgcaggctaagcgctcgtcgttgggttctgaaggtagcggcaattcaaactcgcccagcaaacgtttgcgcaaccccctggctgcagtcacctgtaacaaccagattgatgggactgcttcgctcaattttcagccatcaaccagcaggttggcgcaagttcgccaggcaaaaaagccctcgacaacaaatattacaacccgaatagtggcagcggacagtttctttgtgtttcgcaccccggccatgagtgcccacatcaacagcggcataaactactttgaaagactttcagacgaaatactacttgacatctttaagtggctcccgaagaagacgctgctgcgcatggctaccgtttgtcgacgctttaaccgctgctctcgcgatgagactttgtggacaaggctagatttgggtttgcggacaattagaccaggtgccctcgagcaaattgtacggcggggagtccttgtaatacgtctggcccagactagtgtaagttacatctaacattatgttttcgggaaacaagagcatctaatctttgaactgtagatccaggagcccgcatttgcaccatatacagaagtgtttaggacccgattacaatatcttgacctgagtatggcttccatcacccgaagctcactgctgacactattgtcccactgccgccagctaaagaaaataagcttagagaatattgagctcgatgatgacatctgtgcagagatcgcaaagaatgaagctttggaggcggtcaatctgactatggctagtggcctgacgtccaacagtgttcgcctgatgatggagtcacttaccagcctaagcagcttaaacatatcgtggactgacctaagtgcggatgctgttacggcgttggttacccacatttcccccaacttaattcggctcaatatcgctggctgccgccgcgttttgtttgactcgcgtaagtagttcccaccgtcttcaatgatatatttcctttttgatttgaatttaatttgtttagatgttgcaaccctgcaaaaacggtgtcctcagttgttggagcttgatctatctgattgcaatagtctaacaccaacagtcattactgcaattatgaagttcaagatgctggaatatttgtccgtctcccgatgctatcttattccagcaaccaaatttatgtaagatttttccagcaagcgtctgattaatccctacccagtcattttccttgcagtgaacttaagagtatgccctcgctaacctatttagacatatttgggatgctgtcggacactgcaatggaagtccttgagaaacaactgccaaaaatgggtataaacaaattcattcacagttcggtatcccgcccgactgttggcacgcgacgcacctccatttggggtctgcgcacgcgcgactaagtctcgactctgctgcttccgttaccatttgaatttgttttgctgcgtaagccacccgtaacgcagttattttattctcaattcaacaacataaataatcacatttagctgttcttatttttgtgcgtttggtcactgatccgcttcgctaaggggctccactggtttctcccattcccattcctcccagttgacgcagttcttgagactatccatgaatcctgtttcgctggggcacttgatttcaatggctggtttgttaagtgtctcacacttccaatacgatgtggcatcccaattgttgcggaaaactacaatgtctagctcggcttgggtcttgcaacccggctgtccgtcaccatcataggcgagggcaatgccaaaagaaatcactagtagggaggttagagcgagctgaaccttcatctttcaaaaaatgttctatggtctactggaagtactcgaagccttttatagttacatagttgcagcggtatagtatccaagtgcagctactaccagaaaatgcttttataaattggcattaatgtaaacactcgagagaggaaggaaaagataacagtacttgcccttgactccaatctgttcaaactaaaaaaggtacaatgagtcacccaattttccatttaaaaattcattgtttttatactatattaaatatttaagaaaataaacaaaaaatatgtcttttatcaaggaaagcataatcaagccaattcaaaacaaaatcatatagggaaacgacaaatataaatattttcgatctagttcgtaatcataggttcaagaacaaagttcgtattggacagcctgccaaatttaaagattcagcaatataaaagtaactaaagcaagagagaaggctatggtcgagttcctcgactatcagatacccgtcacccgtggcaacatgggtcaactaacttgcgctgggtatttgtctctagaatctgtatgcttaatctcaaccttctagcttttatagttcctgagatctcgactttcatacggacagacgtacatggccagatcggctattgatcctggtcaagaatatatgtacttcatatggtcgggaacgcttccttctgcctgtttcaacgaatctagtatactctattactctacgagtaacgggtagaaatataaaattgaaactattttgagtcatccctccaattggtaatttttttatatattaacggaaatttaaagtgcgttacaaaagtaaaaattcttttggtgctagtatgcttaacggggtggacatttcggcgttttccacacttcttgggaaatcactttagacaaatttgtaccaatgtcggtacttaatagtatttaactataacttaccttttgcctttggtgtgaataggctattaagccaaagagtaaacat

SEQ ID NO: 26261 - DNA, 2148 bp, DROSOPHILA
aagtttttgtgtttacggcggtgaaaaaatagatttcgtgtaaatatgagcagtcgcaagcacagaggctccgaaaacatggaaaatttgtgcccggtgaccagaaagcgctcgactaataagaaccacgtctctgttgtgggcgctctagtttccactacgaagtcatcgcactacgagcacccttcctcgccctcggcactaacttttgaggccctagaagagatgggaatcggaatgcttgattccgaagaaagcagctcctcagccctctcggccatcgctttggcggttagcgccaccagcgacgacaactcaaatgagacgaccccgtgcgccagtgtgtcgcgcatggcgcaccagctacagcacacgcaacggctaagtctgggctctacgggggacatcacactggatagcccagctgtggaggattcactgtcgatgtcccgtcaatcggccgagaagctgcagattctggcgcaggctaagcgctcgtcgttgggttctgaaggtagcggcaattcaaactcgcccagcaaacgtttgcgcaaccccctggctgcagtcacctgtaacaaccagattgatgggactgcttcgctcaattttcagccatcaaccagcaggttggcgcaagttcgccaggcaaaaaagccctcgacaacaaatattacaacccgaatagtggcagcggacagtttctttgtgtttcgcaccccggccatgagtgcccacatcaacagcggcataaactactttgaaagactttcagacgaaatactacttgacatctttaagtggctcccgaagaagacgctgctgcgcatggctaccgtttgtcgacgctttaaccgctgctctcgcgatgagactttgtggacaaggctagatttgggtttgcggacaattagaccaggtgccctcgagcaaattgtacggcggggagtccttgtaatacgtctggcccagactagtatccaggagcccgcatttgcaccatatacagaagtgtttaggacccgattacaatatcttgacctgagtatggcttccatcacccgaagctcactgctgacactattgtcccactgccgccagctaaagaaaataagcttagagaatattgagctcgatgatgacatctgtgcagagatcgcaaagaatgaagctttggaggcggtcaatctgactatggctagtggcctgacgtccaacagtgttcgcctgatgatggagtcacttaccagcctaagcagcttaaacatatcgtggactgacctaagtgcggatgctgttacggcgttggttacccacatttcccccaacttaattcggctcaatatcgctggctgccgccgcgttttgtttgactcgcatgttgcaaccctgcaaaaacggtgtcctcagttgttggagcttgatctatctgattgcaatagtctaacaccaacagtcattactgcaattatgaagttcaagatgctggaatatttgtccgtctcccgatgctatcttattccagcaaccaaatttattgaacttaagagtatgccctcgctaacctatttagacatatttgggatgctgtcggacactgcaatggaagtccttgagaaacaactgccaaaaatgggtataaacaaattcattcacagttcggtatcccgcccgactgttggcacgcgacgcacctccatttggggtctgcgcacgcgcgactaagtctcgactctgctgcttccgttaccatttgaatttgttttgctgcgtaagccacccgtaacgcagttattttattctcaattcaacaacataaataatcacatttagctgttcttatttttgtgcgtttggtcactgatccgcttcgctaaggggctccactggtttctcccattcccattcctcccagttgacgcagttcttgagactatccatgaatcctgtttcgctggggcacttgatttcaatggctggtttgttaagtgtctcacacttccaatacgatgtggcatcccaattgttgcggaaaactacaatgtctagctcggcttgggtcttgcaacccggctgtccgtcaccatcataggcgagggcaatgccaaaagaaatcactagtagggaggttagagcgagctgaacctt

SEQ ID NO: 26262 - protein, 499 aa, DROSOPHILA
MGIGMLDSEESSSSALSAIALAVSATSDDNSNETTPCASVSRMAHQLQHTQRLSLGSTGDITLDSPAVEDSLSMSRQSAEKLQILAQAKRSSLGSEGSGNSNSPSKRLRNPLAAVTCNNQIDGTASLNFQPSTSRLAQVRQAKKPSTTNITTRIVAADSFFVFRTPAMSAHINSGINYFERLSDEILLDIFKWLPKKTLLRMATVCRRFNRCSRDETLWTRLDLGLRTIRPGALEQIVRRGVLVIRLAQTSIQEPAFAPYTEVFRTRLQYLDLSMASITRSSLLTLLSHCRQLKKISLENIELDDDICAEIAKNEALEAVNLTMASGLTSNSVRLMMESLTSLSSLNISWTDLSADAVTALVTHISPNLIRLNIAGCRRVLFDSHVATLQKRCPQLLELDLSDCNSLTPTVITAIMKFKMLEYLSVSRCYLIPATKFIELKSMPSLTYLDIFGMLSDTAMEVLEKQLPKMGINKFIHSSVSRPTVGTRRTSIWGLRTRD

SEQ ID NO: 26263 - DNA, 8124 bp, DROSOPHILA
aacatttttggaaacatggattcaaagcgaaatgtaaaagttctggggcatggttggatgggaaggtatacgagggtggtaaacaatatgccactcaagaggaatcgatcaccgaaataaaactcggttggtctacgattgctttggattacctacaaaaaaatatgattcacttcccagacgaatgtgtgaagtccttgaaaacaaaaaatcctttaaaaatattctaatttaaatatttcagtgcttaacatctaatttttatttacttgaataaaaatctataaacaacaaactgtaacccaaataaacttttcatttatagaacttttcaactcttaagggaaaaaaattttcaaagctctcgcttactaaatatctcacatcaaaaagttttgcttaagaggcgctgacctggtgacgcgcagtgtattaaaaaactataaaaacgcattccgttcatgttaatgtttatgtttatgtctatttatatgaatatattacatttttacattttttaattaaatggcacttaacaaatatggttaacaattttcattattcaacctacttaattattatttaaattctaggctttttgcgtctatatagattttgatttttgttcatttcgataggtacaggttttcttagttaatcatccacaaaatacaaacactgttgtgcaatgcatctcaattaactcaaaatgaattaaataatttatggaccatattcatttaaaaatttagtgacatttatttttagtagacaaaaaacaatgagtttcaaaattttaaattacagttgacacttggtaaaagcattctagttaatacatttgagcttacgcacaggttattgggttataataaattttgaaacataagatgaagtgtcgttgatgtgataattgtcgtgtatccaaatgctataagtgagtgacacgcattttgtgttggcgcaacccttttgcttttgaggcggcttatagctaaaactataagtccgtaatcggagcgtccgccacgctgaatttcgatgatagcgttatgtccgctgcagtgcttgatacggtcgggttcctctttgtcttacctctcacctggtcacttaggtcttcaaccaatttctcaaggctataatgttgcccagtataaataaccattgaaagataaaaaggaagtgtacaatttgtaagttttaggattagttaccaagctcagatagtgattaaaatgattagtagaatgtgactaaacgtatatttaaaacgtccatgcaagtgaaagttaacggtgatgggttagtttaaaaatgtagaacagagcatatactacacccacgcaattatacgttgatttgtctccttacgtacggaggccgcctcgctgcgctcccgctttagatgagcgtggtccttctttcgtggtagcaatggcggtggaattcccggattgatctggtcagaagccagcgcaaaagagggagggcttctaactgcttgcttttctgatttaggtatctgtgagtgaggcgttaagttggagggagattgatgaccgatgttcaaacacgataaactgttgttgccagtcagggataattcttctccgtccagtcctacttgctctactaactgctcctcttctatttcgtcgtcctcttccaaagagtgtgtcgtttggataggcgtttgatgcattgttccataatgaaggtttaaagattttgcccgtcgtattccgagggcaccggaacccacaactccgccgccacccccattcggaaatggctttcggaatccatgggatcggtcattttcgtaaataatgtcgttactgattggccgctggttataacaaccggccagagcttgacgaaggcacttgttttcggattccagatgtgagaggcgtttgttagtctcctttttctccagtcgcaactgcattacttgggtctacaaccgaaatcgaatttttagcttttagctttttatgcacatttattttagcactcacctttagatcgtctatatctctcagaattcggacatttccctcgtttaaggaacactgacgttcttcaaccattaattttactctgagaacaaaatgtaatcaacactctaaatatactttttaattttcgacttcttaccgacttagcagtgcatcttcgcgtatgcgcgctgcctccttcacttcccgcacgacatccgtcatcattcctggagtgtaggcgcctgaaaaatgggaagcgaatataacttattactcactcctttgcatggcatagttgggggtagcgtttatgttatacctgagtgaaatgtgggcgctgggctgtgtgtccctcccaatccactgccaagaataagaggttgactttgtgtgcttagcccgcttaagctatctctacggtgccgcatgcccccaaagcctacacctgcccagtgctggctattaggggagtgctttaaagcttcgatatcaactatgattgtgtttgcaagtgcaagggagtacatagaaagaggaaatgggtggcaacacattctaattagcatacgagtacaagtaaaataaatcagagatttgtgtaattttgtcgtaatttgggaagcatcgtgacatctaaactggacacaatcctacaaaccacacaccttttgtattatgcaaattccggcagatcttggaattggtgtcgtgcaatatgtttatttgttccattagagccgcgaaaaatttgttttgatgtgccagatcacagccactgccattgttgttcacatttcgacactctggtgtattctggccactcagcttagagtcattatcggaggggttcagtaggcacggatcgctgaaccgaaatctgttatcacacggtaagtacggctctttaataattcattacgaatttattgtttttgcttaccccttggtaaagttgggattgctttcgctgccatccagcacatccgtcgaattcggttcctgatcgcacccaagcccttccggccctcccatcatgttgttcaggggaggcaagcttgcaaactcctggccaccatcaccatagctgttaaggctctggggtgggaagagcatcggatatcgatggctaagagagttcgaattctgtaaaaataaaataaagttgggtgtgcgttgtacaaaatatcttgcaatagcaactactcacgcgctgtatccccaggctaaacggtgtgcctggacccactccgtaaggctgggttcgcttcgaaaattcctgttgcctctgctgctgtagttgctgtttaagctgcggcagctgctgctgttgagtcaaaaacatttgcttatgagctggtgctgtgggcggtatgaagtccaaaaactcagatgaagaagacaattgggcgttggtggcatcacgtaaacagctctccaaccaggcatcaaggtgatcgttggaatagttaatatcggttctcttgacctcaccgatgttcgtttggttaagagaggtcgccgctgcttcagttttttgggccaatggggaaggtggtacgttacgcgaccttagtttcttgcgcttggtggcatccgtagctgaaggagaatttaatttgaggtcatcttgacaatttcaatagtgcaggtcctagtgtggacagattacgtagctaaaggcttcacggctttcacttccagcattgacaaagtgaaaactattacacgaattcaacaattccggacgtaacgctcaactcggcggctaaactagagttgtctaagttactttagcccagaaaaacgtctggggcaatttgaagcaattttaagactattttggttcgtttttcaattgttaaaaccaaacggttttctttaagtcaagcaaatacttggtttttatagattgagcaaactcgatgcccctttcgataaacggccagtaaggagagcaaggaaattactcagaaatgcttctaaatgttgagggattgtcaccgaaccttgaaaatatacatattctggattaggatcactagccgagtcgatctatcaatgtccgtatgtccgtcgaggtctcggatactataaatttcataataagaagcaagcttgttttgcaactaaccaaagctgacactcccacccctaatttgttgtcatttgactgtatatattgttaatttctattgattaaaactgccacgcccacactattgaacattttcaactttttaatcagatgtatgtatactcatatacttacttaatatacatatgtactttatactgtaatattaattttaaacaaacagtatatattttgcccaccttatataattcgggagttaggtaaatagtttccgttatttcaatgatatatctcggacaaaggcatcgtaacaaataaaattaagtcgattactgaccgtgaaatcagtcagtttgaatagattaaatcttttcgtaattatagtggctaaaaataaaaggaaccttaagatcaaaaaatgcaatataacatgtttattatatcaaaattagtacaacacagaagaaacttagaggtttcttaactttgcagggaattataaaaggcgtaatgtacaaaattaacctaattgatttattattgtgttttgtatttatttaacatttcactcactgatttggaatttaatgtgaattttgagtttataataccaagttctttaaaatagactttataaacaacctagattaacggatattcaatatttcggacgatgatctcgctcacctctctgtgtactgttcagacccgctccagtagtgacctttttctgggcaccgatcccgccgttatttcctggcgttaagcaaaagctgttgccagcaatcagcgacgtcacttctgcggggaaatccaacccaccgccgtttgtgcttatctccctctggctggaagttgtcgtttcctcccgcaaaacgctcatgttgcttctgaaatagaaaaaatacggatagttaagtattgttaagcgaggtttttcattcgtgcgattccgcagtggaccataaaaactggaagcacacagaaattaacccacgaaagactcgatgtttgtacctagtgcacttgggggagacaataaacagaagtgaaacagcaagaaaaatcctcaagttacgtatgcaatccctggaaacagccgtacgatttctccaaacacttgcacgaccaccgtcacaaactgtgctgtggttgcagaatatacaatgtaaaaacatttaaatgtatgcaggcacagaccagtggaatggcacttaattgacgaacaataaacatttattcacttattgatctacaaatgaatttagacgaattcactaacagataatagaattttccagcggtagccctaaatcagcgttttgtgtctataaaattgtcaatgaggtttaacagtttacaatacgattgatagttcaactaaaaaacctatttaccagttttaagcgttgtttctattagtatgtaacatctagtaatacgttcgggatgaaaataggcggtagcttggattcaagataattgtatctactcccactttaactgactaagaacgacattggcagtaaactctggccaccaagatgaacgtcagtcaagtataaagagaaaataaacattcgccgcttttgggtcaagtttttttttgttggtgggtggttgccagcaaatatacatactgcaagtgaagacataccaataagcataaggtatttggcagccaattgaagtggctggtgcgtaatctatgcagtcgagttaaccgaaaattaagccgccaaaccaaaccggtttcaccgctgtgtctaatgacctttccatttaacaaattttaatgacaccaataaagaaaggctgcgttgtcaatggagatggtgacatggcccacagcgactccttcccgcgatcaatgactaaatgcacacggcgacaaagagctggaagagcgagtcgcttggtttgttgacccaatcgaagagcactatacatacatatgtacttcgattgcttgagctatattgtagcaaatatttaaaccctggcaaaaaatgtgaattagatattgacttggctggcgatattgatcaggaatagatatacttgatatggtcgcaaatatctccaccactgcgttaaaaccttctaactgaaattaatatacattctgcaagggtatgaagaaattaggattgacagaaatggagttgacttgaaagttgaatactagcttaaaagctcaaaagaccgggaaacgacattgtaagtttttgtagaaattccaagcatctacagctgggattcccacgccattgctcactggtccactgcaaaaacttgcttacaatagaatattttctagaagctctgcgaggatattttatatatttggaagtacacatatatacctaacgaaaaatgccttggttgttagattcaaggttagacaaacttttattttcatacaaaagcgttatattatatgtatttagactgcactttgccagattccagttcggcttcgtgctgctttgtgtcgaaaagttttgacacgcgctcaactctggtctgggctcttggtacgggaaatcgagttttcaaatccctgttccacccccatcccaccctctcgattttcattgtgtgcgagtgactgctgcgaaatgaaaagcgaaacgacataagatgacgtcgtagactggctttcttcctcctgctagctccaccagcaataaagaaacgaagtaatcgacgccaaggaggtggtatcacggtaccaccgcggtattccgctttgtggggggcactgagcactatatttagctgtttagccataatcatattatcagaagcgtctcagcggaatttggcacacacggcactcacacttgcccagtggcattggccatccaaaatttacttgcgtcacaattgcggattaaatgtattggactttcaagcacggcgtgggcgcggtcacggttttgcatacggtgttctgacaggcggaaacattcagtttgagcagcgacaaaaaattaagcgcacaacggaactgagccaattcattaggcatttattttagaggtgggcaatctgcgatgtgccgtcaaagcgatgactttcgctggaacagcgattgttgcgattatcgatacctgctgctcggagtgttatctgctatcgaataacagcgcatttcatgtatgtaagcatgagtagctctaaaaattttgacctaaattataaggctcttttttaaacaaccggacaattacctgaatggagcatacaatgtgcattaattctgatgcactaattccgcttttcttaattatttggttcaaatttttgaacatcaataacaggcaaacggtcttggtcttaacattttatgaaaccgtggctacgactaacgtttaaaccttcgaatgcatacgacacggagagaatttttattcgagacattctaaacaattacaattcaagaaatcacagcacagcacaaccaataaaaaagaatcccgtttctaagttttcagcttaaatcatcctcccaaacacaaaaaaataagcaacagttgttactgcgatgcaactgtcgaaacggagcttttccgagccctgtgtgtacacacactgggggtggagggattaagctccaaagtgcttgctttgaagcagtttttccatcgagtttaaggcagctcatcctaattcagttgaattaaatcctgagccgtttgatttttatttctgaatctctcgttgcatgattcgcagttttgggatcgtgccttcaagaaatcgaaagtgattaataggatagaacagtatagttgttccttctataatttgttttacgattttgcaaccaaatctcagatgaacggttccgaaatacggaagggccaaaaaaacgggtaattcggagtacaccagcttccaaacgacttttttgctttgatccctagtcgttgtcttgcgaaaaatcgattccagttatcctgcgacgctgtgctgtcaaattcctgagcttttgctttcacgctgcagtgagaataa

SEQ ID NO: 26264 - DNA, 1947 bp, DROSOPHILA
attggctcagttccgttgtgcgcttaattttttgtcgctgctcaaactgaatgtttccgcctgtcagaacaccgtatgcaaaaccgtgaccgcgcccacgccgtgcttgaaagtccaatacatttaatccgcaattgtgacgcaagtaaattttggatggccaatgccactgggcaagtaagcaacatgagcgttttgcgggaggaaacgacaacttccagccagagggagataagcacaaacggcggtgggttggatttccccgcagaagtgacgtcgctgattgctggcaacagcttttgcttaacgccaggaaataacggcgggatcggtgcccagaaaaaggtcactactggagcgggtctgaacagtacacagagagctacggatgccaccaagcgcaagaaactaaggtcgcgtaacgtaccaccttccccattggcccaaaaaactgaagcagcggcgacctctcttaaccaaacgaacatcggtgaggtcaagagaaccgatattaactattccaacgatcaccttgatgcctggttggagagctgtttacgtgatgccaccaacgcccaattgtcttcttcatctgagtttttggacttcataccgcccacagcaccagctcataagcaaatgtttttgactcaacagcagcagctgccgcagcttaaacagcaactacagcagcagaggcaacaggaattttcgaagcgaacccagccttacggagtgggtccaggcacaccgtttagcctggggatacagcgcaattcgaactctcttagccatcgatatccgatgctcttcccaccccagagccttaacagctatggtgatggtggccaggagtttgcaagcttgcctcccctgaacaacatgatgggagggccggaagggcttgggtgcgatcaggaaccgaattcgacggatgtgctggatggcagcgaaagcaatcccaactttaccaagggatttcggttcagcgatccgtgcctactgaacccctccgataatgactctaagctgagtggccagaatacaccagagtgtcgaaatgtgaacaacaatggcagtggctgtgatctggcacatcaaaacaaatttttcgcggctctaatggaacaaataaacatattgcacgacaccaattccaagatctgccggaatttgcataatacaaaaggcgcctacactccaggaatgatgacggatgtcgtgcgggaagtgaaggaggcagcgcgcatacgcgaagatgcactgctaagtcgagtaaaattaatggttgaagaacgtcagtgttccttaaacgagggaaatgtccgaattctgagagatatagacgatctaaagacccaagtaatgcagttgcgactggagaaaaaggagactaacaaacgcctctcacatctggaatccgaaaacaagtgccttcgtcaagctctggccggttgttataaccagcggccaatcagtaacgacattatttacgaaaatgaccgatcccatggattccgaaagccatttccgaatgggggtggcggcggagttgtgggttccggtgccctcggaatacgacgggcaaaatctttaaaccttcattatggaacaatgcatcaaacgcctatccaaacgacacactctttggaagaggacgacgaaatagaagaggagcagttagtagagcaaatcaatccgggaattccaccgccattgctaccacgaaagaaggaccacgctcatctaaagcgggagcgcagcgaggcggcctccgtacgtaaggagacaaatcaacgtataattgcccttgagaaattggttgaagacctaagtgaccaggtgagaggtaagacaaagaggaacccgaccgtatcaagcactgcagcggacataacgctatcatcgaaattcagcgtggcggacgctccgattacggacttatag

SEQ ID NO: 26265 - protein, 596 aa, DROSOPHILA
MANATGQVSNMSVLREETTTSSQREISTNGGGLDFPAEVTSLIAGNSFCLTPGNNGGIGAQKKVTTGAGLNSTQRATDATKRKKLRSRNVPPSPLAQKTEAAATSLNQTNIGEVKRTDINYSNDHLDAWLESCLRDATNAQLSSSSEFLDFIPPTAPAHKQMFLTQQQQLPQLKQQLQQQRQQEFSKRTQPYGVGPGTPFSLGIQRNSNSLSHRYPMLFPPQSLNSYGDGGQEFASLPPLNNMMGGPEGLGCDQEPNSTDVLDGSESNPNFTKGFRFSDPCLLNPSDNDSKLSGQNTPECRNVNNNGSGCDLAHQNKFFAALMEQINILHDTNSKICRNLHNTKGAYTPGMMTDVVREVKEAARIREDALLSRVKLMVEERQCSLNEGNVRILRDIDDLKTQVMQLRLEKKETNKRLSHLESENKCLRQALAGCYNQRPISNDIIYENDRSHGFRKPFPNGGGGGVVGSGALGIRRAKSLNLHYGTMHQTPIQTTHSLEEDDEIEEEQLVEQINPGIPPPLLPRKKDHAHLKRERSEAASVRKETNQRIIALEKLVEDLSDQVRGKTKRNPTVSSTAADITLSSKFSVADAPITDL

SEQ ID NO: 26266 - DNA, 4535 bp, DROSOPHILA
cggtaccttagaattcgaacgcacaaatacatattctacattcgaagataagttggaaaaaatgttggtaaaaatactaggacatctgtgaatgcaagcatgccgattcgcgtgccaggcgagaagatggattttattagagctttatttcgatttagggatcggactaaagagcacatatgtatttagctgctccgctaaagtatctgactatcgttgacggtcgttgtggctggattttgcaatggtcaatgaaatgaaagtactttggttttgcattagagcgcaagaatgatataagttaaacttataaaaagagaaaccttaaagctttaataaatatttaaagaaattgttttttaaactcaaattaaatcgaaacctaaaaaagcaaaactattaaggtgttgccatgcgcatccagcgtaatattaatttgtatgttgaatcatattcagagtatttatatcttttaaaaatctgtatgttttaagtgtcgaatattttataaccgcaattcgaatgaattggtgctccttattactgcaaaggccatatataagctaagtctataacttcatttgggaaggacagcgaggataaatttaactaactaatcgaaatcgttaatgtcggtattacatatttctaaattcaacagtgcaacggctgttagccttgacacaaagttcatttttgtcaagtgtttcagaccaaagacactagaataactctagtgtctaataattctagtgtctttgttcagactctgcgtccctccataaattgcaaaaaaaaaaaaaaaaacaaattcattttctttttctgacagagataacataataaaacttttaaatttaaacaattaaattgccattgttaattatcaactaaataattttaatataacttaattgccacttaaaataaaagtatattatataaaaatccatttcttacctacttatttcgtattctaactaatcctgagctggcacgttcattttctgcgttttttccttgtctttcgcccgatccctgagtaattatcctcgtcgtcactattcaccactggttccgaattttcattagattgcgaattggatttgccaagttgctgggcgtcccattccttgcgtagctcgctaagcatgcctggggtaagaagaccctgtgcaagtaacctttcggtgagacggccacgcgacaagctgggtagacgaggctccttcacgtgcgttattcggcggattgcatagtttgatgtttctccgtcctgactcgcctcggtatttttaagcaagcgagttatttgaaaaacgccctgctgtataatttcgtccagttccttctgggcatctcgcacgtaggccgcttcagggaagagatccatgaaccgatagctgcaaaacaagtttgattagattttttctgaagcgcacttgtgcgagacttgccttagccaaagatacagatccatcacgtcaaagacggcctcaagatggaccaggtccaatatcgtcttgggtagcttgaatggccagccacagtttttttttataaaatcaaaggtaataggctcgttgcggctgtattgccgtgctaccttaaggaacattgagcaaacaaagggcatctttcgattaataggtgcacagcagaatacatagcgagcccgcaaaggcagagcaacatgttgtatcatttcggctaagaacttaaagtcttcaatgttgcacataaagtatagagaatcatcgacagtgcacagattcacgaatatgtccattaggttgctcaaagacgagcttggcaggtggtaggcgtaaagctcaatctgatcggccgtaggatgcaagcccgcctgctttatcggctcaggtgtccgagccaatatccgctgtagggtttgcaaatcctcggacttgaaggcagttacatatccgtgctcccactgagttcggaaccggcccgctcttcccgcaatctgaagtgcggacgaaaccgatattgtgtcgatttcgcgctcgcctcgctcattcatcgacggcttgatcagtgagtaaaatatgattcgacgaatgctcctgcaagtacattcgcgggcattatattttggcaagccacatatatagaatattttacttacaggttcaagcccataccgatggcgtcagtcgccaccattaccttgcagctattggcgggatcattaaacttagcagcctgggctagcttggtacctgggggtaggcccccatatatcacagctacctccttccctctaaaaaaaatagttttagggatcagttgaaaataatgacttaacaaaactgaccgtgcttcgatttctcgtgaaaccgtataaatatcatgtttgctgaagcacacaatgcagtcgccaggaactatattgtccaatgatcctaaagcggtattttcgacagtcagctccgtaagccgatcgtacagccgtacttcaacagtttcgccagtggtttcgcaaattttttgcaggaggtccaatgcgcctggctcaccacaaacatgcacttcatccgcgatcagtccaaggaaggcacgcgtccaagcccatccccgctgggggtcgcggatctgttgtatttcatcgattacagccacctcatctgaaacagaaaaatcagcacattataactcagcgaagcagggaaacaactggacttgcttacatggagtattcaccgaggtcatttccacagtgcacgcgacgtgattggctggcaaactttcgctgatgccgaatttgcgctcctcgcctgtgaccagatcgcagggagtgccacgttcattggccttgttgtacacctcagtggctagaagctttagtggcccgcaatagaccccagtcttcgcactcaggtatctctccatggcatggtaagtcttaccggagtttgtgggtccggcatgaaaaacaatctttcgggtgatggcgcgagcgttgctataccagttggcaggctgcctcaggtcggaaatctttttcaggtcgtccatgcagtccaggtgcgggaatactgtctttgcgtgtcgtaggaagtacgggaagatgtcatcgatatgacccgctccctgtgttatatcgctaaaggttatgtgcagatctactggaaggttttctgcctcgatgcaaaatcttcggaatgagccaaaggcctgttgctgtaggtagtcttgtaacggatgcaaagtaagacgagggaccataggaaacaggtgcatacgtaccgtccagtccgttttcgttgcatagtgacttgatttcgcgacgttgggtgaacttattaagaatcttcagcagctcagccttttccagtttgcccgacagctcggaacctacgtcctctgaatccacataagcgtgcacctgtactggcttgaacaacgtggacaagttcgtctccggtttttttcgagaaaataaaaaggccgcacgatgcagtcggcgcagggacaaatcaattgaaaaggacggacgcaggtagagtgtcatccgcaaaaggcccgttaggctgatgcagcgcctgcagttttgcatggttgtccactttagtggaacacgcgtggtttttattcaccaattcccgcaaaatgaatctccgtactcacgttcctatctctgatataacagagaagtacaatcagctgacgcacatctggttgttgggttgacaatgctcttacagaatagcattgccatatcgatggtttttatgctacgtatgcggggaattcttttgaaaaattattaaaaaattagttttagaaaacacatcagaaaaacgattgtggaatttaatttatactaaaaaaatattttaaaaaagtattaaaacatttaattgtattacgacggatataaaataggatatttgagaacatatatgcatttacaataaaaagcaaataaaatatgttgttcctaggcaatcgcaaaatatttataaataaaaatgaaaaaatgaaaattgattccacaatagtcgttaaaaaatgtagtatcggtatttggcattgcattttttcgcaatacagtctcgctttatatatggaatattttaaaaatattttcataaaatcgataaaatgaaaaacaattacgtattctaagccagcatacgcaaataataaaatttatttaataatcggtagattaaatgttaatgtccttataagcaattttaaaacttaataataaaaactctttaaatatatcgatctatcgatgattggctatgctaacaagaagtcatatatattggcaacgctgtgtttgtttgtcagaatcaaaataaaatgactcacttgtttgtttaaacaaaaaaagaattttaataacaattccagacaattatcataacagttagtgccatgggcttattcggcagaactcccagtaaagatcccaaagagcaggtaacgacgcagaggcgtggcagtgatttttttgggaatgatgtcattccagttggattgattttattagacctttc

SEQ ID NO: 26267 - DNA, 2136 bp, DROSOPHILA
atgacactctacctgcgtccgtccttttcaattgatttgtccctgcgccgactgcatcgtgcggcctttttattttctcgaaaaaaaccggagacgaacttgtccacgttgttcaagccagtacaggtgcacgcttatgtggattcagaggacgtaggttccgagctgtcgggcaaactggaaaaggctgagctgctgaagattcttaataagttcacccaacgtcgcgaaatcaagtcactatgcaacgaaaacggactggacgactacctacagcaacaggcctttggctcattccgaagattttgcatcgaggcagaaaaccttccagtagatctgcacataacctttagcgatataacacagggagcgggtcatatcgatgacatcttcccgtacttcctacgacacgcaaagacagtattcccgcacctggactgcatggacgacctgaaaaagatttccgacctgaggcagcctgccaactggtatagcaacgctcgcgccatcacccgaaagattcttctagccactgaggtgtacaacaaggccaatgaacgtggcactccctgcgatctggtcacaggcgaggagcgcaaattcggcatcagcgaaagtttgccagccaatcacgtcgcgtgcactgtggaaatgacctcggtgaatactccatatgaggtggctgtaatcgatgaaatacaacagatccgcgacccccagcggggatgggcttggacgcgtgccttccttggactgatcgcggatgaagtgcatgtttgtggtgagccaggcgcattggacctcctgcaaaaaatttgcgaaaccactggcgaaactgttgaagtacggctgtacgatcggcttacggagctgactgtcgaaaataccgctttaggatcattggacaatatagttcctggcgactgcattgtgtgcttcagcaaacatgatatttatacggtttcacgagaaatcgaagcacgagggaaggaggtagctgtgatatatgggggcctacccccaggtaccaagctagcccaggctgctaagtttaatgatcccgccaatagctgcaaggtaatggtggcgactgacgccatcggtatgggcttgaacctgagcattcgtcgaatcatattttactcactgatcaagccgtcgatgaatgagcgaggcgagcgcgaaatcgacacaatatcggtttcgtccgcacttcagattgcgggaagagcgggccggttccgaactcagtgggagcacggatatgtaactgccttcaagtccgaggatttgcaaaccctacagcggatattggctcggacacctgagccgataaagcaggcgggcttgcatcctacggccgatcagattgagctttacgcctaccacctgccaagctcgtctttgagcaacctaatggacatattcgtgaatctgtgcactgtcgatgattctctatactttatgtgcaacattgaagactttaagttcttagccgaaatgatacaacatgttgctctgcctttgcgggctcgctatgtattctgctgtgcacctattaatcgaaagatgccctttgtttgctcaatgttccttaaggtagcacggcaatacagccgcaacgagcctattacctttgattttataaaaaaaaactgtggctggccattcaagctacccaagacgatattggacctggtccatcttgaggccgtctttgacgtgatggatctctatcggttcatggatctcttccctgaagcggcctacgtgcgagatgcccagaaggaactggacgaaattatacagcagggcgtttttcaaataactcgcttgcttaaaaataccgaggcgagtcaggacggagaaacatcaaactatgcaatccgccgaataacgcacgtgaaggagcctcgtctacccagcttgtcgcgtggccgtctcaccgaaaggttacttgcacagggtcttcttaccccaggcatgcttagcgagctacgcaaggaatgggacgcccagcaacttggcaaatccaattcgcaatctaatgaaaattcggaaccagtggtgaatagtgacgacgaggataattactcagggatcgggcgaaagacaaggaaaaaacgcagaaaatga

SEQ ID NO: 26268 - protein, 711 aa, DROSOPHILA
MTLYLRPSFSIDLSLRRLHRAAFLFSRKKPETNLSTLFKPVQVHAYVDSEDVGSELSGKLEKAELLKILNKFTQRREIKSLCNENGLDDYLQQQAFGSFRRFCIEAENLPVDLHITFSDITQGAGHIDDIFPYFLRHAKTVFPHLDCMDDLKKISDLRQPANWYSNARAITRKILLATEVYNKANERGTPCDLVTGEERKFGISESLPANHVACTVEMTSVNTPYEVAVIDEIQQIRDPQRGWAWTRAFLGLIADEVHVCGEPGALDLLQKICETTGETVEVRLYDRLTELTVENTALGSLDNIVPGDCIVCFSKHDIYTVSREIEARGKEVAVIYGGLPPGTKLAQAAKFNDPANSCKVMVATDAIGMGLNLSIRRIIFYSLIKPSMNERGEREIDTISVSSALQIAGRAGRFRTQWEHGYVTAFKSEDLQTLQRILARTPEPIKQAGLHPTADQIELYAYHLPSSSLSNLMDIFVNLCTVDDSLYFMCNIEDFKFLAEMIQHVALPLRARYVFCCAPINRKMPFVCSMFLKVARQYSRNEPITFDFIKKNCGWPFKLPKTILDLVHLEAVFDVMDLYRFMDLFPEAAYVRDAQKELDEIIQQGVFQITRLLKNTEASQDGETSNYAIRRITHVKEPRLPSLSRGRLTERLLAQGLLTPGMLSELRKEWDAQQLGKSNSQSNENSEPVVNSDDEDNYSGIGRKTRKKRRK

SEQ ID NO: 26269 - DNA, 2907 bp, DROSOPHILA
caacccaccgacacaccgacgccgcctcctccacgtcctcctcctggggggaaactgctcttttgtttcgacccttatcgcaggagtccgtttcgagttttttgcgctttaattaaatttcaggcaatcgaggggggctgggattcctttagctctatgcgttcgaggtcactgctcacagaattggaaaggtaacctgtgactgggcgacatattgagcctcatttccgcccgggcaaacaaaacggaagttttctaacatcatcatcatcatcatcatcggtggcaccaggtcctggccttattgttgttctgtaattagatttgttgctgctgctgatgtggctgttgttgctcctttcctgggattaaagccgtaatggcctcttccgatttggctgctgctactgatgttgcccatagccatcgtctattgtctgccaaaacgctttaaaccactgaaaagagtagcaaaacaaagaaatcggttaggcaagtcagggccataaattattgataccatagtacgtatacattaacttttcatcattttttattataaaattatgatgtatattttagcaatagagcaaaaattctttccgaaaaaacaactttcattagaagaggatattcagaaatgcaatacattgaaaacagttttagtaagtagactttgaaaaacacatttgatatctaattttaaatttatatatttttgcaagtactaaacataggtttgaatgcccggaaagcgaaccacctgacaccaaagtgggatccatgcaatgcgtgcggatgaattagaaacttcgttagaaattcaaatcttgacgactcttggtcggggcactgcactacgagaatagtatagtgtctgcaggagcatacataatcaggtgttattgtgttttgggtccgcatacactgttgcaggtgcattggtatataaagtggcgaatggcaaacgcgctactcagttgcattcgacggagacaccatgaacttcacactattggatttattccgagggctgccggcaggtcagcctgatctttgcatcagaaatatccacttacttacttatccacagatcccgtccatttgcccatgtttggcacacctttaccggcgattgtgatagttttgggttacctgctgctgattttcaaagtgggacccgatttcatgagatctcgtaagccctacaatatgcgaaaagccatgttgatctacaacttctgtcaagttctaatgaattctggcatttttttaatggtgggcatttttagctaattgctatacctataaacaaaaaaattaatttcatatctctgtacttgcagggcacttactatctttttattaaaaaactatacgatttccgctgcatgaccatgctgtcctcggatcatccagataaagatgtcgatcgtttgttgacctacttttactttatcaacaaggtgatcgatctgatagacacgatattctttgtgctgagaaagagcaacaagcaaatcaccgtactccatgtataccatcatgtattcatggttttgggtgtgccattgacatactatttctacggacccggaggacaatacaacctgatgggatatctcaactcatttgtacatgtggtgatgtacgcctactatttcgcatctgcttggtatccaaacgtgaagagcacattttggtggaaagagtacatcaccaagctgcagttcctacagttcatgatcctcttcgcccaatctgtactgacattgtggctaaatcccggttgccgttttcccaaggtcctgcagtacgttcagctgggaggttccgtttccatgatgaccatgtttggaaacttttactatcaaacctatgtcaaagccaaaagtaaagagcagtgatttataaatacaatgcagttctctttacgcaattgagccggtctcaatcgagtgtactgagactgagcgttttattctgggtctctcattccgaaatgtaggacagacatcgcagttcaaatagctgaataatacattatgtgatttgatttggcttcatttcgttaaaacaaactggattgtttcaagactgctgaaacagtcgccagcggttcctcaaacaacaatcaaccatttaataatgctccgatacttgcgcatacctcaagcgggtaagttcggcaatgtgctgattactacaagtatatcacttctttgaaatactcaacagatcctaacccaattccgctggctggatcaccatggcctatcacactgattttgatagcatatctgttgtttgtccttaaattgggcaagatctttatgagaaaccggaaaccatatgatttgaaaacggtcttgaaggtctacaatctatttcaggtgctatacaatggtctctacttcggaatggtaagttggatgacttgttacaatctttttgaaattaaaaagtgtgttcctttatttttcaggttttttattatctcttcatcgtgggcatttgcaatctgcactgcatagaaagctttcccgagggccatgaacgcaaacaattggaacgagtattgcatgccgcatatctgctgaacaaggtcctcgatcttatggatacggtgttctttgtgctgcgaaagagctataagcagatcaccttcctgcacatatatcaccacgtgttcatgtcctttggaagttatgccctaacccgttactatggaactggaggccatgtcaatgccgttggactgctgaactccttggtgcacacggtcatgtatttctactactttctgtcttcagaatatcccggagtgagggccaatatctggtggaagaagtatataacattgacacagctctgccagttcttcatgctgctcagttatgccatcta

SEQ ID NO: 26270 - DNA, 789 bp, DROSOPHILA
atgaacttcacactattggatttattccgagggctgccggcagatcccgtccatttgcccatgtttggcacacctttaccggcgattgtgatagttttgggttacctgctgctgattttcaaagtgggacccgatttcatgagatctcgtaagccctacaatatgcgaaaagccatgttgatctacaacttctgtcaagttctaatgaattctggcatttttttaatgggcacttactatctttttattaaaaaactatacgatttccgctgcatgaccatgctgtcctcggatcatccagataaagatgtcgatcgtttgttgacctacttttactttatcaacaaggtgatcgatctgatagacacgatattctttgtgctgagaaagagcaacaagcaaatcaccgtactccatgtataccatcatgtattcatggttttgggtgtgccattgacatactatttctacggacccggaggacaatacaacctgatgggatatctcaactcatttgtacatgtggtgatgtacgcctactatttcgcatctgcttggtatccaaacgtgaagagcacattttggtggaaagagtacatcaccaagctgcagttcctacagttcatgatcctcttcgcccaatctgtactgacattgtggctaaatcccggttgccgttttcccaaggtcctgcagtacgttcagctgggaggttccgtttccatgatgaccatgtttggaaacttttactatcaaacctatgtcaaagccaaaagtaaagagcagtga

SEQ ID NO: 26271 - protein, 262 aa, DROSOPHILA
MNFTLLDLFRGLPADPVHLPMFGTPLPAIVIVLGYLLLIFKVGPDFMRSRKPYNMRKAMLIYNFCQVLMNSGIFLMGTYYLFIKKLYDFRCMTMLSSDHPDKDVDRLLTYFYFINKVIDLIDTIFFVLRKSNKQITVLHVYHHVFMVLGVPLTYYFYGPGGQYNLMGYLNSFVHVVMYAYYFASAWYPNVKSTFWWKEYITKLQFLQFMILFAQSVLTLWLNPGCRFPKVLQYVQLGGSVSMMTMFGNFYYQTYVKAKSKEQ

SEQ ID NO: 26272 - DNA, 3903 bp, DROSOPHILA
cagagacatcaagctggtagagcgaaggcggaggaactcgacgacagcaaaccgaagctggcaccacgactgagccactggcagctggaggagggccaatacatcttaatcatatgcattaagacaccaaactttctaagccccaatccagtaccatgtactccgaatccctcgccggaatgcaagccaaagagtgtcgtcgggccctttgcattgcgtgtggttatattcttaaatgctaagctagtcaggatagggctcaggtcatattcaggttcaggtctgtttttccgataccttttgagaatctcaaaaatgtcttcttatcgaagatcaatccatttttacggttttaatacttttataaattctaatgacatgtttaggtgggaaatcgctgcaatattttcaagctaggtaaccagaaacaaattctactatttaatcatttccggctttgttttccccatttcctcaaaccactcttggcagtgtaaagggctgagcttcggttttccgaagctgaaagatacaaactttaccgatacccattttatacaagtcgccccaccatcctcacactcggacttagcgtagtgattaagaatagcattcccgcgaaggtaattacatttaatcagtgtcatatttctaagcatgcaggaaacgttacatgttagagagcagcactaggtgcacccatccagcttaagtagatgcagctcgcacaccaactgagaatcacaagcagtgcgtttcgggactgtaagagcaatgcaatgcaaaataaagagatcgattttatttgattgtcgaacccgttttaaagttccccaacatttggccttactcgatggaaattaaactcgcgttgcgccagcggtcttacagttctgaatcccactgtaccagcgctattgccgcacatagtcgataagtcaacctgccaagctccctaaggaccctccccttagttcccaactccagtagcagttaaattagtgataacgttgctaaaatatatttgagagcatgtaagattaatacaagtacgagcatacttatatttaatgttttacagaattacattacaaatatagaataatgtttcaagaatttctagtactttgcggatttgtaatcgggttcatcgccaccagcaccgccgcctccaccgtcctttggcagttttcgcttttgaatgattgtctaaatggcaaagaaaaataaatattttgtattgatcatcgacgaatcctttgggatatacatacctgaatcttttgccactccctatcgagctcggccttctcgttcttctccgtcttgttcttgcgcgtcttgcgaccgtcctgcatcttgaccccgtactggaaggctgccttgggcagcgcctccttcgtgctcatgtagtcggagtactcctcctgcgtgtcaaagtcccagcgtccaatgggcccctttttattgcccaaatccatcttggtgtaatccacctcatcgtccgagtcgtcgatggcgtcgttcatctcctccagcccgggatagcattctgcgtatccctcgggttcagcgaaccgtgcggccatggccttcgatatcttgggtggcgggggaatactggatattatcggctcctctgatgcctccggcgggccgtctccaaagtaggacggggcggacttgccttgctcctggcggtttcgctcaggtcgcgtggcagaaggttggtagtcccctatatcgtcgtagatattatcgcccaagggagctgatttccctcccatgttcgatgaggacgaggtggcgtgccgactggagccaccattgctagacgacccacgaagattttccacctccttttcgtagaacagcggtttgtccttgtcgcgctttttgttcttcttgttgcgaccaccggcacgtagatagctcaggatttgggacagcttgttgatcacaatgtcattggtggtcagcgtggcaacatcctcttgtgacaccggcacctcgaacttggagcgcttcagtgtggttggaatatccgactcccctagctcgtcatccaggtcgatcacataggccatccgtcctggagcaaatagctcattgcggggaacttctttcgaacgccttgcctgcactagattgtaaatattgcgcgctagtgcaccattgattgcattaatatcctccgactcgcggcgttccgcttccaattgctcagcggcggcagctgcttcggcgagcttttcccttgccacagcggcggcaatctcctcctcttccgcttccttcgagtgcagctcggagcgcactttttgcagaagggcgtaatcaagacccttcaccaaatgcgtatgctggatgtctccacccaagaacttggactcctgaatgatacgtcttcttcgctcctgggcatcgattccggatttcatatctggcgctacagctcgatacgcattggtgctgcttccgtgtcccggcgtgctcacgttcacgtaatctggattggcaccatcgcgtcgttctcgtgctcggtccctgtacttctcggacagctcttgcagcttcacatcctcctgcttcttgagcgccgcatagaagttctttttcttgcgacgcagatcattccgctcgctgctgctctgacccttcttcttttcgccactcaatcctgtcgtgccgggggcggtggagggcgtggcaaaggtagcagtggccagagatcctccagcggaggtgctgctcgtcccggagccaggaggaggagctcggggcgtcgctagcagcttgcggaagtcatcgttggttagtcgcaccgaaggcggtgcttccaagtgggcatccgacatggcgaagaaaattcgaagaaaactcgcagagaaaatctatatttacaaattgtgcttcttcttggttttgcctgccagggttggctgtgtttttgatttttctccgtactgtaatcgataacatgtttacagtgatggaagattagcgtttttagcgttttttccgaataattacgaatatttgaaaatcgattccacatttagcatcactgtttctcataatgtattgttattattgttaaactacaaatggagcagtttcttaaaggtctgcccaaagtagagctccatgctcacctcaacggttccttgggcatcaaaagcctatgtgatcttggcgagcgattgtatggaacctcttgtaaagatttcctgaagttgtgcgcgcacttcagccgatttgaaaaggatatggatgcatgcttcgagaagtttgcatttgtgcacgagttgacctccacccgggagggtctgcgatttgccacggagttggcgattcgagatttcgctgaggacaacgtccagtatgtggaaatgaggaccactcctaaggcaaacgagaactattcacgcagggactacctgcagatcgtgatcgatgcaattaaggcagctagcgaaacgtatccagagataacagtcaagctactgccctccatcaatcgagcggaaccagtggacgtggctgaggaaacagtttccctggctgtggagttggcacgggctcatccaaatcttatcttaggcatcgatcttagcggtaatccagggaaggggcggttttccgactttgctcctattcttgcacaggcccgggataagggtctgaagttagctatacactgcgccgagatcgagaatccatcggaggtaaaggaaatgctgcactttggaatgtcccgctgtggacatggaacttttcttactcccgaggacattgggcagcttaaacaacgaaatattgccattgaatgctgcctcactagtaatgttaagtcgggaacagtgcccagcttggaggagcaccacttgaaaagaatcatgg

SEQ ID NO: 26273 - DNA, 1838 bp, DROSOPHILA
taaatatagattttctctgcgagttttcttcgaattttcttcgccatgtcggatgcccacttggaagcaccgccttcggtgcgactaaccaacgatgacttccgcaagctgctagcgacgccccgagctcctcctcctggctccgggacgagcagcacctccgctggaggatctctggccactgctacctttgccacgccctccaccgcccccggcacgacaggattgagtggcgaaaagaagaagggtcagagcagcagcgagcggaatgatctgcgtcgcaagaaaaagaacttctatgcggcgctcaagaagcaggaggatgtgaagctgcaagagctgtccgagaagtacagggaccgagcacgagaacgacgcgatggtgccaatccagattacgtgaacgtgagcacgccgggacacggaagcagcaccaatgcgtatcgagctgtagcgccagatatgaaatccggaatcgatgcccaggagcgaagaagacgtatcattcaggagtccaagttcttgggtggagacatccagcatacgcatttggtgaagggtcttgattacgcccttctgcaaaaagtgcgctccgagctgcactcgaaggaagcggaagaggaggagattgccgccgctgtggcaagggaaaagctcgccgaagcagctgccgccgctgagcaattggaagcggaacgccgcgagtcggaggatattaatgcaatcaatggtgcactagcgcgcaatatttacaatctagtgcaggcaaggcgttcgaaagaagttccccgcaatgagctatttgctccaggacggatggcctatgtgatcgacctggatgacgagctaggggagtcggatattccaaccacactgaagcgctccaagttcgaggtgccggtgtcacaagaggatgttgccacgctgaccaccaatgacattgtgatcaacaagctgtcccaaatcctgagctatctacgtgccggtggtcgcaacaagaagaacaaaaagcgcgacaaggacaaaccgctgttctacgaaaaggaggtggaaaatcttcgtgggtcgtctagcaatggtggctccagtcggcacgccacctcgtcctcatcgaacatgggagggaaatcagctcccttgggcgataatatctacgacgatataggggactaccaaccttctgccacgcgacctgagcgaaaccgccaggagcaaggcaagtccgccccgtcctactttggagacggcccgccggaggcatcagaggagccgataatatccagtattcccccgccacccaagatatcgaaggccatggccgcacggttcgctgaacccgagggatacgcagaatgctatcccgggctggaggagatgaacgacgccatcgacgactcggacgatgaggtggattacaccaagatggatttgggcaataaaaaggggcccattggacgctgggactttgacacgcaggaggagtactccgactacatgagcacgaaggaggcgctgcccaaggcagccttccagtacggggtcaagatgcaggacggtcgcaagacgcgcaagaacaagacggagaagaacgagaaggccgagctcgatagggagtggcaaaagattcagacaatcattcaaaagcgaaaactgccaaaggacggtggaggcggcggtgctggtggcgatgaacccgattacaaatccgcaaagtactagaaattcttgaaacattattctatatttgtaatgtaattctgtaaaacattaaatataagtatgctcgtacttgtattaatcttacatgctctcaaatatattttagcaacgttatcact

SEQ ID NO: 26274 - protein, 557 aa, DROSOPHILA
MSDAHLEAPPSVRLTNDDFRKLLATPRAPPPGSGTSSTSAGGSLATATFATPSTAPGTTGLSGEKKKGQSSSERNDLRRKKKNFYAALKKQEDVKLQELSEKYRDRARERRDGANPDYVNVSTPGHGSSTNAYRAVAPDMKSGIDAQERRRRIIQESKFLGGDIQHTHLVKGLDYALLQKVRSELHSKEAEEEEIAAAVAREKLAEAAAAAEQLEAERRESEDINAINGALARNIYNLVQARRSKEVPRNELFAPGRMAYVIDLDDELGESDIPTTLKRSKFEVPVSQEDVATLTTNDIVINKLSQILSYLRAGGRNKKNKKRDKDKPLFYEKEVENLRGSSSNGGSSRHATSSSSNMGGKSAPLGDNIYDDIGDYQPSATRPERNRQEQGKSAPSYFGDGPPEASEEPIISSIPPPPKISKAMAARFAEPEGYAECYPGLEEMNDAIDDSDDEVDYTKMDLGNKKGPIGRWDFDTQEEYSDYMSTKEALPKAAFQYGVKMQDGRKTRKNKTEKNEKAELDREWQKIQTIIQKRKLPKDGGGGGAGGDEPDYKSAKY

SEQ ID NO: 26275 - DNA, 4415 bp, DROSOPHILA
aggaaatgcatctgatgcatataatatccatatatacatatatacagtatatttggatttatataatgaaaataaggctacagcaaagttatgatattatgttttagatctttctacttatttgaatacagaccatcgccatttagaggacaataaatataatctgcactttcccatcactgagcaaaccaaagttcacacccattctaaagagctatgtggcatatacgtactttacttttaacacgaatatcctattaatatggcatttgactcgctgttgcacgaggttcttcgtgatgactttctaattttaaatcaggccgaccgccgagccagcgtatcctggccacaatattgatagttgtgagtgacgtcagttgttcatgaggtcctttggtcgtcatgacgctttcgctttgaattccttcccatacatggaatagaggttgacctataggcaacatttttcggaggctcgaatgaagctatcccaggggaactctaagccacgcaccatttttcatgattactcggtcaaattcgtgaccataaaaatagaggggctactccgtatggtgtaagtaagtactattattgtatggctgggaatctattttgattgaatgcacgtcattaataatttcacaacccttgccttatttggttattttcgggggtaagtgcgtgctgattacgacgtttgtcggcctccattgtctttgattgacaatatcgtttagttagtgaaatacaagtgagattcaagaattgaagtaggcaattgacatttatttgtcttctacgttgcgtcatgagctcaaataagacgtctataggtcaatttctgtggcctcttatagcgacatgattagaaaactaaggaactaagtgctctggccagtcctcctttttgcaattgcttttctagtatatgtatttaaccaccaccatacgtttgacttaactaattagatcaacattcaccctaatctttcatttaacccagattgtcggcgatgatcacgtcgtctgtgtcacttttgcactgctgcagggcatccacttcgcagcagttggtcagccggttgaagaactctccctgggcgcactcgccgtcgatctgctggccatgaacgcaggtgaagtagccgcggcagttgtccgcatcccgggccagttgtccgtgctttccgttgcagactcccactctttccccgttctccaagagacaggttccatcactttgtcggcagatgcccaaaaggctgtcgaaactctcgccattgcgacatcgctgggaaacgggttcatcgtcctcgcaactggtatatcttcggcaatcaccctgttcagccacggatgcaccgtttccgatgactccacaaattccggcaaaagaggtgggtgcatccttgcagattccatttgtcactgccttttcatgaccaccaaggtctatctgtcgcgattgtaatggactttctgtctgattattcccatcagaggcaatctcatagggctgacactgctgcaatgtggcattgaagaagttatccgtatagcaaagctcatgccggagttttcccgaaacgcaaagataaaaattattacagttggccggatcgggcattagataaccatgtttgccctcgcaaactaccggatctggaggcacatgttggttattgggattgtcatcatcatcgggtactgattccaccagcggacaggacccgtcgtccgcaagacacagcagttgctcggaatcgaaaaaggtgcctgcagcgcatcgctgagcagtggccactcctccggcacaaataaagtaccgagtacagtccgtccgattggccagaaaggtgccgtcctgcaggtttccacacctataaacgtagctgacgtttccatccagctgaccgtttgaacacggctgtacggcctgtgattccggttcgcagatggatagcaccggattaaattgatgttggactggacactcaacgggtatagctagtcccttgacacaggcgtagtacaaattgcagtatagctcgtgaggtagtttaacgccatgaagaccgtagcacaatctgggagcagtttccgtttcatcttgattggaaacttttcgacactggccgtgatccactcggcaaattgaaagtaagctatggaaatactgaccctcatcgcattgcaccagactagttccattctggctggagcagctgtagtatgagcggcaatcctccggatgagccaccagcttgccatcttctagtccgttacaaatcgccaactggcaggaaccatcattcggtcggcagtatccttggttggagtcaaagaagctgccagatgagcagctctgcaggatggtgggcacttgttgcagacacaggtaaaatcgtgtgcaatctgtgggatcggggacacttagcccatcaatttgacccagacactggttttccgctgggagatcccttatctggagttggcactgtgactgtaactggcacttgttgcgattcctagcgaaactgtgccccttcagacagctacccagatgccattcctccgcctcgcagtacagaaatccctgagagcagttgttcccgaactgagcctggagttccccctcccggcagatgcgacgcattccattgtcttgacagcttccatcactgggcacgcagcccagcatgggctcaaactgttccctttcctggcagcgcctccttatccactggccattatccgagcacacttcgtagctgtggcaactgcccaccacggatctactctctccgttggagcagtttccactccgctccgccggcaggatacactgccccgcatcattgggcagacaatagttatgctcccgactgaagtacatgcccaagggacactggtgcagccaccaagagttgtccagacacattaggtagctctgacagccgcccgccaaggaaggacgcactgccaggtgctggcagtcgtctgaggaattaccagccaatttgctcatcgcccaactgcaaatagtttgattcctgtcctgctcatgaccccgcgggaaaggcaaacaggatcctatcaacggggagtagtagtgctgcttcggacagttgcgcagacgccatttgccaccggagcagcggaagtactgcatacaattgccacttttggcgggaatagtcatggattcgctgatggcggtgcaggtcggtatattcgatacccttgcgtaggcgcataccaagtcatctcgcggctccaggcatctttgctgctccggattgtagtatcgctggtcggagcaagtgcgtcgtcgccaacgaccatcgatgcacatctcgtactgggaacagttcgctggtaccgagcgcatttcattcgagatacaaatctggaacggaagaaaggaggtacattaaaggttttatttttaaccaaaataatctgtcccacacatcacatcacactttacatttggttagccgactaaataatatgccctttgaaccatagttctatcttcatttctgaaagaagcccatatccacatgttccattctataggcacacataataaaaagccgaaatgtttgtaattcatctattttgaatttattgtagcgcttatatggttagagtacattattgggtatttaatacgtatagaagtggaacaagcggaacattcacataaatcataactcataaataacaactaaggtcgtaggatagtgcatataagagtatatagaaagctagctcaaggctggcctagaagagttttgggaagaatttcttgaacaagttcagggaccttacgttttcctccgcctccacggaacgcttctggatgctatggctggtgcacatgccgaattccggagcgaagatctcgccctcaccgcacggatgataggtaacactaacgcgctgcagatcgtcacaggagcagaaaccggaattggtgttctcggcggcaaatggctcgaattggcttcgcttcaggcattccctcaggttgcacgatatcatggccatggtgtccttcagcaaacatataccctgggccttgtcaaagacgtgtcccgtctggcattgatggaaatagggcacaccgtcgcaggagcagaatccttctgtggtgttcttcgcctcgaagggttcgaaggcaactcggttcaaacagcttgtgtaatcacaggccgctaccacacaagttcctgcactctcctcgtaaacatgttcatccgcacaattgatgaaggtggaaacgccgacatcctggcagctgcaatatccactggtcgtattcactgccgcaaaagtggcatccacaacggcgcgactgtggcatcgtctgtcatcgcacaggccggaggcaatgatcttgg

SEQ ID NO: 26276 - DNA, 2415 bp, DROSOPHILA
atttgtatctcgaatgaaatgcgctcggtaccagcgaactgttcccagtacgagatgtgcatcgatggtcgttggcgacgacgcacttgctccgaccagcgatactacaatccggagcagcaaagatgcctggagccgcgagatgacttggtatgcgcctacgcaagggtatcgaatataccgacctgcaccgccatcagcgaatccatgactattcccgccaaaagtggcaattgtatgcagtacttccgctgctccggtggcaaatggcgtctgcgcaactgtccgaagcagcactactactccccgttgataggatcctgtttgcctttcccgcggggtcatgagcaggacaggaatcaaactatttgcagttgggcgatgagcaaattggctggtaattcctcagacgactgccagcacctggcagtgcgtccttccttggcgggcggctgtcagagctacctaatgtgtctggacaactcttggtggctgcaccagtgtcccttgggcatgtacttcagtcgggagcataactattgtctgcccaatgatgcggggcagtgtatcctgccggcggagcggagtggaaactgctccaacggagagagtagatccgtggtgggcagttgccacagctacgaagtgtgctcggataatggccagtggataaggaggcgctgccaggaaagggaacagtttgagcccatgctgggctgcgtgcccagtgatggaagctgtcaagacaatggaatgcgtcgcatctgccgggagggggaactccaggctcagttcgggaacaactgctctcagggatttctgtactgcgaggcggaggaatggcatctgggtagctgtctgaaggggcacagtttcgctaggaatcgcaacaagtgccagttacagtcacagtgccaactccagataagggatctcccagcggaaaaccagtgtctgggtcaaattgatgggctaagtgtccccgatcccacagattgcacacgattttacctgtgtctgcaacaagtgcccaccatcctgcagagctgctcatctggcagcttctttgactccaaccaaggatactgccgaccgaatgatggttcctgccagttggcgatttgtaacggactagaagatggcaagctggtggctcatccggaggattgccgctcatactacagctgctccagccagaatggaactagtctggtgcaatgcgatgagggtcagtatttccatagcttactttcaatttgccgagtggatcacggccagtgtcgaaaagtttccaatcaagatgaaacggaaactgctcccagattgtgctacggtcttcatggcgttaaactacctcacgagctatactgcaatttgtactacgcctgtgtcaagggactagctatacccgttgagtgtccagtccaacatcaatttaatccggtgctatccatctgcgaaccggaatcacaggccgtacagccgtgttcaaacggtcagctggatggaaacgtcagctacgtttataggtgtggaaacctgcaggacggcacctttctggccaatcggacggactgtactcggtactttatttgtgccggaggagtggccactgctcagcgatgcgctgcaggcacctttttcgattccgagcaactgctgtgtcttgcggacgacgggtcctgtccgctggtggaatcagtacccgatgatgatgacaatcccaataaccaacatgtgcctccagatccggtagtttgcgagggcaaacatggttatctaatgcccgatccggccaactgtaataatttttatctttgcgtttcgggaaaactccggcatgagctttgctatacggataacttcttcaatgccacattgcagcagtgtcagccctatgagattgcctctgatgggaataatcagacagaaagtccattacaatcgcgacagatagaccttggtggtcatgaaaaggcagtgacaaatggaatctgcaaggatgcacccacctcttttgccggaatttgtggagtcatcggaaacggtgcatccgtggctgaacagggtgattgccgaagatataccagttgcgaggacgatgaacccgtttcccagcgatgtcgcaatggcgagagtttcgacagccttttgggcatctgccgacaaagtgatggaacctgtctcttggagaacggggaaagagtgggagtctgcaacggaaagcacggacaactggcccgggatgcggacaactgccgcggctacttcacctgcgttcatggccagcagatcgacggcgagtgcgcccagggagagttcttcaaccggctgaccaactgctgcgaagtggatgccctgcagcagtgcaaaagtgacacagacgacgtgatcatcgccgacaatctgggttaa

SEQ ID NO: 26277 - protein, 798 aa, DROSOPHILA
MRSVPANCSQYEMCIDGRWRRRTCSDQRYYNPEQQRCLEPRDDLVCAYARVSNIPTCTAISESMTIPAKSGNCMQYFRCSGGKWRLRNCPKQHYYSPLIGSCLPFPRGHEQDRNQTICSWAMSKLAGNSSDDCQHLAVRPSLAGGCQSYLMCLDNSWWLHQCPLGMYFSREHNYCLPNDAGQCILPAERSGNCSNGESRSVVGSCHSYEVCSDNGQWIRRRCQEREQFEPMLGCVPSDGSCQDNGMRRICREGELQAQFGNNCSQGFLYCEAEEWHLGSCLKGHSFARNRNKCQLQSQCQLQIRDLPAENQCLGQIDGLSVPDPTDCTRFYLCLQQVPTILQSCSSGSFFDSNQGYCRPNDGSCQLAICNGLEDGKLVAHPEDCRSYYSCSSQNGTSLVQCDEGQYFHSLLSICRVDHGQCRKVSNQDETETAPRLCYGLHGVKLPHELYCNLYYACVKGLAIPVECPVQHQFNPVLSICEPESQAVQPCSNGQLDGNVSYVYRCGNLQDGTFLANRTDCTRYFICAGGVATAQRCAAGTFFDSEQLLCLADDGSCPLVESVPDDDDNPNNQHVPPDPVVCEGKHGYLMPDPANCNNFYLCVSGKLRHELCYTDNFFNATLQQCQPYEIASDGNNQTESPLQSRQIDLGGHEKAVTNGICKDAPTSFAGICGVIGNGASVAEQGDCRRYTSCEDDEPVSQRCRNGESFDSLLGICRQSDGTCLLENGERVGVCNGKHGQLARDADNCRGYFTCVHGQQIDGECAQGEFFNRLTNCCEVDALQQCKSDTDDVIIADNLG

SEQ ID NO: 26278 - DNA, 4017 bp, DROSOPHILA
gttcactttcacagaacggatttgcgttcaagacgtccttatgcgagggtaaaaatggtggactcttgcccatgtttggatcctgtaaaggatattacgtgtgtgctgatggaaacgctgtgaccggaacttgtgaaaagaatacgttgtttaatcctttaacgttgcactgcgatgatcctgacaatgtggattgcattttcgatggcaaggataatattgttgacgacacgtcaagttctgaaagcgacgaagacgatgatgaggaaatggccaaaactgatcctcccgttactgtcaaagcgacgaaaaagccgcgtcctacaacccttgacaaaatgtgtgctggcaagaaggatggagtgatgcttacaaagaacgggtcctgccaggaatattatgtctgcaaagcaaaaaagccccatctgcgctcttgtcctgacaaacaacattttagtccaactcgtcgcatttgcatgaaggcctcagaagccaagtgttcgggtggaacccgagaaaataaagaatcagatggtcctgccaccacgggaggagtgtgttcagatgaaaaggaaaactctcttgttgctcatcgcagcgattgtggcaagtttatgctctgcagcaacatgatgtttttggtaatggactgcccaactggcctgcatttcaatatagccacatcacgatgcgattatcccaaaattgcaaaatgccagacgaagctaaatgaaagcaaatccaagtcaaagaaacctgtgcgcaagtcaaaaaaacgtcgattctaactatatttttttaagaccccaataaagtgcttgaattataataatttttaatagtccaaagcctaaacagagaaaatatagccacatcatatagtactaaaaataaggggaatattttctattctctgcttagaataagtagtttttatctatagaaaaacgaaaatcttttcgtttaatactctgctttaaatattgtttattgaaaccacttagcacttaacattatcgggccaatcgcaggatttgacctgcaaattgaacaaaagtccagaggaacaagtgaagttcacctcacactcgcactggcagactacataattagaactacaatctccgctggcatcggcgaacatggtaccatcccgctggccaacgcatcgtccgtggctctcgcaataagttcccgagggtccggcaatcggaccacttggcggtgcagatccatcgtcgcattgaacattttcgggataatcgcactgctctattattgaattgtattgcaggttgttggagcaccgctgctcatatttgttaccatttacgcactggtagaaggcggagcaatttttctccacgggccagatggaattgttgggcacatcgcagcagtcgggatcgcaggttttgggaatgcacacattctctgtgtcgacctcgcattccttcagtgtggtattgaagaactgcgtagcggagcacttcctggccacaaagactccgtttatgcactgtaggtatccggcgcagtccgcaggattcaccttaacctcattctcagtgcatgtcgttccatttccgttgcactgaccattatccacatcgcagacctctgactggctgttccagtagtaaccactgtcgcaggacttggtcacatacttgccaccggaacagatctcatacatggtacagtcggccaagggttttgtagatccctctttacaattgacacatattccctcgtcgtcttgtacacaagtctccagtgtggcattgaagtaagctccgtcggcgcactgcttgctcacccagttaccgttcgagcaagccaagtagcctgcgcaattggtggggtccaccttaagttcgccatcagtgcatgtcgttccatttccattgcactgaccattatccacatcgcagacctctgattggctgttccagtagtaaccactgtcgcaggacttggtcacatacttgccaccggaacagatctcatacatggtacagtcggccaagggttttgtagatccctctttacaattgacacatattccctcgtcgtcttgtacacaagtctccagagtgacattgaagtaagctccgtcggcgcactgcttgctcacccagttaccgttcgagcaagccaagtagcctgcgcaattggtggggtccaccttaagttcgccatcagtgcatgtcgttccatttccattgcactgaccattatccacatcgcagacctctgattggctgttccagtagtaaccactgtcgcaggacttggtcacatacttgccaccggaacagatctcatacatggtacagtcggccaagggttttgtagatccctctttacaattgacgcatattccctcgtcgtcttgtacacaagtctccagtatggcattgaagtaagctccgtcagcgcactgcttgctcacccagttaccgttcgagcaagccaagtagcctgcgcaattggtggggtccaccttaagttcgccatcagtgcatgtcgttccatttccgttgcacacgccgcaggtatcttcaacgcaccgatttagggtcgaattgaagtaatcgccatctggacaggtcaggatcactatgattccgtccacgcactctaaatagccggcacagtcatctggattcggtgtaatttctccatccacacaggttggaggtctgcattgaccatcatccacgacacagatatttaactccgaattccaataggatccgcttgcacacgacttggatacaaattcgccgtgacagcagatcagatacttggtacaatcatccgcatccacttttgtgtcgccctccgagcagcacacagcacttgacgatcccataaagagggaaattattaggcacagggccactcctgggtaaaaaccgcggatcaacaatcatcctcccaattatcattgctccgtccttaccatagtgtttagttctggattgggccatctttgcactctgcgtatcgaatgctcactgatgaatcttcgctcgaagatatcgccttttatatttaccggcaattaaaataattgaatgtctcttcctgcatcagagcatgtggcggtgataatgtcgaaacatccgtgatactatcagcatatatatacagtagtaatacaagcaatcgatattgtcactatttataaaactcagcggttcattgtgaatccgcgaaatcaaagagtccaaaagaaattattcttcagttgctataagatgctcatatatgagaagtcttaacgatcgattgaaattgaaatttcaatgcgccatagtgcatatatgtataaagaagaacaactactgataggtacttacctatgtgaactaactattttgaagctttatattgtgatagcagtggttggaccagctacaaattcctacaggaaacataccccttctttattaaaaaaaaaaaaatgggtatttatgttcgataagctcttgccaatctcattgagtgccgacacctgttggcatattcccgccacaaaactgattaaaatgatttactgatccaatgtttcattaataaatgggcagattaggctacatcctagtagtagtagttgctttgataatcactttctttatttgccaatcggtcatttaaagagtgcaggtcacttggttcttataattgcaggtctgcaagctttcgtcccaatacaagccatcggcgcactccatctcgacctcgcattcacactggcagacgacgtaattgctacaatttgtggtggactttaagtaggtaccctcacgttgtcccatgcaacggccattactctcgcaggcgattcccgaaggtcctgcattgggaccagagggtggggtatactcccacgggcaaacatagtcctgggggtattcacattcttcggtatttgggttgtagaccaagttgttcggacaatattgctcgacggcgcagttgaagttacacttgtagaacatgttgcac

SEQ ID NO: 26279 - DNA, 1959 bp, DROSOPHILA
ttcgatacgcagagtgcaaagatggcccaatccagaactaaacactatggagtggccctgtgcctaataatttccctctttatgggatcgtcaagtgctgtgtgctgctcggagggcgacacaaaagtggatgcggatgattgtaccaagtatctgatctgctgtcacggcgaatttgtatccaagtcgtgtgcaagcggatcctattggaattcggagttaaatatctgtgtcgtggatgatggtcaatgcagacctccaacctgtgtggatggagaaattacaccgaatccagatgactgtgccggctatttagagtgcgtggacggaatcatagtgatcctgacctgtccagatggcgattacttcaattcgaccctaaatcggtgcgttgaagatacctgcggcgtgtgcaacggaaatggaacgacatgcactgatggcgaacttaaggtggaccccaccaattgcgcaggctacttggcttgctcgaacggtaactgggtgagcaagcagtgcgctgacggagcttacttcaatgccatactggagacttgtgtacaagacgacgagggaatatgcgtcaattgtaaagagggatctacaaaacccttggccgactgtaccatgtatgagatctgttccggtggcaagtatgtgaccaagtcctgcgacagtggttactactggaacagccaatcagaggtctgcgatgtggataatggtcagtgcaatggaaatggaacgacatgcactgatggcgaacttaaggtggaccccaccaattgcgcaggctacttggcttgctcgaacggtaactgggtgagcaagcagtgcgccgacggagcttacttcaatgtcactctggagacttgtgtacaagacgacgagggaatatgtgtcaattgtaaagagggatctacaaaacccttggccgactgtaccatgtatgagatctgttccggtggcaagtatgtgaccaagtcctgcgacagtggttactactggaacagccaatcagaggtctgcgatgtggataatggtcagtgcaatggaaatggaacgacatgcactgatggcgaacttaaggtggaccccaccaattgcgcaggctacttggcttgctcgaacggtaactgggtgagcaagcagtgcgccgacggagcttacttcaatgccacactggagacttgtgtacaagacgacgagggaatatgtgtcaattgtaaagagggatctacaaaacccttggccgactgtaccatgtatgagatctgttccggtggcaagtatgtgaccaagtcctgcgacagtggttactactggaacagccagtcagaggtctgcgatgtggataatggtcagtgcaacggaaatggaacgacatgcactgagaatgaggttaaggtgaatcctgcggactgcgccggatacctacagtgcataaacggagtctttgtggccaggaagtgctccgctacgcagttcttcaataccacactgaaggaatgcgaggtcgacacagagaatgtgtgcattcccaaaacctgcgatcccgactgctgcgatgtgcccaacaattccatctggcccgtggagaaaaattgctccgccttctaccagtgcgtaaatggtaacaaatatgagcagcggtgctccaacaacctgcaatacaattcaataatagagcagtgcgattatcccgaaaatgttcaatgcgacgatggatctgcaccgccaagtggtccgattgccggaccctcgggaacttattgcgagagccacggacgatgcgttggccagcgggatggtaccatgttcgccgatgccagcggagattgtagttctaattatgtagtctgccagtgcgagtgtgaggtgaacttcacttgttcctctggacttttgttcaatttgcaggtcaaatcctgcgattggcccgataatgttaagtgctaa

SEQ ID NO: 26280 - protein, 645 aa, DROSOPHILA
MAQSRTKHYGVALCLIISLFMGSSSAVCCSEGDTKVDADDCTKYLICCHGEFVSKSCASGSYWNSELNICVVDDGQCRPPTCVDGEITPNPDDCAGYLECVDGIIVILTCPDGDYFNSTLNRCVEDTCGVCNGNGTTCTDGELKVDPTNCAGYLACSNGNWVSKQCADGAYFNAILETCVQDDEGICVNCKEGSTKPLADCTMYEICSGGKYVTKSCDSGYYWNSQSEVCDVDNGQCNGNGTTCTDGELKVDPTNCAGYLACSNGNWVSKQCADGAYFNVTLETCVQDDEGICVNCKEGSTKPLADCTMYEICSGGKYVTKSCDSGYYWNSQSEVCDVDNGQCNGNGTTCTDGELKVDPTNCAGYLACSNGNWVSKQCADGAYFNATLETCVQDDEGICVNCKEGSTKPLADCTMYEICSGGKYVTKSCDSGYYWNSQSEVCDVDNGQCNGNGTTCTENEVKVNPADCAGYLQCINGVFVARKCSATQFFNTTLKECEVDTENVCIPKTCDPDCCDVPNNSIWPVEKNCSAFYQCVNGNKYEQRCSNNLQYNSIIEQCDYPENVQCDDGSAPPSGPIAGPSGTYCESHGRCVGQRDGTMFADASGDCSSNYVVCQCECEVNFTCSSGLLFNLQVKSCDWPDNVKC

SEQ ID NO: 26281 - DNA, 3358 bp, DROSOPHILA
cgtagtacttggcccagtcgttgtagaactttacaagaaatttaatagtgtctttctatcccattaaccggtatccgatgcggaaggacgcgaatccattttgaatccgcatcggtttcccattgacgccacaacatagttaagtcctatttgtaagctttaatggcaataaacatacgatggctaaaaaaaaataatggttcactgagctggtgggaactacagttactccttgacccgctccacctcgctggcgtcgaagggcacctcctccaccttgtggaatccagagaacctgatgatcttgccggtcccctcgaccttcaggtgcttggcgaactgttgggccggcgaaagggccatctcctcctccgtcttgtagccgtagtacttggcccagtcgttgcgtccggtgtagaccatatagcaaacgaggccgaatgcctgccaggccagaacggcgtacccgatgctcaggcgccgcttccacagctccgcccggtgctccggtatgggattcgtgttgcgccgcacccagcggcgcagccacttcatctcgaacagtgccattgtgtgcttatgtgctgctataactaagttcgttatgtaaagatgcaaaatgtaaacaagcgactgcagctggcagccaaagttgccacactgttcaaatccaccaaatggttcgaaccaaggatgcaagaaactaattatttgaaaacaaaataaagttaagcttattttacaagccaaagcgaagtcacttctaatatgtgttttgcagatgcgataatgccctgtgcctcatttccacgtttttaattcaggaaaagtgcacgttaaagctaaatgaaaaccaagacgtatgagaatcattattgtagcgaaatctttggacgaaagcgcgagcgacttgaattcccgctgaccgcctcagacggtagccgaatttggcggcaagctagccaaggtggcagcactgaaatggtcacagaacgaaaatgcaacttcgatcggggcatataaaaccagtgcttccaatccgaaggcaaagcataaaagatcagaacatcagtagccgaagattggctgagtagcacggacagcgggcaagtcctttgaaacgttggtagtttgcaaccgggtttgccaacttcctttggagttcagtggtgctcaactatcgacacaactatcctcggctttcgcaaaactcagtaaaccggtaaacttccgttcatacagttcacaattctaaatttaaaatagatctaacgcagacacattgacattcgaaaattgggattgaaaactcaagatgccgactacaccacaggatcttgcccttgcccactctcttgctcaaagacctccgaccgatagcagtgaggccaaggagcaggaggccggcgaatcggacaacctgcccaacctgtgcactttgtcgctggacgaactgaaacagctggacagggatcccgagttcttcgaggacttcatcgaggagatgtccgtggtgcagtacctgaacgaggagctcgattcaatgatggaccaggtggagattatatcaagtgagtaggtcacggcccgaggctggcaaatctacctaacccttctgtattccaatccaggagagaacgagtgcaagggcattcatctggtagagctgaagcgccgactcagcgacgattttacagctttaaaaaacctaggcgagaaatgcgaccggctgaacaagaagtacttcaagaagtcggatgaatacgcgcctcagcatatcagggtgagttcccttaaaaagccaatggcgtgggagttaccattcccatccgtaacttgcattccatttcccctgaaggagcttcttcagattgcagcttccaatgccgatggcgactgcgatcgtcacgtggagcacttcctgaacggaaagaccgacgtgcagactttcctcaacacgtaccagtggtcgaagaagatcagtaccgagcgcaaggccaaagaggagcgcctgggcacccagctcagtgctctggagcgggccggtatctaggattgccgtgacactccctggccgtgccatccagagcacggtcctcccactcctcgcactcctcccacaccgccacgatccgcgtcgcaatagtagagaatatcaatgttagtaaatagagaagttaagccagagatggggcgacataatcatggcacacacggccacgcattcccagaacagaaagcaaaaccttgttgaagtaataagaaggtgcactagttgttcgtttcccaagatcgtttacttgggaagagggtcttgttattctatccgtaccccgaaacgaagcactatgtgcaacagaacgcagtccggaatcgcatgtattacctatttactttttttccttttggttaatcgtgagccccatccatatattctctccatatatacatatatattaaaaaaaaactatgctttaaatgatgccgtctctttctatttaagggaaaggtttttcaaaacaatggtttttggaatgatttttgttttgatttgaataaaatcgaaccgcaaaggataacacaaccttattagtttgaaataattttattatattgaagaataataatgcttaataacagatatataaaatttcttttttcaacagtggcttgtgctagtatcttaatttagtttgcataagctaaaagcaattaaacaaacataactacgttttctccattattattcatatgtacatatattactaagcattccaattgttaaaatcgaaaacaatcgaaagtttcgttctacatcattcgttcgaaatatgaatgatccggttatcatggtatttttttggtattttagctatatagttcgccgatttatcggccgtacctcttccccgatctcggccagaagcggactgggccagttggctgatagtgctcgttcggctgccccgctgtcgcccttcccctcctccaccgaggtcaagtaatctcgagtgataagcggcagtgaactctcgtctctgcttctccattccacaagaaactataaataacagactacccacaagagactagtgcaattgcagcaatggcccaaacggaagtgctggtgttcggctcggccatcattgactttataaggtaggtgggcagagaaggctcgatcccaaggagaatcttacaaatacaacaccttttccagctacacgacccgtctaccgaaagccggagaaacgctccatgggcatcgctttcagattggctacggcggcaagggcgccaatcagtgtgtggctgccgcgcgccagggatcccgaacagctctggtggccaaactggg

SEQ ID NO: 26282 - DNA, 1179 bp, DROSOPHILA
gcaacttcgatcggggcatataaaaccagtgcttccaatccgaaggcaaagcataaaagatcagaacatcagtagccgaagattggctgagtagcacggacagcgggcaagtcctttgaaacgttggtagtttgcaaccgggtttgccaacttcctttggagttcagtggtgctcaactatcgacacaactatcctcggctttcgcaaaactcagtaaaccgatctaacgcagacacattgacattcgaaaattgggattgaaaactcaagatgccgactacaccacaggatcttgcccttgcccactctcttgctcaaagacctccgaccgatagcagtgaggccaaggagcaggaggccggcgaatcggacaacctgcccaacctgtgcactttgtcgctggacgaactgaaacagctggacagggatcccgagttcttcgaggacttcatcgaggagatgtccgtggtgcagtacctgaacgaggagctcgattcaatgatggaccaggtggagattatatcaagagagaacgagtgcaagggcattcatctggtagagctgaagcgccgactcagcgacgattttacagctttaaaaaacctaggcgagaaatgcgaccggctgaacaagaagtacttcaagaagtcggatgaatacgcgcctcagcatatcagggagcttcttcagattgcagcttccaatgccgatggcgactgcgatcgtcacgtggagcacttcctgaacggaaagaccgacgtgcagactttcctcaacacgtaccagtggtcgaagaagatcagtaccgagcgcaaggccaaagaggagcgcctgggcacccagctcagtgctctggagcgggccggtatctaggattgccgtgacactccctggccgtgccatccagagcacggtcctcccactcctcgcactcctcccacaccgccacgatccgcgtcgcaatagtagagaatatcaatgttagtaaatagagaagttaagccagagatggggcgacataatcatggcacacacggccacgcattcccagaacagaaagcaaaaccttgttgaagtaataagaaggtgcactagttgttcgtttcccaagatcgtttacttgggaagagggtcttgttattctatccgtaccccgaaacgaagcactatgtgcaaca

SEQ ID NO: 26283 - protein, 200 aa, DROSOPHILA
MPTTPQDLALAHSLAQRPPTDSSEAKEQEAGESDNLPNLCTLSLDELKQLDRDPEFFEDFIEEMSVVQYLNEELDSMMDQVEIISRENECKGIHLVELKRRLSDDFTALKNLGEKCDRLNKKYFKKSDEYAPQHIRELLQIAASNADGDCDRHVEHFLNGKTDVQTFLNTYQWSKKISTERKAKEERLGTQLSALERAGI

SEQ ID NO: 26284 - DNA, 3722 bp, DROSOPHILA
ggggctggagacgccttcattggggccttggcccacaacttggcccgtcatccaacgaggaaactggaggagcacatagccgccgcctgtgccgtggcctcgcaatccgttcagctacccgggacgcagtcgagcttcccacacgcttagagggaaatccccaaaagaatgcaacgcaacaataaatctctatcctgacgtacaatgatctatttaatggtaatcgtaagtataaaaagattatggtccacatgggtgtgcttcggctggcaattcagcgtccagaatccagtgggttgcggactacagatggaggcgtggcagcttcacttctttcccgacttcttgatgccgcctcctacgagaggacccttctttgaggcgttcgccttggccgcctccagagccttctgctgctccttctgcttttgcttgaaggccatgtcgtcctcgtccaggtctttggagtccttcttcggcgccttcagaggcttcttcttaccgccctcgcgtccagacatacttgctcgcttatactgcgtgggaggaaaaatctatgaaaatcgggttggattccacaacaaaaagtcacgcacctttttcacacgtttttccgatttccgctgcacgataaccacgagaacaatcgatagcttcgcgctttcgattggctgtgcgtgttatcggaactggacatatatttcaattaattgatgaaattataagaacaaatttatatgaaattataattatgttgtttctaaaaatcgcttctcgaagcgaacttaaagtcatccttaacagcaatgtgtaccagccaaaataaaaaaatgtcgattttgtcgatggaattttaatgacttttcggaaaaaaaaacatagataagttgaaaaatattaaaccactaactattcaactaattcaaaaggaagaggaatttaccatcgatttcttgagcgacctttacaaaagcgatgtatcgatgaaaaatcgattggaccagctcgtcgataaagttgttgtttgctccaggtttacttttaatttcaaattcaactaatatccgggattaagagtgtaaatcctgtcaggaaaaccatgctaaggccccagtcatcagtgcctgcgcctcagccgcctggcaagcgaaagaagcccgcggaactggaactgacctgcggatggcgcgactgccaggagatctgcactggcgagtggagcctgaacgggcatattggggatcatctggagcactatgcgaaggcccaggacgatcggggggcgcatgcggagcacacggagcatcaatgcacatggaactcctgcgatttccgcaccgaaaaccaggtggagtttgaacggcattcgtactaccacggctactacttgaacctgctcctgcaggggaagctggagtgcgatctgcatccggaaatccccgcctgcactgctccggcccgcctcatggagaagctgcccgctctgggccagaactttcgatgtggttggaccgactgtgagagggagttcgtttcgattgtggagttccaggaccacatcgttaagcacgccctattcgagtacgacatacagaagacgccggaagacgagcggcccaagacgatgtgcaactgggccatgtgccacaagcacatgggcaacaagtaccgcctcatcgagcacatcagtacccactccaacaagaagcaggtggcttgcttccactgcggcgaactgttccgcaccaagactacgctctttgatcaccttagacgccagccggaaaacaacagtgagtgcgagacttgctctttaaaaacacataaaaaaaacccttgctgccatatctatagccatacgttattcctgacaaaacccgcaatgatttaatttagtttacttaactacttggccaccctctaatctgttacagcaaacagcttccagtgcgcccaatgcttcaagttctttgccaccaagaagctgctgaagagccacgtggtgcgacacgttaactgctacaagtgcaccatgtgcgacatgacctgcagctcggccagctcgctgaccacccacattcggtaccgccacctcaaggacaaaccgctcaagtgtagtgagtgtgacacgcgctgcgttcgggagtcggatctggccaagcacgttcagattgtccactcgaagacggtgcaccagtgcgagcatcccgactgtcattattctgtacgcacctacacgcagatgcgacgggtaagccaccgttccccaaagctggattcctttctgccattcgctcgaccgcaagtaaccctcctgtttctcttacagcacttcctcgaggtgcacggcaacaatcccattctgtacgcctgccactgctgcgagcgcttcttcaagagcggcaagtcgctctccgctcaccttatgaagaagcacggcttccgcctgccttcgggccacaaaagattcacctaccgggtggacgagaacgggttctaccgcctcgagacgacgcgcctcgagagcttggaggtgacccagcaaatactgtcgccgcaggtgaacgactcgctagcgaaaccgggcacaggatcctgctacgagatcgtggatcccacaaataccgagttcgagcgcatcatcgtctcgaatgatccgaacgaggcgcagctgatgggtgaagtggtaatctccctgcccagcctagcagaggagctgtgaggaatagagccgcccggcagccaaccctttgatctcgtgtgccctttacattacattaagcatttagtcctacctagaacctagtgcgattggatgagatagcacccggggacgcgataccctgcccactgcacaaacaaaactaatcgtagtgtgtaaggatcaaggagtcagccactctgggaattgaataaaaaaactagcagcttaagggtgttgaattctgcagcacttataggagaaggccatttctcattgcttgtattgctgtcattgaatttttgctttatatttgtgaacttatttgtatttttattgtgcctcacttttttaatttcactaattagtatatcaatgttcaatatcagttttcatttacgtttcgcacctttgtattcggttcttactttaatagagtgtatgaaaactgaaaaactgccttcacttgttcgctggccatatattttaattctcctccatttaacattagatcgaatcctttaaccccaaagatgacacaagagtttcaagggctatttagttttagtaggttcgcaccgaaaaatccattgattccattgatcatattatcatatcgtacgtgcgcgcctgcttctctttgcccagaatttctataagtagctaataagtgacttgacttcatttcttaagttgtgtagcgaataaaaatgcagagaaaaacgaaatatacagatgatctatacaaacttaaaagatgatcagtatttaatgtgcttctacacaggaaagtatttcaacgtatgaaaaatgcttactacgcttgaatctttgaaatttggggaccgaccttggataactttagcactttaatcgctgctgtaaagccacacttctgtggcggctatcattaaactgagctcaattgaaagtgtagtccttctcttaggaagatgtatgtaggttacaacctatcatatctcgaactctttcactcagttttgcggccatttgtgaggtt

SEQ ID NO: 26285 - DNA, 1503 bp, DROSOPHILA
ccagctcgtcgataaagttgttgtttgctccaggtttacttttaatttcaaattcaactaatatccgggattaagagtgtaaatcctgtcaggaaaaccatgctaaggccccagtcatcagtgcctgcgcctcagccgcctggcaagcgaaagaagcccgcggaactggaactgacctgcggatggcgcgactgccaggagatctgcactggcgagtggagcctgaacgggcatattggggatcatctggagcactatgcgaaggcccaggacgatcggggggcgcatgcggagcacacggagcatcaatgcacatggaactcctgcgatttccgcaccgaaaaccaggtggagtttgaacggcattcgtactaccacggctactacttgaacctgctcctgcaggggaagctggagtgcgatctgcatccggaaatccccgcctgcactgctccggcccgcctcatggagaagctgcccgctctgggccagaactttcgatgtggttggaccgactgtgagagggagttcgtttcgattgtggagttccaggaccacatcgttaagcacgccctattcgagtacgacatacagaagacgccggaagacgagcggcccaagacgatgtgcaactgggccatgtgccacaagcacatgggcaacaagtaccgcctcatcgagcacatcagtacccactccaacaagaagcaggtggcttgcttccactgcggcgaactgttccgcaccaagactacgctctttgatcaccttagacgccagccggaaaacaacacaaacagcttccagtgcgcccaatgcttcaagttctttgccaccaagaagctgctgaagagccacgtggtgcgacacgttaactgctacaagtgcaccatgtgcgacatgacctgcagctcggccagctcgctgaccacccacattcggtaccgccacctcaaggacaaaccgctcaagtgtagtgagtgtgacacgcgctgcgttcgggagtcggatctggccaagcacgttcagattgtccactcgaagacggtgcaccagtgcgagcatcccgactgtcattattctgtacgcacctacacgcagatgcgacggcacttcctcgaggtgcacggcaacaatcccattctgtacgcctgccactgctgcgagcgcttcttcaagagcggcaagtcgctctccgctcaccttatgaagaagcacggcttccgcctgccttcgggccacaaaagattcacctaccgggtggacgagaacgggttctaccgcctcgagacgacgcgcctcgagagcttggaggtgacccagcaaatactgtcgccgcaggtgaacgactcgctagcgaaaccgggcacaggatcctgctacgagatcgtggatcccacaaataccgagttcgagcgcatcatcgtctcgaatgatccgaacgaggcgcagctgatgggtgaagtggtaatctccctgcccagcctagcagaggagctgtga

SEQ ID NO: 26286 - protein, 467 aa, DROSOPHILA
MLRPQSSVPAPQPPGKRKKPAELELTCGWRDCQEICTGEWSLNGHIGDHLEHYAKAQDDRGAHAEHTEHQCTWNSCDFRTENQVEFERHSYYHGYYLNLLLQGKLECDLHPEIPACTAPARLMEKLPALGQNFRCGWTDCEREFVSIVEFQDHIVKHALFEYDIQKTPEDERPKTMCNWAMCHKHMGNKYRLIEHISTHSNKKQVACFHCGELFRTKTTLFDHLRRQPENNTNSFQCAQCFKFFATKKLLKSHVVRHVNCYKCTMCDMTCSSASSLTTHIRYRHLKDKPLKCSECDTRCVRESDLAKHVQIVHSKTVHQCEHPDCHYSVRTYTQMRRHFLEVHGNNPILYACHCCERFFKSGKSLSAHLMKKHGFRLPSGHKRFTYRVDENGFYRLETTRLESLEVTQQILSPQVNDSLAKPGTGSCYEIVDPTNTEFERIIVSNDPNEAQLMGEVVISLPSLAEEL

SEQ ID NO: 26287 - DNA, 8012 bp, DROSOPHILA
cacgaattgctcggatctcaaagcatttcgattcctattccagccacatggcattagttctgagtccgcggagttggccatccaacaatggcaacttggccgcggaactgtattctttgatttctctcggaatgtgtgagtgtacgtttgtgtgtgccagccatatttcatcgagatcccaagcccaaacccaatcccgaaatcagaaccagtataacagaggcccgaaaagcaaaccaagacccttttagcctttgaacctttcgcacgcaggtagaaacgacatcgtcgtccgcttctctggtcttttgtcttcattcctgatctctcttggtcgtctattagcatttcaaattcccccaaatggccaaatggaaatgcctccaccatgcgtaagcctccacttccatctccatcctcaacatcgtagcggtcatcaggcggagctaagcgcattggggcagttatcagtctattagctgcaactataggttcttctcttgggggttctcgaagttggctttttgtataggcctaaagcttcaagtgtgggcagtgattatggtcagttcatttgtcactattacactgctaaaagcatttctataatttagactgtggttagaacatagaaatccatatatccacaacagtggatattgtaatttctttagtatgatttgattttcaccatgatgcagtttataaatactttacttattcctatctatttctttcagaattgccatggcccagctggaaggaggcaacatcagtgaaggacgctcgtagctcctcatagctttcttttcaacatccactcggagtggatccattaaccatgaaagccacgttggattcggtagtcgccagcgaaacgatgacgagggtaacattcactgggaaccacgagtcgaaggactttgcaatattccatcgatgccggagacgatccaacatcaaatcgctatattcgccacctgccctgcatccctcgcacatgctgcgaagtagcttactaattctactggcaatcgttctcctgggatcttcgcaggctgcctcacacgatcaggagagggagcgaaagctggaagtcttcgaaggcgttgccgtagactatcaaatcggttatataggagacttcggcggaatcgatagtggtccgccatacattattgtggcggaggcaggagtagaaacagatctcgccatagatcgggccactggagagatccgcacaaaggtcaaactggacagagaaactcgagcttcttatagtctagtggctattcccctgagtggtcgtaatattcgagtgctggtcacagttaaagatgagaatgacaatgcccccacgtttccacaaacctcgatgcacatagagtttccagaaaataccccaagggaggtaaagagaactcttcttccagcaagggatctggatctggaaccctacaacactcagagatataatatcgtgtcgggaaacgtaaatgacgcctttagattgtcgtcccaccgagaaagggacggtgtcctgtacttggatctgcagatcagtggttttttagatagagagaccacgccaggctacagccttttaattgaagctttagatggaggaacacccccgttgcgtggatttatgactgttaatattaccattcaggatgtaaatgacaatcaaccgatcttcaatcagagcaggtacttcgcaacggtgccagagaatgccactgtgggcaccagtgtcctgcaggtgtatgcatcagacacggatgccgatgagaatggtttggtggaatacgccatcaacagaagacagagcgacaaggagcaaatgtttcgcatagatccaagaacaggagcgatttacatcaataaagcactggatttcgagactaaggagctgcatgaacttgtggtggtggccaaggatcatggtgaacagccgctggagacaaccgcctttgtttccatcagagtcacagatgtaaatgacaatcaaccgactataaatgtgatcttcctgagtgacgatgcctctccaaaaatatcggagtcggcccaaccgggcgaattcgtggccagaatttcggtgcatgaccccgattcgaaaacggagtatgccaatgtgaatgtgacactcaatggaggagatggtcacttcgcgttgaccaccagggataacagtatttatttggttatagttcacctgccactggacagggagatagtttcaaattataccctgagtgttgtagccaccgataagggaactccgcccctgcacgcctccaaatcgatcttcctaaggattaccgatgtcaatgacaatccaccggagttcgagcaggacctctaccacgccaacgtcatggaggtggccgatccgggtacatcggtacttcaagttctagcccacgatcgagatgagggcctaaactcggctttgacatactcgctggccgaaacgcctgaaacccatgcccagtggtttcagattgacccacaaacgggcctgatcaccacccgatcgcatatcgattgcgaaacggagccggtgccgcagctaacggttgtcgctagggacggaggtgttccgcccctttcctccacagccacggtccttgttaccattcacgatgtaaacgacaacgaaccgatcttcgaccagagcttctacaacgtatccgtcgctgaaaacgaacccgtgggcaggtgcatactcaagctactgaacttggagccgtaataacctctatttcagccaacgatgtggacacttaccccgccctgacctaccgccttggcgcagagtctaccgtggatatagaaaacatgtccatctttgccttggatcgatatagcgggaagctcgttctaaaacgtcggctggactatgagctccagcaggagtatgaactcgacgtgattgcttcggatgcagcccatgaagctcgcactgttctaactgtgcgagtgaacgatgaaaacgacaatgcaccagtattcctggcccaacagcctccggcttactttgccattttgccagctatatccgagatcagtgagagtctttccgtggacttcgatctcctaactgtcaacgccactgacgcagactcggagggtaataactcaaaggttatttatatcattgaacctgcccaggagggcttcagtgtgcacccatcaaatggtgttgtgtctgttaatatgtctagattacagccggccgtatcctctagcggggattattttgtaagaattatagccaaggacgcaggaaaaccagctttgaaaagctcaacacttttgagagtacaggcaaatgacaacggttccggacgttcgcaattcctacagaaccaatatagggctcagataagcgaggcagctcctttgggatcggttgttctccagcttggacaagatgctctggatcaatccttagctatcattgctggaaatgaagaatccgcttttgagttgctccaatccaaagcaattgtcttggtcaagcccttggatagagaacgcaatgatctctacaaactgcgattggttttaagccatccacatggacctccacttatttcaagcttaaattcctcgtctggaatctcagtaatcataacaatcctggatgccaacgataacttcccaattttcgatcgaagcgctaaatatgaggctgagatcagcgaacttgctcctctgcggtactccatagcgcagttgcaggccattgatgccgatcaggaaaacaccccaaactcagaagtggtatacgacataacctctggcaatgatgagcatatgtttacgatagacttggtcaccggcgttctctttgtgaacaatcgcttggactacgattcgggggccaagagttacgagctaataatccgagcctgcgatagtcatcaccaaagaccactttgcagcttgcaaccctttcgattggaactccatgacgagaacgacaacgaacccaagttcccgctaactgaatatgttcacttcctggctgaaaacgagccggttggcagctccgtattccgtgctcatgccagtgatttggataagggacccttcgggcaattaaactacagcataggtcctgctcccagcgacgagagctcttggaaaatgttccgagttgattcggaaagtggtctcgttacatccgccttcgtattcgactatgagcaaagacagcgctatgacatggagctgctcgcctccgatatgggcggtaagaaggccagtgtggctgtgcgcgtagagattgagtcgagggatgagttcaccccgcagttcacagagcgcacctataggtttgtgctgccagccgccgtggccctaccccaaggctacgtggtgggtcaagtgactgccactgatagtgacagtggcccggacggacgagtggtctatcaactaagtgccccacactcgcatttcaaggtaaaccgtagcagcggggctgttctaatcaagaggaaactcaaactggatggcgacggagacggtaatctgtacatggatggtcgagatatcagtctagttatctcagcttcctcggggcgtcacaactccttatccagcatggctgttgtcgagattgccttggatcctttggcacatccaggcacaaacctggccagtgcaggtggttcgtcaagtggttccattggcgattgggcaattggtctactggtagcttttcttctagtcctctgcgctgccgccggaatctttctattcatccatatgagaagcagaaaaccgcgtaatgcggtcaagcctcatcttgccacggacaatgctggtgtgggcaataccaacagctatgtggaccccagtgctttcgacacgatccctataagaggaagcatatcgggcggtgctgcaggagcggcatctggtcaattcgctcctccgaagtacgacgagattcctccgtttggagctcatgctggcagctccggagcagctacaacctccgagttgtcgggctccgaacagtccggttccagtggccgaggctctgctgaggacgatggggaggatgaggagattcgtatgatcaacgagggaccactacatcaccgcaatggtggagctggggcaggcagcgatgatggccgaatttcggatatatctgtgcaaaacacccaggaatacttggctcgcctgggcatcgtagatcacgatcctagtggcgccggaggaggagcttccagtatggctggttcaagtcacccaatgcacttgtatcacgatgatgatgccacagcacggtcggatattacgaacctcatctatgccaaacttaatgatgtgacaggagctggttcagagataggaagcagtgcagacgacgcgggaaccactgcgggctccatcggaaccatcggaacggctataacccatggccatggggtgatgagcagttacggagaagttcctgttccagtaccggttgtggttggcggtagtaatgtgggtggttccctgagctccatagttcacagtgaggaggaattgactggcagctacaactgggattacctattggattggggaccgcaatatcagccacttgcgcatgtgttttccgaaatagcgagactgaaagatgacaccttatcggagcacagtggaagtggggcttcctcgtccgccaagagcaagcactcttcctcacattcctcagcaggagcaggaagcgtggtgctcaaaccaccaccctcagcaccaccgactcacataccaccccccctgctaaccaatgtggcaccaagggccattaacctgcctatgcgcttgccaccccatttgagcctggcccccgcccatttgcccagatcgcccattggtcatgaggcgagtggcagtttcagcacatcatcagcaatgtcaccttcgttctcgccctctctatcgccgttggcaacaagatcaccatccatttctcctctgggagcgggaccacccacgcacctgcctcatgtctcgttgccacgccacggtcatgcccctcagccaagtcagaggggaaatgtggggacacggatgtaatcgagcactggagctgtatatccatccatatagtattaattgagccaccccactcacccatacacccacacaaacacagaagcacacatcgatacactcacacttatttaaattgctgtatatataacatacattaccctctaagtaacgattgcggagcctatgtgccccactggaaagcccattatcgtattgcaaaacacattgtccttcgtggcgcacattacaaaaccaatcacttttaatttggctttaaaaatccaactaaccaacctaacccagttcctgtggggcaaggatgcactgcaatcgcagtaacgacaacaaagccaacaaagactctctgaaatgcgaggagcagcaggagccggaacagccatacgttgtaagcatttagagcctagaataacaaccgaactcgaaccgaatacactcgaatctgtttccgtagcttataagaatatataaactgtagctgtagcgtaggactaaactacttttatcggagcaaaccaagtgcacttaggcagcaggtcatccctgtttaaaggggatcagatccggctgcatctcacatttccattccaatccatatgacggtgagatgcgaaaaattgtaaaaagttgtttttagtaaccaatggggggaaaagaaaagaaacccttgtataaaactgaattgaaataacgaagcaaagaatgaaaacgaaatatatttaagtatttttttaggtataccctagttattagttattatatatgtacatgtaaagctatggatcatagtgtatgttcacttgtgtgtgatgctacttgtgtaattctttacgttctagcaaaaaactgtaaaaatgttaaacagtctaaggatccactatctgctaagccaatagtttgtattagctaaacgaaagcaagagaataaatatttaaataataaaaatctacattgaatttgtgaatgatttgctttcggcaacaagggaagggaagaactcacttggataggatttgctgtttcaatatgaatgtgttttttttttatatactcactaatattttggcaaatctgtatgagtgctgtgtaatagttggcaaaatgtgtaaactattgatctgtacgcaaacacacacacgaagtggagatctggacttctggtttcgggatgttaggatgctgcctctcggtttatccagacaccctacagacatccccatcttcgtctgagaaatctgcgtcctcaagccacaacaaccgagaaccgacatccactttgtcttcatttcaaagacgctgcatgaactcatttatttgtggctgatttctggtcagcaccacacctccaccttggaccttcactccacctacccgtgccatcgcccttgcctgtcctgtcgtcattatcattatttgccccagtcccaagtgccagcccaagatgcagcttgggacttgattctggggaccagttgagttatttccatttgccagacatcgactcgcggtcgtatcaattgcagcagatcaacaatactgcgctggaactgctgaaatttgttttccgctctgttcataccttcttgtacatcgggtgtatgagttgttgtgtctttcaactaaataataataataaaaaaaatgctaaacatgtaaactgaggtatatattgggtatttagagcttcgatcctcgaatagctttcccttctttttttggacttatttggcaggagcgcaagttctgtgctatcctcagtcgaaaggagggcatttaaatgctcgtggttattattagtagcagtcaattcacagtacagcgaatacaaataacgacgaagccacctggattggtatggatataccaagaatcgaggctaaggaacaaccagcaacgatgatgatgatgattatgattatgg

SEQ ID NO: 26288 - DNA, 11431 bp, DROSOPHILA
atgctgcgaagtagcttactaattctactggcaatcgttctcctgggatcttcgcaggctgcctcacacgatcaggagagggagcgaaagctggaagtcttcgaaggcgttgccgtagactatcaaatcggttatataggagacttcggcggaatcgatagtggtccgccatacattattgtggcggaggcaggagtagaaacagatctcgccatagatcgggccactggagagatccgcacaaaggtcaaactggacagagaaactcgagcttcttatagtctagtggctattcccctgagtggtcgtaatattcgagtgctggtcacagttaaagatgagaatgacaatgcccccacgtttccacaaacctcgatgcacatagagtttccagaaaataccccaagggaggtaaagagaactcttcttccagcaagggatctggatctggaaccctacaacactcagagatataatatcgtgtcgggaaacgtaaatgacgcctttagattgtcgtcccaccgagaaagggacggtgtcctgtacttggatctgcagatcagtggttttttagatagagagaccacgccaggctacagccttttaattgaagctttagatggaggaacacccccgttgcgtggatttatgactgttaatattaccattcaggatgtaaatgacaatcaaccgatcttcaatcagagcaggtacttcgcaacggtgccagagaatgccactgtgggcaccagtgtcctgcaggtgtatgcatcagacacggatgccgatgagaatggtttggtggaatacgccatcaacagaagacagagcgacaaggagcaaatgtttcgcatagatccaagaacaggagcgatttacatcaataaagcactggatttcgagactaaggagctgcatgaacttgtggtggtggccaaggatcatggtgaacagccgctggagacaaccgcctttgtttccatcagagtcacagatgtaaatgacaatcaaccgactataaatgtgatcttcctgagtgacgatgcctctccaaaaatatcggagtcggcccaaccgggcgaattcgtggccagaatttcggtgcatgaccccgattcgaaaacggagtatgccaatgtgaatgtgacactcaatggaggagatggtcacttcgcgttgaccaccagggataacagtatttatttggttatagttcacctgccactggacagggagatagtttcaaattataccctgagtgttgtagccaccgataagggaactccgcccctgcacgcctccaaatcgatcttcctaaggattaccgatgtcaatgacaatccaccggagttcgagcaggacctctaccacgccaacgtcatggaggtggccgatccgggtacatcggtacttcaagttctagcccacgatcgagatgagggcctaaactcggctttgacatactcgctggccgaaacgcctgaaacccatgcccagtggtttcagattgacccacaaacgggcctgatcaccacccgatcgcatatcgattgcgaaacggagccggtgccgcagctaacggttgtcgctagggacggaggtgttccgcccctttcctccacagccacggtccttgttaccattcacgatgtaaacgacaacgaaccgatcttcgaccagagcttctacaacgtatccgtcgctgaaaacgaacccgtgggcaggtgcatactcaaggtctctgcaagtgatccagattgcggagtaaatgccatggtgaactacaccatcggcgagggcttcaagcacctcaccgaattcgaggtgcgctccgcttctggcgagatttgcatagctggcgaacttgacttcgagcggaggagtagctatgaatttcccgtactggcaaccgatcgcgggggtctgagcactactgccatgattaaaatgcaattgacggacgtgaacgacaatcgtccggttttctatcccagggaatataaagtatcgctcagggaatccccgaaagcctcctcacaagcttcgagtactccgattgtcgctgtggtggccacagatccggattacggaaactttggccaggtctcatataggattgtggccggtaacgaggcgggcatcttccggattgatcgatccactggtgaaatattcgtggtccgtccggatatgctatccgttcgtacccaacccatgcacatgctaaatatatcggcgaccgatggcggtaatctaaggagcaatgccgacgccgtggtcttcttgagcatcatcgacgccatgcagcgaccgccgatcttcgaaaaggccagatacaattactatgtgaaggaggacattccgaggggcacggttgtgggttctgtgatagctgcgagtggagatgtcgcccatcgaagtccggttaggtattcgatatactcgggcgatcccgatggctattttagcatagaaaccaactctggaaacatacgtatagctaagcccctggatcatgaagcgaagtcccaggttctactcaacatccaagccaccttgggagaacctccggtttatggacacacacaggttaatatcgaagtggaggatgtcaacgataatgcacctgagttcgaggccagtatggttaggatttccgtaccggaaagtgcagagcttggagctccactatatgctgcacatgcccacgataaagattcgggaagcagtggtcaagttacatatagcctggtcaaggaatcggggaaaggactctttgccatcgacgcgagatctggccacttaattttgtcccaacacctagattacgagagctcccaacgacacaccctaattgtaaccgccacggatggtggagttcccagcctttcgacgaacttaaccatcttggtggatgtacaggatgtcaacgataaccctccagtttttgaaaaggacgagtattctgtgaatgtgtccgaatcgcgatcgatcaatgctcagattattcaagttaatgccagcgatctggacacgggcaacaatgccaggatcacctataggattgtcgatgccggagtggacaacgtcacgaactccattagtagctcagatgtgtcgcaacattttggcatatttccaaactccggctggatatatttgcgtgctcctctggatcgagagaccagggatcgctatcaactgacggttttggccacggacaatggcactcccgctgctcacgcaaaaacacgtgtcatagttcgtgttcttgatgccaacgataatgatcccaagttccagaaatctaaatacgaatttaggatagaggagaacctcaggagaggctccgttgtgggagtggtgaccgccagtgatctggatctgggtgagaatgccgccataagatacagcctgctgccgatcaactccagcttccaggtgcatcccgtcacaggagaaatttccacccgagagcctctggatcgagagctccgggagctgtacgaccttgtagtggaggcccgtgatcaaggaactccagtgagaagtgctcgcgtccctgtacgcatccacgtaagcgatgtcaacgataacgcacccgagatcgcagatccgcaggaggatgtggtgagcgtaagagaggagcaaccacccggaactgaagtggtgcgagttcgagccgtcgatcgggaccacgggcagaatgcctccattacatattcaattgtcaagggacgggactctgatgggcacggactgttcagcatcgatcccaccagcggagtgatccgaacccgagtggttttggatcacgaggaaaggagcatctatcgcctgggtgtggccgcctccgacggcggcaatccgcccagggagacggtacggatgttgcgggttgaagttttggatctgaacgacaaccgcccaacatttaccagttccagcttggtcttcagggtacgcgaggatgccgcccttggccatgtggtcggttccatcagtcccatcgaacgtccggcggatgtcgtcagaaatagcgtggaggagtccttcgaagatctgcgcgtcacctacactctaaatcccttgaccaaggacctgatcgaggctgccttcgacatcgatcggcattcgggaaacctggtcgtggctcgtctcttggacagagaggttcaatccgaatttaggttggaaattagggctttagataccactgctagtaataacccgcagagcagcgccatcacggttaagatcgaggtggccgatgtcaatgataatgcccctgaatggccacaggatcccatcgaccttcaggtgagcgaagccactccagttggcacaataatacacaactttacggccacggatgcggacacgggaaccaatggggacctacagtatcgattgatccgatacttcccccaactcaatgaaagccaagagcaggcaatgagtctttttagaatggattccctgacgggagcactcagtctgcaggctcctttggacttcgaggctgtgcaggagtaccttcttattgtccaggcactggatcaatcctcgaatgtaacagaaagactgcagacttcggtgaccgtgagattgcgaattctagatgccaacgaccatgccccgcactttgtttcacccaattcaagtggtggcaaaacggcatctcttttcataagtgatgcaactagaatcggagaggtcgtggcgcacattgtggccgttgatgaagattccggggacaatggacaacttacctacgaaatcacggggggcaatggggaaggccgctttagaatcaattcccaaacaggaataattgagctggttaagtccctgccaccggccaccgaggacgtggaaaaaggtggacggtttaatctaatcattggtgcaaaagatcatggtcaaccggagcccaagaaaagctctctaaatctgcaccttatcgttcaaggcagccacaataatccaccccgatttctgcaggctgtttatcgagccacaattttggagaacgttcctagcggaagtttcgtcctgcaagttacggcaaaatcactacatggtgcagaaaatgctaatttaagctatgaaattcctgctggcgtggcaaatgatctgttccacgtggactggcagaggggcatcattaccacacggggacagtttgaccgggagtcccaggcaagttatgtcctgcccgtctacgtacgggatgccaaccggcagtcgactttgtcctcttcagcggtgagaaagcaacgctcgtcggacagcatcggagatacatcgaatggccagcactttgatgtggccacaatttatataacggtaggagatgtcaacgacaactccccggaattccgaccagggtcatgttatggtctatcagtcccagagaacagtgaacccggtgtaattcacactgtggtggccagcgatctggatgaaggtccgaatgcggatcttatttacagtattacgggcggcaatttgggcaataagttcagcattgattctagttcaggagagctaagtgcccgacccttggatagagaacagcactctcggtacaccctgcagattcaggcctccgatcgggggcaaccgaagagccgtcaaggacactgcaacatcaccatattcgtcgaggatcagaacgacaatgccccgagattcaagctgagcaaatatactggcagtgtgcaggaggacgcaccactgggcaccagtgtggtgcagatcagtgcggtggatgcggatttgggcgtcaacgccagactcgtttactcgctggccaatgaaacgcaatggcagtttgccatcgacggccagagcggattaatcaccactgtgggaaaactggatcgcgagctgcaggcgagctacaacttcatggtattggccacggacggaggacgttatgaagtgagatcagctacggttccggtgcagatcaacgtgctggatattaatgacaacagacccattttcgagcgatatccctatataggccaggtcccagctctcatccaacctggccagactttgctgaaggttcaagccctagatgcagatttgggtgcgaatgccgagattgtgtattccctcaatgctgaaaattcagcagtaagtgccaagtttagaataaatccaagcactggtgccttgagtgcctctcagagtttggccagtgaatctgggaagcttttacacctggaggtcgttgccagggataagggaaatccgcctcaatccagcctgggcctcatagaacttctaataggggaagcaccgcaaggaactccagttcttaggttccagaatgagacctatcgagtaatgctcaaggagaattctccatcgggtacaagacttcttcaagtggttgcactgcgcagtgatggccgccggcaaaaggtgcaattctcatttggggctggtaatgaagatgggattttgtccttagactcactctcaggtgaaataagggtgaataagccccatttacttgattacgaccgcttctccacaccctcaatgtcagccttaagtcgtggcagagctctgcattatgaggaggaaatcgatgaatcatcagaggaggatccaaataatagcacccgatcgcaaagggccttgacgtcctcatctttcgccctgaccaacagccaacccaatgaaatacgtgtggtcttagttgcgcgcaccgcagatgctccattcctggccagctatgcggaactagtgattgagcttgaagacgagaacgacaatagcccaaagttttcgcaaaagcaatttgtggcaacggtttcagaaggaaacaacaagggaacctttgtggcacaagttcatgcattcgattcggatgcgggctccaacgcccgtctgcgatatcacatcgttgatggcaaccacgacaatgcattcgttattgaacccgccttcagtggcatagtgaggaccaacatagtgctggatcgggagattcgcgatatatataagctcaagataattgcaaccgatgagggagtgcctcaaatgactggcacggccacaataagagtgcagatcgtcgatgtgaatgacaaccagcccacttttccgccaaacaatctcgtcacagtcagtgaagctactgaacttggagccgtaataacctctatttcagccaacgatgtggacacttaccccgccctgacctaccgccttggcgcagagtctaccgtggatatagaaaacatgtccatctttgccttggatcgatatagcgggaagctcgttctaaaacgtcggctggactatgagctccagcaggagtatgaactcgacgtgattgcttcggatgcagcccatgaagctcgcactgttctaactgtgcgagtgaacgatgaaaacgacaatgcaccagtattcctggcccaacagcctccggcttactttgccattttgccagctatatccgagatcagtgagagtctttccgtggacttcgatctcctaactgtcaacgccactgacgcagactcggagggtaataactcaaaggttatttatatcattgaacctgcccaggagggcttcagtgtgcacccatcaaatggtgttgtgtctgttaatatgtctagattacagccggccgtatcctctagcggggattattttgtaagaattatagccaaggacgcaggaaaaccagctttgaaaagctcaacacttttgagagtacaggcaaatgacaacggttccggacgttcgcaattcctacagaaccaatatagggctcagataagcgaggcagctcctttgggatcggttgttctccagcttggacaagatgctctggatcaatccttagctatcattgctggaaatgaagaatccgcttttgagttgctccaatccaaagcaattgtcttggtcaagcccttggatagagaacgcaatgatctctacaaactgcgattggttttaagccatccacatggacctccacttatttcaagcttaaattcctcgtctggaatctcagtaatcataacaatcctggatgccaacgataacttcccaattttcgatcgaagcgctaaatatgaggctgagatcagcgaacttgctcctctgcggtactccatagcgcagttgcaggccattgatgccgatcaggaaaacaccccaaactcagaagtggtatacgacataacctctggcaatgatgagcatatgtttacgatagacttggtcaccggcgttctctttgtgaacaatcgcttggactacgattcgggggccaagagttacgagctaataatccgagcctgcgatagtcatcaccaaagaccactttgcagcttgcaaccctttcgattggaactccatgacgagaacgacaacgaacccaagttcccgctaactgaatatgttcacttcctggctgaaaacgagccggttggcagctccgtattccgtgctcatgccagtgatttggataagggacccttcgggcaattaaactacagcataggtcctgctcccagcgacgagagctcttggaaaatgttccgagttgattcggaaagtggtctcgttacatccgccttcgtattcgactatgagcaaagacagcgctatgacatggagctgctcgcctccgatatgggcggtaagaaggccagtgtggctgtgcgcgtagagattgagtcgagggatgagttcaccccgcagttcacagagcgcacctataggtttgtgctgccagccgccgtggccctaccccaaggctacgtggtgggtcaagtgactgccactgatagtgacagtggcccggacggacgagtggtctatcaactaagtgccccacactcgcatttcaaggtaaaccgtagcagcggggctgttctaatcaagaggaaactcaaactggatggcgacggagacggtaatctgtacatggatggtcgagatatcagtctagttatctcagcttcctcggggcgtcacaactccttatccagcatggctgttgtcgagattgccttggatcctttggcacatccaggcacaaacctggccagtgcaggtggttcgtcaagtggttccattggcgattgggcaattggtctactggtagcttttcttctagtcctctgcgctgccgccggaatctttctattcatccatatgagaagcagaaaaccgcgtaatgcggtcaagcctcatcttgccacggacaatgctggtgtgggcaataccaacagctatgtggaccccagtgctttcgacacgatccctataagaggaagcatatcgggcggtgctgcaggagcggcatctggtcaattcgctcctccgaagtacgacgagattcctccgtttggagctcatgctggcagctccggagcagctacaacctccgagttgtcgggctccgaacagtccggttccagtggccgaggctctgctgaggacgatggggaggatgaggagattcgtatgatcaacgagggaccactacatcaccgcaatggtggagctggggcaggcagcgatgatggccgaatttcggatatatctgtgcaaaacacccaggaatacttggctcgcctgggcatcgtagatcacgatcctagtggcgccggaggaggagcttccagtatggctggttcaagtcacccaatgcacttgtatcacgatgatgatgccacagcacggtcggatattacgaacctcatctatgccaaacttaatgatgtgacaggagctggttcagagataggaagcagtgcagacgacgcgggaaccactgcgggctccatcggaaccatcggaacggctataacccatggccatggggtgatgagcagttacggagaagttcctgttccagtaccggttgtggttggcggtagtaatgtgggtggttccctgagctccatagttcacagtgaggaggaattgactggcagctacaactgggattacctattggattggggaccgcaatatcagccacttgcgcatgtgttttccgaaatagcgagactgaaagatgacaccttatcggagcacagtggaagtggggcttcctcgtccgccaagagcaagcactcttcctcacattcctcagcaggagcaggaagcgtggtgctcaaaccaccaccctcagcaccaccgactcacataccaccccccctgctaaccaatgtggcaccaagggccattaacctgcctatgcgcttgccaccccatttgagcctggcccccgcccatttgcccagatcgcccattggtcatgaggcgagtggcagtttcagcacatcatcagcaatgtcaccttcgttctcgccctctctatcgccgttggcaacaagatcaccatccatttctcctctgggagcgggaccacccacgcacctgcctcatgtctcgttgccacgccacggtcatgcccctcagccaagtcagaggggaaatgtggggacacggatgtaatcgagcactggagctgtatatccatccatatagtattaattgagccaccccactcacccatacacccacacaaacacagaagcacacatcgatacactcacacttatttaaattgctgtatatataacatacattaccctctaagtaacgattgcggagcctatgtgccccactggaaagcccattatcgtattgcaaaacacattgtccttcgtggcgcacattacaaaaccaatcacttttaatttggctttaaaaatccaactaaccaacctaacccagttcctgtggggcaaggatgcactgcaatcgcagtaacgacaacaaagccaacaaagactctctgaaatgcgaggagcagcaggagccggaacagccatacgttgtaagcatttagagcctagaataacaaccgaactcgaaccgaatacactcgaatctgtttccgtagcttataagaatatataaactgtagctgtagcgtaggactaaactacttttatcggagcaaaccaagtgcacttaggcagcaggtcatccctgtttaaaggggatcagatccggctgcatctcacatttccattccaatccatatgacggtgagatgcgaaaaattgtaaaaagttgtttttagtaaccaatggggggaaaagaaaagaaacccttgtataaaactgaattgaaataacgaagcaaagaatgaaaacgaaatatatttaagtatttttttaggtataccctagttattagttattatatatgtacatgtaaagctatggatcatagtgtatgttcacttgtgtgtgatgctacttgtgtaattctttacgttctagcaaaaaactgtaaaaatgttaaacagtctaaggatccactatctgctaagccaatagtttgtattagctaaacgaaagcaaga

SEQ ID NO: 26289 - protein, 3503 aa, DROSOPHILA
MLRSSLLILLAIVLLGSSQAASHDQERERKLEVFEGVAVDYQIGYIGDFGGIDSGPPYIIVAEAGVETDLAIDRATGEIRTKVKLDRETRASYSLVAIPLSGRNIRVLVTVKDENDNAPTFPQTSMHIEFPENTPREVKRTLLPARDLDLEPYNTQRYNIVSGNVNDAFRLSSHRERDGVLYLDLQISGFLDRETTPGYSLLIEALDGGTPPLRGFMTVNITIQDVNDNQPIFNQSRYFATVPENATVGTSVLQVYASDTDADENGLVEYAINRRQSDKEQMFRIDPRTGAIYINKALDFETKELHELVVVAKDHGEQPLETTAFVSIRVTDVNDNQPTINVIFLSDDASPKISESAQPGEFVARISVHDPDSKTEYANVNVTLNGGDGHFALTTRDNSIYLVIVHLPLDREIVSNYTLSVVATDKGTPPLHASKSIFLRITDVNDNPPEFEQDLYHANVMEVADPGTSVLQVLAHDRDEGLNSALTYSLAETPETHAQWFQIDPQTGLITTRSHIDCETEPVPQLTVVARDGGVPPLSSTATVLVTIHDVNDNEPIFDQSFYNVSVAENEPVGRCILKVSASDPDCGVNAMVNYTIGEGFKHLTEFEVRSASGEICIAGELDFERRSSYEFPVLATDRGGLSTTAMIKMQLTDVNDNRPVFYPREYKVSLRESPKASSQASSTPIVAVVATDPDYGNFGQVSYRIVAGNEAGIFRIDRSTGEIFVVRPDMLSVRTQPMHMLNISATDGGNLRSNADAVVFLSIIDAMQRPPIFEKARYNYYVKEDIPRGTVVGSVIAASGDVAHRSPVRYSIYSGDPDGYFSIETNSGNIRIAKPLDHEAKSQVLLNIQATLGEPPVYGHTQVNIEVEDVNDNAPEFEASMVRISVPESAELGAPLYAAHAHDKDSGSSGQVTYSLVKESGKGLFAIDARSGHLILSQHLDYESSQRHTLIVTATDGGVPSLSTNLTILVDVQDVNDNPPVFEKDEYSVNVSESRSINAQIIQVNASDLDTGNNARITYRIVDAGVDNVTNSISSSDVSQHFGIFPNSGWIYLRAPLDRETRDRYQLTVLATDNGTPAAHAKTRVIVRVLDANDNDPKFQKSKYEFRIEENLRRGSVVGVVTASDLDLGENAAIRYSLLPINSSFQVHPVTGEISTREPLDRELRELYDLVVEARDQGTPVRSARVPVRIHVSDVNDNAPEIADPQEDVVSVREEQPPGTEVVRVRAVDRDHGQNASITYSIVKGRDSDGHGLFSIDPTSGVIRTRVVLDHEERSIYRLGVAASDGGNPPRETVRMLRVEVLDLNDNRPTFTSSSLVFRVREDAALGHVVGSISPIERPADVVRNSVEESFEDLRVTYTLNPLTKDLIEAAFDIDRHSGNLVVARLLDREVQSEFRLEIRALDTTASNNPQSSAITVKIEVADVNDNAPEWPQDPIDLQVSEATPVGTIIHNFTATDADTGTNGDLQYRLIRYFPQLNESQEQAMSLFRMDSLTGALSLQAPLDFEAVQEYLLIVQALDQSSNVTERLQTSVTVRLRILDANDHAPHFVSPNSSGGKTASLFISDATRIGEVVAHIVAVDEDSGDNGQLTYEITGGNGEGRFRINSQTGIIELVKSLPPATEDVEKGGRFNLIIGAKDHGQPEPKKSSLNLHLIVQGSHNNPPRFLQAVYRATILENVPSGSFVLQVTAKSLHGAENANLSYEIPAGVANDLFHVDWQRGIITTRGQFDRESQASYVLPVYVRDANRQSTLSSSAVRKQRSSDSIGDTSNGQHFDVATIYITVGDVNDNSPEFRPGSCYGLSVPENSEPGVIHTVVASDLDEGPNADLIYSITGGNLGNKFSIDSSSGELSARPLDREQHSRYTLQIQASDRGQPKSRQGHCNITIFVEDQNDNAPRFKLSKYTGSVQEDAPLGTSVVQISAVDADLGVNARLVYSLANETQWQFAIDGQSGLITTVGKLDRELQASYNFMVLATDGGRYEVRSATVPVQINVLDINDNRPIFERYPYIGQVPALIQPGQTLLKVQALDADLGANAEIVYSLNAENSAVSAKFRINPSTGALSASQSLASESGKLLHLEVVARDKGNPPQSSLGLIELLIGEAPQGTPVLRFQNETYRVMLKENSPSGTRLLQVVALRSDGRRQKVQFSFGAGNEDGILSLDSLSGEIRVNKPHLLDYDRFSTPSMSALSRGRALHYEEEIDESSEEDPNNSTRSQRALTSSSFALTNSQPNEIRVVLVARTADAPFLASYAELVIELEDENDNSPKFSQKQFVATVSEGNNKGTFVAQVHAFDSDAGSNARLRYHIVDGNHDNAFVIEPAFSGIVRTNIVLDREIRDIYKLKIIATDEGVPQMTGTATIRVQIVDVNDNQPTFPPNNLVTVSEATELGAVITSISANDVDTYPALTYRLGAESTVDIENMSIFALDRYSGKLVLKRRLDYELQQEYELDVIASDAAHEARTVLTVRVNDENDNAPVFLAQQPPAYFAILPAISEISESLSVDFDLLTVNATDADSEGNNSKVIYIIEPAQEGFSVHPSNGVVSVNMSRLQPAVSSSGDYFVRIIAKDAGKPALKSSTLLRVQANDNGSGRSQFLQNQYRAQISEAAPLGSVVLQLGQDALDQSLAIIAGNEESAFELLQSKAIVLVKPLDRERNDLYKLRLVLSHPHGPPLISSLNSSSGISVIITILDANDNFPIFDRSAKYEAEISELAPLRYSIAQLQAIDADQENTPNSEVVYDITSGNDEHMFTIDLVTGVLFVNNRLDYDSGAKSYELIIRACDSHHQRPLCSLQPFRLELHDENDNEPKFPLTEYVHFLAENEPVGSSVFRAHASDLDKGPFGQLNYSIGPAPSDESSWKMFRVDSESGLVTSAFVFDYEQRQRYDMELLASDMGGKKASVAVRVEIESRDEFTPQFTERTYRFVLPAAVALPQGYVVGQVTATDSDSGPDGRVVYQLSAPHSHFKVNRSSGAVLIKRKLKLDGDGDGNLYMDGRDISLVISASSGRHNSLSSMAVVEIALDPLAHPGTNLASAGGSSSGSIGDWAIGLLVAFLLVLCAAAGIFLFIHMRSRKPRNAVKPHLATDNAGVGNTNSYVDPSAFDTIPIRGSISGGAAGAASGQFAPPKYDEIPPFGAHAGSSGAATTSELSGSEQSGSSGRGSAEDDGEDEEIRMINEGPLHHRNGGAGAGSDDGRISDISVQNTQEYLARLGIVDHDPSGAGGGASSMAGSSHPMHLYHDDDATARSDITNLIYAKLNDVTGAGSEIGSSADDAGTTAGSIGTIGTAITHGHGVMSSYGEVPVPVPVVVGGSNVGGSLSSIVHSEEELTGSYNWDYLLDWGPQYQPLAHVFSEIARLKDDTLSEHSGSGASSSAKSKHSSSHSSAGAGSVVLKPPPSAPPTHIPPPLLTNVAPRAINLPMRLPPHLSLAPAHLPRSPIGHEASGSFSTSSAMSPSFSPSLSPLATRSPSISPLGAGPPTHLPHVSLPRHGHAPQPSQRGNVGTRM

SEQ ID NO: 26290 - DNA, 6498 bp, DROSOPHILA
cacaagagagcgcgtaaagagagagttggcgctgtttaatggggagagcaaaagagcgcctaaaatagttaaaaattgtcgcaaaatcatcactctctggcagtaatctatcatgcgcgatcgatcaatggctctctaaaaatgtctctgccccagcccaccaccccctgccatagctccacttccagagagatgagttcataaagtgggtgaaagagagcgttctccagtagctcctctcaaacgtactcacttttatcacacacacgtacactcaaaaaatgtccatggaaaaattattctcagtaaaaaattataaattaaatatttctttacatgatattatttaacaaatatttaaacgaatcgagacatattaaaaaaatagccgggaattggttatggttttacaaggtaaacgtgtcgtatgagcaatattttggtgcaacgacgctattgaactacgcttcaattcaaataaataaattcgtttttctaaaaacataaaacaaaatatttgagtgttttgttaaaaaatattttaatatattcataagaacatattgttattttaaaatacggtttcgaaaatcaaaaaccaatttcttgaaattcagtagcgtgtttccctcagtgtagagtggagagcgggtggagagcgccatcagagcgcgatttggggccacttcatgtgccgataaaagctgtcttcacacgctcaccgctcgccactgaaaaaaaatttctggaacgagtcacacgcaccgcacgttcctccgcagaaaggcaataaaaacaataacaacataactcgtcctcgtcgaacaaatccgaatttaatttattattcccaaacagaaatcataaattaatcaaagcattgttacaacacaacaacgattttcggactcggattctcttcattttttattcgagcggagagtaaataaagtcaagaaaacaagaggaagaggaagagcggtagggagccaacaacaaaatgtgccgctgctgtcaaaagtgagtaaacgctacgaatttccccctaccccaccacgcttgacaacttgctccgcattcgagccaacaattcacctggctaacacacattccgaattgccttttctttatccatttccatttgtagctgctgggaagatttctactggaattgcttcgaggagcgtttctgctacgacgaatccatcggtaagtttttgagcttttttgatttgggcagttgacggatacggatactctggttacggttacctgaaaatgagtacgagtacgagtacttcggctactgccactcaaatactcactctcttcgcacgcctcacacacacacacatacaagaaactaataagatcttgaaacgcacaatgctacggcgatttttgcgcgatttaacgtgtttggcatttgaaatcgagtacgagtcgtaaaaggaaaaaataaaacacaagctgataaatcagttttatggcacttttgccaaacttgcatatagagtatcttaaaaagttgcgcttaagtaagctgcgacaagttttgtttacataaatgcttgcatgtatagaaaggcaaaatagttttattattttatataaaaaaatgaataataataagtacttaaaagaatttaacgatagaatattccagaggtagagttgggcttatagcttagatcaaattcgtttctgtagaagactcacattttgtttgaaaatgaaattcaaggagagaagactcggaagtttctggaataaatttgtttataagattacggttttttcatttactaatttctgctctttctttgcctctcagccaactacaatcccgaggaggacgaggactacttggcgtccaggaaaaatggccagatcattggacgcatacaaccgacatcggtggataataataattcgctgacggtgccccaaccgatttgcgatcagccgcaaatgaggcagggcaactcgagcttgggcctgagcctaatgaggtactaatagatagatcaaatcccaatccagagatcgcatttcgcactttgtttggttggctggcgattagcgattaattggcatgctcgtgttggcttactgttggccatatcaattgacattataaccaatatctgttttctttgtggcccttttagcgccaagatccacgaggaggactatcgtcgggagacacagatcaatgtgcccaacctgggaccggagatactggcggtttttgccaattcgcaaatcttccaggaccatcagcccaccaagctgaaccggatcagcaccaagacctatctggccggaatccattcgccgaatcgcgaaatgccgacaactccgcggctcagcgatcaggatcgattgctgcgacgtctggaaggtaatgatggccccagtggtgcacacaccccacttttgggtggtgctgctaatggtaaaagcagcggcaagagcacccgcagcagcagcatcgtatccagcggtgtgcccaaggtcaagttctatctgaactgaacatcgatgggttttggggttcaatgggtactagcagtatttgtgccaaagattgaggaactctcgcaatgcggatataatcaattggagagtgaccaatatcgccaaaatgtgacttaatattattaactaattagctgtaagtgttgctacacaatattcgatagagacagcaatgccagtgcgactggcatttagtattatctatactcctaagtagcctaatttaagttagcttaaacgtttaccatttaagtcttaattgttggaccttgtaattgtttagtcctaagcgacaaagagcaaacagtatgattttcataaagtttttaaacaaaattttcgcttggttttcacttttacgctccacatattttatatatatttaggtgctatttaaattgactgactactgacttcatctttacgtaaaagttctgattaatacaacatcgtcgtgcctttaaatcgcgcctaccatcattttagcaaattgttttgtgcactttgaacaattgctttgtttgtcaagttggcattactcaacagcttttactaattgcatgggactgggatcgcttagtcaaacatattcacattctaagcgttcagtttttcgatagatttctcagaagtggttgaaatgatttcactgagaatctacgaaaatcaaataaagtcttggcttattaaaaagggaatctaaaaaatgcataagcaatatatgaacaaatttcgaagacgatatgaaaagcaaatttcacatttgctcaaacaattattacaaatttttgcaatccaaatttttccgcaggcttgactcacaatccattaaccccatttggcttaaaaaaaaaagaaattcattcattcgaagttcgaacctccaaacgaggaagagcggaaaagaacaaatctggatccgagtccaaatttaattaacaattttatttctcaatgacgcagacagcaccttaaggtactggtttcatctggagttatatataaaaaaaagaaacatattttgcggcacgtcacacatttgttatcacaattggaagcagagataaaaccattggcaattggagatgatttaatgggctattaggcctgcgccactgatttatcgcaatattcgcaaatggttaatcacagcgaccgacttatgccaccaagcccattccatcagcaaaacgaaccaaacgtaattagtcaaatattcgattttcttatcgagaccatataaaagagtgttaacagcaaataaacacccatgcaatatgaatatttctgcccatttatgtattttgtcaaaaatacacgtataggtaattttttttatagataagaaactcgagctggtaatcagtttttgcatgctaacaatcgattcctccttagctgataaaaataaagaaatcgtcaaatttgtagaactttagagctgtcatttcattctatagaacacatttaaaaactccaagcaaaaatgataacatatagatatcatcttcacttgttttaggttaattgaaaaataatcaatacatcagtatatctatagaaaataaattccgtcttcatattatgcatgttaaatatacaattatatattgatcttttcaattaaaaatatttaaacagcaggtgttgtatgtatcgatatttaacaaatcgcgtttaattgattgtatgttcgaataatctcaggtttcatttcgaaataaaacgaaacaataacagcgatcagtaaacaataaatagcccagtttcagttgtcaattaagttttatgcacggtactattttcatttttatttatacttgtaaattatattgttatacatacgtgtgtatgagatatcttaattacattcacgtagtcatcacgttctcttgctaatgtcggatgacttttccgattcgccagtcaatggctcctatacagtttatagctgttttgttttaagtatttccacatctacatcatattatttcgtcagaaccctataccttataccttataaagctgacgtttattgtcgggggtcttgacgatacttaaatcatacgtcatattgtattgtttaacacattttgctttctcaaaacaaaatctaagtagttaccgattaagaattattaggcagtaaattaaatgatttcataagtatctatacatatttttacataacagaattagtataatctttaactgcagctaaattttatcctacttttaagtttcatttcacaaataaactatcaaagcgactttactaagtatgtacatatttgaaaatgacttgccttgaaagcgcaatgttgttatccaaataaagaaacaaaattttattgcaattatatactaaaatattgactgaatcagaatgaatactataaaaaataatactgataaggtacgactcatttgatgcttaaatgcatcttacccaattgcttgggtatttgttgtcaaatgaaattaaatttataaatcttaagagtacagaaatattaagtcaaaagaaggcaagactaataatctattaaatttactataaaacttaactagtaagttccgcctctaaaatttccattttagccaaagtcgagggctagttattatctgcacatatctttcctatctgccatgaactcaaccgttatcttgtttgccaaccttttatgcgtcttacaatggcatctacttttccaactcttccaaagataatattgtcctctctggcagctggctaattagggtacaatgaaatcaggacaatatctctaaataatatgggtttagttacttgcaaatgcagaacactttttaaacggagtatatcttctttttgcaggagatgccactgatgcgagaacaggatcgaccgagaagcgaatcaccttcaccctggctcccagttcggccgaatgctcgccgtcgggtagccaaacgacacttactcccaaaaagttcgaggccattgccgaggaggagaaggaggacgacaaggccgatgaggaggaggagatcatggaggaggtggtgctgcgacctcgcctcatcgaccggcatcctcatctgctggccaaccccagtggactgacgaccacgcccaaacggatcctgcgatccgccaagagcgttccgcacatgaatgtccgttcgtcggccagtgagacggatatattctccattagcggtacgatgaccggaagcagtcagatcagcatgacgccggaggtgccatcgatatcgttcagtaatctgcctaagaactacgaggacacgcccactattgagaagtaccgggtatcgcagagtctctattccattcaaacggcgaatgctgctcgggccacacaggatgattactccatgccgcgctacttccgtcgatctgccatgctattgacccagagctctgaggtgctgcccggcgccagttcactggcctccatgtcgccatcgatggcctcgtcctctgcctcgcccgggtcctccaaggacgaactgcgacggccagagaaggagaagagcaaacgactccagatgctgcgtggcaatctaccgcccttacttattcattccgtgtccttcaaacgaaatcgcgacgagggcaagcaggttgactagtcgcactgcagatatacatatttatttgttaatcactttgtccatgtttttaatgttttaaatttattagcctttagtacctgcttatgcgttttctgtattatcttctaagcaatgaccttgtccaaacaattcctcagtattcagatgtacttcattttgaattaatgattgatattacaaaataaattgtattttaccacaaaaaacagcgattaaagatcctacttaataaatctttataaaaatctaaacgatatctatttgtaccattttaaaagaaataaatgcgagcttgaaaaaaaatgcacttatctcccc

SEQ ID NO: 26291 - DNA, 1498 bp, DROSOPHILA
atgtgccgctgctgtcaaaactgctgggaagatttctactggaattgcttcgaggagcgtttctgctacgacgaatccatcgccaactacaatcccgaggaggacgaggactacttggcgtccaggaaaaatggccagatcattggacgcatacaaccgacatcggtggataataataattcgctgacggtgccccaaccgatttgcgatcagccgcaaatgaggcagggcaactcgagcttgggcctgagcctaatgagcgccaagatccacgaggaggactatcgtcgggagacacagatcaatgtgcccaacctgggaccggagatactggcggtttttgccaattcgcaaatcttccaggaccatcagcccaccaagctgaaccggatcagcaccaagacctatctggccggaatccattcgccgaatcgcgaaatgccgacaactccgcggctcagcgatcaggatcgattgctgcgacgtctggaaggagatgccactgatgcgagaacaggatcgaccgagaagcgaatcaccttcaccctggctcccagttcggccgaatgctcgccgtcgggtagccaaacgacacttactcccaaaaagttcgaggccattgccgaggaggagaaggaggacgacaaggccgatgaggaggaggagatcatggaggaggtggtgctgcgacctcgcctcatcgaccggcatcctcatctgctggccaaccccagtggactgacgaccacgcccaaacggatcctgcgatccgccaagagcgttccgcacatgaatgtccgttcgtcggccagtgagacggatatattctccattagcggtacgatgaccggaagcagtcagatcagcatgacgccggaggtgccatcgatatcgttcagtaatctgcctaagaactacgaggacacgcccactattgagaagtaccgggtatcgcagagtctctattccattcaaacggcgaatgctgctcgggccacacaggatgattactccatgccgcgctacttccgtcgatctgccatgctattgacccagagctctgaggtgctgcccggcgccagttcactggcctccatgtcgccatcgatggcctcgtcctctgcctcgcccgggtcctccaaggacgaactgcgacggccagagaaggagaagagcaaacgactccagatgctgcgtggcaatctaccgcccttacttattcattccgtgtccttcaaacgaaatcgcgacgagggcaagcaggttgactagtcgcactgcagatatacatatttatttgttaatcactttgtccatgtttttaatgttttaaatttattagcctttagtacctgcttatgcgttttctgtattatcttctaagcaatgaccttgtccaaacaattcctcagtattcagatgtacttcattttgaattaatgattgatattacaaaataaattgtattttaccacaaaaaacagcgattaaagatcct

SEQ ID NO: 26292 - protein, 423 aa, DROSOPHILA
MCRCCQNCWEDFYWNCFEERFCYDESIANYNPEEDEDYLASRKNGQIIGRIQPTSVDNNNSLTVPQPICDQPQMRQGNSSLGLSLMSAKIHEEDYRRETQINVPNLGPEILAVFANSQIFQDHQPTKLNRISTKTYLAGIHSPNREMPTTPRLSDQDRLLRRLEGDATDARTGSTEKRITFTLAPSSAECSPSGSQTTLTPKKFEAIAEEEKEDDKADEEEEIMEEVVLRPRLIDRHPHLLANPSGLTTTPKRILRSAKSVPHMNVRSSASETDIFSISGTMTGSSQISMTPEVPSISFSNLPKNYEDTPTIEKYRVSQSLYSIQTANAARATQDDYSMPRYFRRSAMLLTQSSEVLPGASSLASMSPSMASSSASPGSSKDELRRPEKEKSKRLQMLRGNLPPLLIHSVSFKRNRDEGKQVD

SEQ ID NO: 26293 - DNA, 33479 bp, DROSOPHILA
atgtctataggatgaaataataataactgcaataataaatatgcattgtaatttaaaaactttactattaactgaataagcacaattcaaattatttaagattagaaaataatttaaattggtaatttggtatattaaaatatgtagttttttcaaatggaagatttacgatcaaattgattgccattgtggttaaatgttttctgtatttagacattaccttcagttgtttattgttgtcgtccactttgtttggcccctcgaacttctgcaggtgttacgtgcctgcgatccactgtaccgcccggccctctccacccccccgccgacggcttaacccgtgccgcctgcaatgacagacacatttaacacctacgcgatgttgacgctgcacttcagtttggccaaaagcaaaagcaacagcaaaagcaaaggtaaagctcggcgggcgccgctttggccgtcaaggtgtcaatttgtgccgttggcagactcacacactcgcacacactggcgcacacacacacacctgcacacacctggatttgacgactgtatgcaaatttaatggctaaattagacgagggagcgaaacaagaggggacgaaaacaaagcgacgaaggagggaatttaataatatatgtggctaatgtttggcatcgagacgagacgccgtttattaggcgtgattatgctcgaagatagcagttttaaattcaatttgcataatgaattcaattcgaatgtaattccagcaattgctgcggccggtgcccaatcttttgatccgcgcattgttaattgagtaattaatgccgacgcccacggaaaatggaaatgcgatcgatatatgtatatatcaatagcaaaagctatagatggagaccacccacttggccaattggccgactgttcgattggctgcggcccataaacagatatggcaatcacattaaaattatgcaaaattctttgataacgacagcaacaaaaacggcgtgtataatttaaatgtttattaaattatttagttgtgaatttatgaatctattatacaaaacgcacacacaatcatagctcttcgggggatttctacgcccagcggccaattctccggaagatttcttcacctgattctgcgttcgactgcgtgtgcggcggactagaatattgtacaacttaatcgctcagaatttctaaagctagcttacacactactccataaatactagattgtagatattgccgcacaccccacctccttctagcagggctccttggcggcagcggcactagccgcctcctgcagctcctgcagctcctcctcctcgcgggtcagcggtatcgtcgagtggttgtacaatccctgcgccatcagctgcagcgccagcggattcttggtgccgctcgactttttcagcttggcccgtttgttctggaaccagatcttgatctgcgcctcgttcagtcccagttccccgctcagctgctggcgtcgcttctccgtcagatagcgattctcgttgaactcgtgctgtgggcgaaaaaaaggggggaaatgggtgggttataggcgggttcaaagagcttctcaggagtgtagtatttggatttgtttaaaaagtaatccccaactttggcagaacaataacaagttttcaaaagttacaagtggctataatttatatgtctttttaaatattctaaaactaaaaaaaaaaactataacataaaaaactttggcgtcagcaaatattaaaaaaaaaaccagctcgttagaaacaaaagtgctatttaaaatgaattatttaaaaagtttatgtgcaacctattaaaataggcacatttaacaagcttgttagccggtgatttaatattctccttatatctcaggtgcattactaaaaagtgcctcagtgaaatttgggaggaaacgaacggaagtcatcttaccttcagtctggccaactgcgttccgctgaaggccgttcgcggccttttgtcctccggcaccccgcccccatcggcggcctcccccttctcgacgcccccacccccaccacctgccgccgaactggacgtcgccggcttcttgggctttcgcgctcgtggacctggaaacacaaaatggaaacacaatgagacgagatgagtgcggaggtcataaaaattccagggagcgcttaatggcaccaacatgactggacctggatctcaacctgcccgactgcctactgccgactcatcgggcggacataaatcctgcgcctcatatatgcagtccaggccggctcggcaattaattcacatttaaatgcgtccagacgagtcagggggtaacgtccttccgccccatctactacacattttccccaaccccattcgaagtttaccagctaaaacaattaaagttctctggtggaaatttgctcgcgtcattttcaaaaagtaatcaacgcaatgacttttgactgtggctaattttcctcgaggatagcaaagcacccaaaaacacccccaacagagcgacttgagttgtcttcgatttaattaacagcattcggggcggacaggcgcagaaaatcgctccacatgatgtgggttgtcccaaaagttgcccaaagacggccaaataaaattctattcgaaaatggggtttcaaagtttaactcgtttcgcaaatagttgggaaaaactgttgccgaaatgcaaatggaaaacgagagatgaagcgattatgaggtttcactaatgggaatattttggtcgaagtgagccaagtcaagtgaccacaagatgttcgaaacgaaactcaaatatgtggcaagtattttgtaatttaagagcttcatctatcataaggtgagtgtcttgaggaggacatttgggaaaattgttttcaatgaatttgtatctttcgagcagcttggtgttgcaaaaagcctttaagagcttactttttaagataattgacttattttggagcatttactagatgcggaaagtattgtatctatcttcttttttttaatttgaattatgagtctgtaaggagggcaaatgttgcttttaaaggggatggaaatgttgctactctaaatttcaataaattttgctatcagcttagtcacagctgcaaaaccccaatcataaaaccttgacccattcagacgaactattaaacaccattatatcgatcctgagtttccagttcaccgattcctgttcaccgtcctttttgtacttacttcgacctgcaaagagaaaagaattatagagaaaggttagaacgatttgaggtaaactgctggggacaatttaaaatttaatttacttttaacgcgaatcaataaaatatcggaaattgattaaattcctcgacgtcagcgcgactcagcgaaaactttctgatggcgaaacgtgcaaaaattcccggcgaccccactcggccacgcccccaaatcgcctgccgcccgccaacaaccttcaaaacaaatgtagcggcactaatggcaacgcaaccaagtcatgccctaagttaaatcgttggaaaaattgaacaaatcaattttgtcaacaaaatgccaaagctgccgacgggcgcgaaattaaaccaaaatttgacgatgggcgaggcggggaaatgccgtggaaaggggcggctgtctgacaagtgggcggggctgttgtgaggtgttatcacggttttaaatttcacacgcagtccgacgataaaaacaaacaacaggagcagaagaggcagaccttgaacctgtcagacagccgggagacgatgacgacaggaaaatccaagtcacgctgacctccgcccccaccgaggaaaacatccccttttagtcgagctaaaggaaaacgcatgttggcaagcggagataagcaaactcgagctgcatgccaaagcgtcgcaaggacattgctaaggggttgccagtttccattttccccaaaagaaatcgcttcacaatgcaacaattgccagtgtgaaatctttagctctcctctcctctcttctagtggaaattgtgatttatagcgtgttaaatttttcattgctctgctgcgcaaatttgacacaataaaagtttcaaagttgtttttcgggggagttcccggatgttgttccgtggggggtgttacttcaaattggctttaatacaaattatatgaactcaatcaatgtttggcgaagtattgtaggaagtagttaaagacgtaaatgtggagggtgaataatttaagatcattattactgcgtaatgacaagtcaactttaaagcatagcttcaagcctttccaatatagcattttaatgtgctttggtcacactttatacgcctttctccgcgcttcccaagtatctgaagatctgcaatcagacatttattctgaaaaacgaaatgtgttttgaccgcagttcgaattcccaaaaaagtgaaacagtggcttttttcactacaaagcccgtaagaagtaaacaaaaacagagacgcacattcacataaattcctgttcatcaaaaaaacaacaacggcccagaacagacggcaaagaaaacaaaaacgggaagatgtcttcatcagcagcctcaatgacccaacttggcaaagccaactgccaaccgagtgagccgaggcaaaaagcaggcttctcttctgccactggggcatatgtttaaaataaacgcatttgttttatttatgcttaacatgagttgcaaatgccaaaagcagcagtgcaagcacacataaggaatccagtcgaccgggttagttacctttaagacgggaaaatgaataaacctgccggagagtgcgcaattaaatccgaggaattgttattccagcaggagctacatattcaaggatcaggtgtagcatctcggtacgaaactcggaactcacgccccaaaaagcaccgaaattgacttataaagatctcaaactaacgggccacacgcagaccacgccgatcgcgtcacaggggagccagaaaccgaaacagatacagatacatatggagatacagataccgattcagattcagatacagacggagccggtctggcgatcgagaaccagtcacataagtttcaaacgccgagcttcgatgtaagcgatctgtctcgagacgatcgcaactcgtatctgtctctaatgatcgcacattggagcccagatcattaataagccataaaagacaacacatagccgggaaaatttacatgtgaaaagtaaaagcgctcgatgattgatcggtggttattcggcatccacagttctgattgccaatcggagatcagagatcaccggatcccacgcagaaaccgaccaaccaacctggcagacaggcaaattaacgctgcggtttggcgacactgatgaatattgacatgacgacgcgtcgctcatcggtttgattgcacgtttaattgaagtgattgacgcggacagcgcgacactcgcaatcgcaatcgccggatgacaaacgatgccgatcatcgtgtgtagctggggaacttcgtcagcgttttgtctatcgctcaatcgatccatcgatcgacgaccggtgctcgaaaatagccatttcagccagtccagcctgactagctagcttccagcgccaaaggctagcgaccacattcagcattccatcgcataatttgctctcctgcatgaaaatatttttaagcatatttcttaattgctctatcagtgcggtggttagctatttgttcggtgctgccaatgccactgccgctggctaatttgcatagcccttgccggctttgcatatgaaattgctggaggggcacactagttgtcctcgcggtgcttttatcgcagggcgcttcattgaatatgctccatgggcgaggtggaggtgtcaaaacatgttgcttcaaacgcgatttgaaggcggcaaatgaaagtagaaaaggtgagctaaacttcttgacaactactataattacaccatcagaaaatcagcagttcgggttataaatgtaaaatccaaagcaaattaaaactggaattccatgtgttaggtttatagccagcaagccatcctaactatctcttaggttatttaagccacgcataactataacattaaatatggctcgtttgagattatcgcggtgaaaagtgccggccaggaggagattcctcaatgatcccagcaaattccgaggcaaccttttacgcgctctcacacctttggcgatttaataccctgtccgagatatcgcttacacctacagcattgattgggtccatgaggcagccgcaactggtttgacaaattgcaaaccgcattttccgctgatattagcaaacaatttcattaagaaactgtaatcaatccggcagtgttgagcatcaggtggcctgccactgccactgcaactgggattgggattgggattggaactgttgctgcgattgccagaggcctcaagtacaggcgacaccgatatgggcggccagagtatctgtagctgtatctgaatctgcaactgtaaatgtagatgtatcgcgagcttagcgcgccttaatagacacgttgctttgcctttgtgcaattgaggtgtgaacattttacgcttctatggatatttcgactaaattagtgcacttttatggcctctcaattaacgcaatcctcagtctcaggcactcagtctcgatttcgatcacaatctcagctccagtttctccaattagatcagtcaaagtctggcaggccgggagttactttcaccctaatgatcacatcagaggcgctgatctcgtgggaccacccgaaacgaaaggtatcgctttggtatcggaagagtgtttgtttatttgcttttttgtcggttgcggtagtcagcgggttctttgggggggctataaaaataaaattaaatcgaagaaccctgcgatctctgaggcgatcgaccgaccaatcaagccgcccagacactaatgaatatttagatagcccacgaaagcagcatccaacagccaaaaaaccgagttgagccccagcggcagcgcccaaataatttgtagatcaataaatgttcgctttatggctctattagcggcgatggaccatcagcgtcgtgtgtggccaaatgaccaaatggccaaatcgctgggttgcaaaacaaatatgcgaataagtgtgttcacaccagggcgatgccgacattaacatcaatcttccacggatcaccgagatgcaaaccaatcgcaaaggagactggaccacaccaaaggtcctcctcatctgcgatgatcgtcttcaggtccatgatcacgatcccaatcgcgatgatgatcttgctgatgatgctggtggggaaaggcagtgaggcagaagatctgaacgaaacccactcgagcccagatgcagggctccgactgaaggtcccagatctcttcgtttagcccattttttggtcaagttggagtggtttagacagtgccctgcacaaccaaatattaacggggtaaattaacttcgaaattgcattaattttaaaacataaaagttgacctgattttttgattcgcactttacttttacgtgaattacttaatgaaatttcttaataagctttaagccaagtccccaatgccttggcttttatgtggtagggtgtatggcatgttaaatctcgaaatgtcttaataaaacaattaatagcacagctgagctcataagattttttcttttcatattttttcttgtgccaatgcaggtagtgcctgtagtgtcacgaaaacaggagcgaattcgagaaatcagtttaactaaatgaatatttaaaatgtttgaaactatgttaaaattgttttatgaactaaatgtctatttataaaacacactttaaaaatcttttgggttgaaagttttagcaagtgaataacttgagttataaattctttccccgttctaagaaaatgatctttatttgcctacagatagctgagtgaacaatttcagcttaaggcattgccaagattatgactacccactccctccagcgattggctccgctcctgaatcactttttatgactgcgcagtgtggcggacaaaaaaaggcagcgtcagaggcacagactcggcaaaaagcaaaagcccggccgttcgttcgtatgtcgtgtacgtactataaagtaattgaaaagcacaacagattgttttaaatatcagcagggcgagccgcccaagttgaccacctgtgcggtggtgttcgaggtggatttatggcccggcttttggccgggcctctgagttggctcttacgctcactctttgtccatgcagctgatctctcggtctcaggtcggtccggccagcataatcatcataatcatcggcgtcatcgtcgtcggcgtgatcatcatcttcatcatcttcctgatcgtcatgatcatcatgatcgggctcttatgctaatttcgaagacgacgacttcgccttggattccgccatgtggaccacacacgtcgaccgattcgcatggtctccaaaggtcgctcttcccctcgacgagaacttttatatgcttttatgggatccatgcccttgtcggaaagtaaagagtattcgccactgggtttttcggctttgataaattatcgataaaacgatgcgatcacttttaatttggcttagtttacctaccgcattctttggctgtgaaccctgcgttactgtatggatatcagtttcggttttcttatgtttcaacaaaaatcaagggaacagcagccgaggaattctgaacccgagttgattggggatgctgctgctgctctttcggttcttaattaagttatcaaagtttttatgacgtcagcgtgctgagagagggagaaagggaaacggtgagacagggaaaggaagcagctggcgccagaagacgccgcatagaagaatcttcgatcggttctcggcctaatcgatgctgccccttcttctggcatcctgacaatttccagaagccgggcaatgctgtggtaaatattataaaggggttaatgcattcgctaaataccctatacttgaaaaggtcaaaagttctatctaatattttggaaaacatttgactttagatcttatttgaaattcttatgtaagctaaatttctaccaaacctttccgcctcaaagagcaaaacaaaaatatcctagttagactattttctattaaaagtatattttatatctgatagctcaaactaccgccattgaaggaagtgtattaaactattttctcttaatattatattttacatctgatagctcaaactaccgccattgaaggaagtgtattaaacgtaaacaaacctgctcgatgtcgaatcgaatcgttttcattcagtttcagtcgcggaccccaatgtcgcatggtgaagaaccccaactcagctttttgttaaaattctcacgcttcgatctggcgacttttaattactattatcctttggttagcccgatttcgcgtgtttgttgtgcctgtgccgcttttaattaagtaattatggcagccggaggagcggagaacaagcaaagcaaatttcaattcaattttagctttttgtcgtaatctctgcttcaatttcaactgtcatcggagctgcacttggcccttatcctccgataagtaccccacgatccccgctaatccctgtctgcctgcagtttacacatccttcctcgattttcccttttccttctgaagaggaaactgtcatttgtctatttttaacagacacgccgacatgaaggatttaattaaattcaactcgagctgacagcttccatacacgagcttttgatagtcgtcgacggattgggaggggtggcaaaagtatctgtatccgtagccgatgtatctgtgtgtccgtatctgtttgtccgtatctgcgcttgtgggggaggtctccgttggcttgtttgtttgtgttgagttactccgctgcagattctcaatttccgattcgatttgtcgactcctcggctgcattcaatttacttactcttcgcttttgacttttgtttgctgttgttttgcgcaatttgccagcaaactttcaagcgaattggatttcgaagtgattgaataaatgaggcaaagagcgaatcaagttaagtgggtgtggacaataaactacacatatatatttcgcgacttttggtaccatacgatgtacccagaatcatagagaactttacaatctagttgacataaattttaatgtactattttcctctccaatattctcttttaatattgtatataatatggtattttaccttggaatattcgttatttatttcatttgctgttatctaatgaatttgtttttggcagaatgaaaagcatcgaaaacataagttttgtctgctgtttgacttttaattctcacttttattatatgtaaaattcaatatttggatgggtaccattttccgtttttaatgaatttgtactgatgaaatcatacctaatgttaaattcgttatttatctttcaatttttacctaaatcttgtgtaaagttaacaaatatttttattggttttattccaccgctgttcaagtaaacaaattgccaacaatttggcattactcatacgccttgttcagcgccgtttaataactcacttgtcgcggcccggacttcaagtcttttgcccacttccaaaacggaaaatcttgcaggcccaattaagcaaagaatgaaaatgtcaccataataattgccataaaccacaattggctgactggcggcaatttggtagaacgaaaaagccgacaatcaatgcaaatgttgcatgcaagtaaatccagaaaagcgctgccatgcagaaggcaatttaagcgtatgaaaagaagaacgttagaggaaaaacgctggcgttgcaagcataattaagcacacgaattggccaagttattagcgcgaacacaactagaaagaaaaaccaaacttgcatggctgattgcttactggcaacgtcaatcagtcgactggattcagagtcaaacatggcagctaaatttttcagctggctaaaagccgttttccacttttgcgactctccgtggccatttatgaaattaagttattttgctctgggggccactgttgcagttgctgttgcaacagctgcagcagctgcaacagcgttgtcaagcactcgttttaaatgagttattagcctcgagttgacgatttcgaccaacaacaagttttctggcaacgcccccgataaaaatggcacccatccaccccttcccaacgaatgagggttgtgcattcgcatgaatatttagccgagcaagatgacaaaccacaaataagcggaaacaaaaagagtcccttgtttattttccacgctaatcataagccacattttgtcacccccccttcctgggggaaaactctacggaaaaccacccacgacgagtgtgtcgacaagataagccgcacactcaaacaatttccctcggaattggggaggtgatgatgaagagctggccgccgcctgaggggtggattttattggattcgggcttattgaatttgctgcatgaaagcttgtttaagcacttgtacacccaccagtcaccacccttgggcagcaaccacactcaattattaagtggattggattgactgcgaggggcggggatctggggaatcgaaaatttaattaaatttgttagtactcttcggtgggcggagataacggaaaagtggtttatctgttacgtataaaataaagaaaaacttcctttgggtgctctcgaaatcatgacctgaacaattacttggcagttatgtgcagattagaaaatgtatattacccactgggatcttagcatatattatagagtactattaaatgccactaatatcatgtcacaaatgtgtagtacaataacaggcattatcaaataaacatctaatttcacaggcattattatagtttgggcttagtcaatcagaaatcagaaaataacccttgacacaatcgaaattgctgtaccgtgtcaaaacttttgtagcgattattcaacatatgaaccacccccaggtggaaaataatccagccagcccttggaaaccgtcaactcatgatgtattcccgggataaaattaatttgccgagatgcaaattgaacgaaaagtgggggccgagcatatcaattaagaccgggcctcaatttacatttcaattacaaagcgtttgtcgaaaatgtcgggcattaggcgtgcggcaggttgatctatgtagtatcttaaacactgcgacattcgctctatatactagagcacattcattattcaaactcggcaaattctatgccattagtcaggaggcgagagcacaggacagaaaacgagaccagacagcagccgatgtcaattgttgctgggcttgttaacacgaatgtatttgcggccaagtatctgtatctgtaaatgtatctcaagctgggcatctgtatctgtgacgtgagtgcacagaatattaattacacaaactaaaaatgcaaccaaacaatcgccgggccgagtttctcaaattgattgatactctccagccgggccagttgtgcaacatttctgttctgcttttgtttcgcagtgagctgcttttttattgaaattgaaacaatttatgcacgcaattaagctgaaagcgaaggcagcttgcagctgaatctgtggcatgccagtaaatttgttttccgcaactgcatgtgctgcataccgaatgatatgggctcccaagtctccaggagggtgcgaagaaaccccagcggatggatcgacccgctggcgatgatacatgaataaagaaattagcgccatcgaatgtgaatgattttctgtgggggaaatcggattggaaagttctgtctggcttgtttgtaaataacttccacaacgaaatgttcgttttaaaccgtatctcttaacaacgttttataaaattttcacagatatatttatataccttgtctgggcactaaaactttaaaaggaactcaccattccatgttttgtggaccgtgaaaaactcaagcgcctttcttcgccactcctctttcttaccccgcgctatccgctgaccaccccgaatcgagcgcatccttatcttagttaattgttcaattacattaaagtcaactcatttggagtcattagcatgtcattaaggcaccaccaccgactaacaaaaacccaacctcatactttctcctcagctgcagtcgcgtcttcaggtccctcttctcgtttctcgtatcccccttctcccctgcaattcatcgccgcggagcgtgcaagatgaacatgttcgataacgatatcggggatctatgtgtgtgagatacgaaagatgtctcatctttgggggcttaattacttgcacgcgtgctagaatctttcatatgagtcgcggggatagttgattcatcatctgctagccgcgtctctttctagcccgtcaaccggctgatgcagctgcaacaaagtttatttaaatctccggtaaagatgccctttctaccgaacgcgcatcttctgtgtcttgaatgttgtttttatatatccccatgttagctgtctgttttgtgtggctgaaatgttttgccttccctaatgaactcgttaatatttggccaacataagaaagggattcggcttgtaaaacatattattaaaaagataaataataattcatttgaatatgttataaaatttgtaatatgtcaaaaggtcgttttaatattatttttcgattgaagagtccttccagaatcagatataccgtatacatctatagggtattcattcttccccatatgtctggggccataaacaaaagtcaaaaactgttgctgatgagttcattaacgaactaatttcaacttaaattaaacttaatgcgaaatgatcgtcatcagcaaagcaaacaaagaatcgcgaccgaaagagagcggtgaagaatgttttaatttgcagcttctgcggaagaaatcaaaggagcaaaagggagagagtcctctcctgtgtctactctctgcatctctctttctcctctcccccacccccttgctcactcacggatcttgcatgcaagttgcagtgcaacaagttcgaaggcaacaacaagaacacatccgctttgtattggcgacagcgcaactgggccccatcctcctctccccccccccacttccccaaggagtgctgttgctgttattaataaagaccacacattttgacaagagagcaaaggggaccacccaagtgcagctgcgcagtcgcagtcgccgtctcagtcgacgcagctcatgctcgcaattccaggcttccacggcttaattatatgcgaggtggggtgaggagggcgaggggccttggaaagcagaggggggcaaggcagttaaactcgcgcgcgttacttaattccccaaatgcaaattcttctgcgagaaccagatgcctatcggtgttttgtaattgcaatcgggggtaaataattcactcgcgaatttacaaccgtgtgtgagcgcgagtttgtgtgtgtgtgtgtgtgtggtcaggctccgttggttttcatgggttaagaccattaaccaaaatactcgcttaataaaaatgtcattgctacatttacggtatgcaaatgggtcgcaaaggggggcaagaggggccgagaacagccggtaatcccgaatcagtgtaaaaacattgcctataagcaaggggacaaaaacaacaacaggcgactatcggaatcaggtgaattacactggacagtatgattgggttttaagattggctacttctcacggtatcggaatattgacatttctagaatgctcttaaataagtatacctatactataatgttctttataacattaatatagccaaatattaaatatttataggacaagataaagatttgaaataaataacaaaaaaatattccttagcgtttaacttttacccacccatgcaataacttaatataatcccgacttttgttagacagtataaccaaactttacacgatcgctgacaggccaggttgaccgcaaaaagtgtctcgtctttcggcctgtccccagattatgtcgtcgagtgttaggggagagccctcttcgctgagagttaagagccgtggaccaccctaaaggcagcctgagaatggaaatgggaatgggtcccagctttgggccatcttgctaggtggtccacggctgctgctccgctttcctcattgctgttgttgtgctcttcgccttgccaaaaaagctggcagcttaaaggttcgatccgtgagtcattctccatctcaaatctctggggggagcgacagagagagagcgatagtcgggggaactcctaggtggacacacagataccgcagcacacacacatgtgtgtggtcctcgctgatttactgaatcatcggaaagtgcactgagaaaaaaagccatcaaaacacagacacaacaagtctaagaacttaaccatttatgaggatttgaaccttcaacaaaaagacataatatcttaacctttcaaagatacatttttaaaaaagctgaacgttttttgttactataactgttgttgatatcttaggttagtagtattcagcatatttttattaagccctaatttgtttgtagtgcatcaaatgaagatcacaatgatgatcatctctttggctgttcatcatgtggttcttgtgtgcgctgccgccttcgagttgcgggtgcgtctcgtggtcactgatctggctcgatccgatgcccctccgctctcatcgccaaatgcccaatccctgcatcaatccctcctgccagtccagagaccctctcgctgaatctacgtatctgttggctgttccccggttctggtatccgtcggatgctgcgatcgcggcgcagatctccaattagcctgccttctggttgatgacttaattaagtctgtgtggcgccccctctccacgttctccaccccgatagtgccccctttgtttggccccgtttctggtatttgctgcatcgatttcggttttgttttctctccgatttcgattgatttgtgagcgcaatggaaatcttcgctggttaattggttgtaagacggcgagcagacattaaccccttacgaataataccacccagctatagcccccgcccacaacggcgaacagtgtgatttatgctccccattccatggggttcttttagggggaaaactgcatctttaagtgttttgtgcattcggttgacatcttgctgcatcgcatttctcatgttgtgaaatatttttgcaaatctctgacatgtcggtgcctttgaaggaatactactgctcgcttaccccaaactcaatgtgggtggccagatggacggatggaatggatggaatggatggatagatggatgaatggttggttgcttgacacggaatggtttggcttaaaaatgcgcacacgcttttccccactttaatagcttacactgaaaactcttccgatcctaccccttcttattcggaagtgtgtgtgtgtgtggtctgcgggctttttggggctgccagatggaaatggagatgagagatatagccgcgcatcgccagatccaagtgagtcatgtgccaggcgtgacagagacatactcgtaaattacactacagaaaaatgtcatttgtcgaatgtcacaaaagtgctccatttgcttatattcgggtcagatagtttgcattctgtgggtactacgattaatgggtggtcttctgaatatcagggcaaaattagattaccaaataaagtcaaactatggtagaaaggatgcttgcgctgaaagtataggaaactgccggatagaacctcaagatttacctgcagcccatccaaagctacgcttttctgtttcgtgccaccccaaccgtaaataacttaacccaaataccgacccagacgcactttccgctactttcgctttcgcttcggcaatttctctcagtgttaaccgcctgctgtctgccagtagtaacatgcatatgacctgcccccaaaaaaaacactcggatcgaaccacaaaactccttcgacaacagttggctactatagttaatgcatttttaatgacaagtctgcgggctgccattggcaaagtggaaaataactcattttgttgcggtagccatgagtgcctaagtataccgtatacaatgcccaagcgaatgcgagcggctaatgtcaacaaatttacaacagttagttccgccttacgcagctttcaccgcccactattgagagtagggggcgtggtggtgtgcggccttccagcggctctagccgcattttcaatggagcgcaaatatttgccagtcttccgagcctccccaccatttcagttgtctgtcttggctttcctttgtttatttccctagtgctgcaatttccatttaccttggtccatcaaatgggcattttgtgtgtgtgctgcggcctgcttcgtttccagttttctacctctctgccacatgccaacgatcgtggaactggtggatccccaaccaccataccacctcccccccaaatgtcccggattcttcggcccgctttagacacacaaacaaactgtcaggcagcagctcactcgcctgatttgcagttgatggattctacattattcaccatttgtaatcgttttgcggttaagttctgttcggacacatcgtttattgtgtttgctgggggaatcgggttcagtgaagagggatttaacaagggggcttaacaagggggcataacaagttccccgatgcgagttaattgaaccagaaggtcgttgcgatgatcacttggatggactgagtaagtagcggaaaagtctaggaggaaatgtccgtggggcaagttgtatacgtccaaggaacttttagcccctaaataaagaaaatatatgtagtagctaatattacattaccatttcggcatgtttctacagttttcttcaagtttaaagttaacgtaggcctggtgttgtgccttttttgccgtgaactcattttcaagcgctagaagctcttgaaaagccgccagcaactcaattcaccttcaagtaacaagtggcagtcccccaaaaagttaaataaagaagcttaaaagagacagaacgagtgaatgaagacagagacggcgagccaaaaaaagaactcaactctgacaattaacacctgctcacctgctcaacaacagtggcagtggcaacaacaataataaataataattgctccaatgaggaaaacatggccaacaaacacacacacacactcacacacacaagcacttggccactcaaacgcgtttgtcaaagagcagctaccaaagtgaaaaagagaacccgaagcacctgaagccgttcgtcttggccaagaaggtgaggtggtaagagggagtctggcctgtttgggtgcgatcacgacacacgacacaaacacgacaacaacaacaaaatcggcaacataagcaccgcaacaacatcattaagtcgaaaagcacaagtttaacaaacggcgaaaaaaaaaataagaaagaatagcacaacccaaaatgttggggtgtaaaaaatgcattcttatttggcctttggctttataattttgcatttcaataaacgaaaacgcagcgaaaacaaacacgaaaagccaacatggcattgcccattaaaaaggcattaaatgaaaacaagtgttgtcccacaacaaaaaaaacaacaaccaccgaagtgtacacaaaaaataaaaaaaacagtaacgacaacggcaacaaccgctatgccaatggccactaaaaaaaattacagagtaacaagtaccaagcgaacccgaaagaaatggtagccatggaaccatgatatggtctattaccattactaaaccctgacttcaaaggtctgcagacgagagaaaacatatagttcaggccaagtgggagcgagacatctgtcatcgatcatgggcagagcttaaagtgataatttcttactcaaacgaagtttttaacagaactgtaactgagataaggatgaaatatttacatttggaacctagtaaatatgtaatatgcgttaccatgtgacttagaagttctttacgaaaagcgaagaataattagaaattgaccatataaattaccaagagtagctttttcgtattcaaacattcaagaaagttcagtagtttttttctaaattcccaatggctgtaaatctgcattcctttccttaacaatccacttttaataaccaataagtgctagtaaagtatcccaaattatgcgaaaagaggccaaaccaaggtatagccagccacaaagtgccctaatgaaccatccagaccgcagagcagagcgcaatcgcttaacttgcaaatcaatattaaaataccataaatttgttcctctttcggtttcggttgttatttccagagttgtgcaactgaacaaccgcaaggctttctgccttgcaaatgaatggcaaatcgtttagtcaagctgaaattaaccgcagaagtaaccccaaggtggatttttttttcttcttgaagtattcccatacgcatcgctatagccgccataggcagctgcagagcggatcccctgtgaagagggatcggtgtggatcaggcgccagaggaaatcggacaggaactaagatcaacgtcaactcgaatgcagattgaacgtcgtcagttggagcccaaatctgcagcactctaccacacgcatatccaattatttaaatccagggcaccgaaaaaacgacgggcagggaacttcaacggcctcggtaatgaaatgtttcaatcaccggcagttcaatcatcatccaaattgacagaaaaactaactgcgaataataaagcataagagctcgaaatatgattacgatgtttaaatgcaaatactccatgctccccacagatgttgaaatcaaggcaaggccggacacatccagcagatgttttgcggcaccaccatcgggataaggaagtggctcctggggacaacttgttaatggagaacattcttctgattgacttaggggtcccatcgatccgatcgaatttttactttttgcgaattctggaatttggtcatattgagcaatgaatcagattgggggccctttgtatgtacagtgaacttcggatagagtgaacttttactatactaagtatataaacacttatgaaataatttattattaagtgactataaatcttatatagaatttaagctcgaaaagcgttgagacacttttaatatttcttcttgtctgtatctttgaaagatatatctcatagatatttcactgtacttagagtactgctcctttggacagatatccgaccacttgtcactccattaacccacaatcatcacacataagtccgagtaaataccctaccgttttcattcagcattccattgtggtttcgatttcgttgctcaattgcgaattgagtgccgatttcgtagtggatcgagttgaatcgaatcagaacgtcggatcggaaaccagtagccaattttggcatagagtcaattgcaattaatcaataccaaatgtgggcattagctacaaaataatttaacctttaaaatggcaattaaatcgttgcctgatcggcttcgaatcaaaatggtatcgaagtggttgttgcagttgtcggacaattaatcgatgttgaaggccctcgacccgcagacaattaaataacaaattcgtagagtaaacgcaaacgtaaaagagcaacaaattaatcgagttgaagtcgatttgaacccatttctgtttctaattaagcaatttcgtagcgcgtttgccaggcgattttaaacgcgagcgcgttaattaccgcctcgagtatgtagttgttgttctgggaaatgtgggatttggccaagagcgtccaagagccagcacagccggtgatcggaattgaccgcgatcggtaatgactcacagagattacgaattccaaagcccattcattctttcgctcactctcaatcaaagcgactcaatgtcaatgcactccaaggcggcacaatacgtatctcagacagaaatacgttttaatcaacttatcaaaaagtgtcagtcaagtcggcaatcaacatttgcaatgtgtgtggtccccacatcatcgtgctatccatacccgagcccccctcgggtatcgggtcttcaagaccccgctagctgactgacaccgaacttaagtggcgcacagccacacacggatgcccagatacaaagatactcagatactcggatacttggatactcggacgcacagagatactcgttctcactgcgagccagttttgaatgcagctatctatgagctcgtggtggacactcgtcagctggctggcactggctaaggcttcgagccatcaatcttattgacactgtttcttttgtttttacacattttttttttttttttgttgagcatagaggaaaaccaaaaataaaaccaaatcggtggctatttgcgagtgcccccgaagcaattgaagcagtttaaccgatctcgatctcgggcaattgagtttccacgcacaccaagtttgcgtatcttttgaggttgagtggagttcagtggagtgcgataatttgtcgctaatggatggactcataacacgatatcggttagtggattcaatggggggactagtcaatatgaatattatccaaacatttaacaatgacaatactatatcttatgcaaagcgtaagaaacaaataattctggtctttcctaaatcggtttcctttccgttgatcatttcttatttagctgattcatcagcttacctacaagcctattttagcaaatttattacatcgcaacacaattccttcaaactttccgtccatcgcgcataaattcactgggaaatgcaatttaattacccgagatgaactcgcgtcggccaccggggcagtaatgatgacaaaagcgatcataaagctgcctcctgcgatcatcagcatcgtcattatcatcgattgtcagcgagtctgcagtcggattcgcatttgttgtgattgtcacaattattacgcacataaatcgcaatgaaaccggcagcggccaacggcaattggcgattccagtcaactgatgatgagtggatgttgtggctgtggctgctcgaagatcgaagatcgcgacgatcacgagtcggagaatcgagaatggataaatggggaatctggcgtacatcagccattggcaaggccggcaaattgagtagctccactgtgtccaactgatcgcggctactggttaacctgatcggatctgctccccaatggaatcccctcggcttagacttggcgatcagatcggcaaacagatcatcattgtacgcaaccatcgctgcttaggatcaatgtaattagagatgggtgaatgatatgaaatgtatcgtttttggttatcgaatatcgtcatttatcgtaaataatgtaaaacgtaagtaatttaagcttcaccactaatcagatgactttgcaataaatatctcctgtgtataaaactgtttttaagaaaatttcgaatcaacccattgtaattatatgtcttaaccttcaaaacttgaaacttacatctgctttaatttccagtacatccgctaattggtccttctacttcctcctgacatttcgattcgtttatcacattctcacgcacccatctcccatccgatccgatcccatcccatcctatcccatcagacatcggactgtctgctcgtggtgcatttcattaaggcttgtttctaactgcttaataaaatttatttgtatgcactggaacgacgtcgtcagtccgcttggccaaaatgtaaggcagcagcctagctggctccatccgaagccccaactccggtctcagctccatctgcagctccaactccatctgcagagtatcttgctgttggtctgcgagtacaggacaagcttaagcgttgttcgtgttcgctgtcaacttgggtggtccaagaacttggctcgctgaacaacaacttggatgtggatcgcggacgggggcaacggggccccaaagtggctcccccattccgaccactccgtcgttcgatcctcctttcctttgctgtgactcagctgcagagttgagtctccaccgtatatagatcaaaagttagacaatagctgatccccagttgacattgccttccccttttatagcccacccccctctggcgcctttgcgctttttgccgaggcttcctggaacgatgctagaatctctcaattatccgcggagtaactaacgaaactgattatttacccaacactcgacggctgatggctggggatgctccactccactcggctccatcggtgaaccagttttctgtacatgcgctgccttttgttttcccactaacactccagagttggccaaaagtaaagtaattccaataagtgtgactatccgatttctctgcgggcccatctccagctccatctcatcatcgtcgtcgtcgtcatcatcacgaacaagtaattaaagcgaaacaagtaataaacaaacaataagacgacgtccaagacgccgacgccaaacatatgtctgaaataaagggaagcatcggcggctcgctgggcatgcaaagtatctcttttggattgtttcattttttgtgtttggttttggttggggaaaagtgaaacccggggaacccaactcgcttcccaattaaacttgacaaatgcggctgaccacacacacgcacttcgatgccccaacttggatatctgtcgtgactgactgacataaaataatcaaagcgatccctgcagacatgtcaagctgtatgacatccacatcaacatcttcccggccattcgagagctgtcaaaggaagtccccaaatttccccacacgaaaagcccttggcaccaatctccaatgatcatcgaaggcataaacccagcttgggtgcgagttatgtgcttcaattaacaccaaaggcccagcgattatagttgggggaaaatgagggggttaaatgaggggaacttggggaaactttttacaattgatcgaggcttagtatagctatgaattcgattcatttcttctgtatttaagtcttactttgcagctcttgtaagtttgttactttacacaatttaatttgagttttcagttatggtatatataaagggtaataattcaacttgttaagaattataagctattattgatgaaatgcttcttaaaacataatgaaatcccaacttaattaaaccactccccatttttcccgaacaacagtttggcttcacagtattccccagctactcccttaaactttctaatcaattaaatgataagttccaataagcgatcgtaacttgaaaatagtgccagctaccgaactgaaaaatgacttcaattaaggctggccggccgcaaatggttctcgatcagatcggcgatctattgaaatattcaaatcgtatatcgagtaggcagacatgagaccacaacttgaatcgcttgggcttataagctcattattagtgacagaataccgaagtcgatttcgagtgtgagcaataaataatcgattaagcaaaagcaacagttcatgtgtgtgtgtcggccgtcaagcttaattagattgcgatagaagcccagagttctcgattcaaaatatcattgtagcccaatatttgtatatgtatgtacatatattgtacgtatgtatacgccacagcctgcagtcataataatgggacttatggggattatttgtttgtttgctttggctgatgcatatttggttgctagtgattgactgattgactgcctgcccgaatgccaaaagggagaccctgccccattgcggaacctcccacgtatctcgaaatattatttgcctgatgaatgaagtcatttgcttgtagaaaatattttgacagctgtaaatatctccacaccccacgacgcgctgttgcctcgttttcaaattaacacaaatgaagttataaaaatgatttttatatgccatgcccaagttatacaatatgaaatcccaagcccaaatgcggaaacttgtctttcatttcatttcaattcaacatttttgttaggtttcgcctttggttttttttttttttgtttttcgtttcggcttttggcttttcggccagcttgggtggtcttttgggcctaagcccgtcgttgggtcttgattgttgtgatcttgaggtttgtgttacatacgaaattgaaatttctgaatttttaatatttctcttttgtcttttcgttgctttacgacggagctcaagtcaaatgatagataagcaggccgcagtctattgagtgtgaaattgggcgaaactgagaaggttggggtaagttggataacagagatttaacaccctaactgtcaggtgattataactgttcctagcttgagttgtaaaattaagttaaatttaattaatttaatatccagctgattatagatcttatttaaataaagggactgcgccaagaaagtaatctgctaattgaaaacgcactgtgatgattcgagattaatgatcaaaagacatactacaacatcaaaatactcacttggcttagcagaagaatagcaataaatgcaatacaataaaacttaacaactttttcatttagcgttatatatcaatttgaatcctaaatgcctctagccgaatcatttaccctgtctaatatacccagctttttcgctctaggtcagggtatatgaaaacaattacaaaatgcctggccgatgcccaatttgaggccatattaactgttgagcggaaaatgcaactgtccgcagcagcagcagtttcagttcacattaaccaaatgcggtcagcagtccagtcacagtttaaacgacatttttcgctgctgccgctgttatcgtgccgcagttttaaaaaaaatatatatatgtatgtatttgtacatatatatggggagggggcaaggggcatggggcgattggggctgcgggtctgacagttttattaccaaggcgcatggctgctttttccagttgcggcagttgcagttgccaaagccttaaaaggcgctactagttgttgttgttgtagttgctgttacagttgttgccgcagttcgtttttgttattgttatcttgttgttgttgtgtgttgcttgttggttgtgcgataagttaacagttgaaattaatttttgtcacttcataaatcgccgcagttgattgccattgccttttctacctaacacccatcctacacggcaggaaaatgcgtcttcaaacaaaagtgcgtaagctaagtacacagtttgattattaagccaaacttcttaataaacgattataaaataagttaaggagtataagacaataccatttcctaggtagttaacatttttgacacatttcatatggttgtttcttgtacccatccctagtaccatctatggtatgaactttgaattcgtaataagatgtctgagctgatcctatcctttaaccaactttagttctcttcaaggtgtagttcattctagagttcggattgcttttgacccacataagcctctcttctcggagcaccaaaaagtgattgagtgagcgtttaaagtgcgctcgtttaatagttttcacctatctaaccactcactatccacgaatagagctttcttaaagtgtttgccaggaaagcggctaacacataggccggtaagtattttcctcaatggctcaatttggcggccaaagggagtgggaaaagcggacccgagttctcctcgaggctctggatatcgtgattatcatatgacgtgacagcctcgcatatttatgaatgcatttgggtcataaacaacggtgttcttggtgctgttgttgcgtttccaacgcaaattgcgcacttcagacgtaaaatcgttttggctaagaaactttacgtgctcctatcattgattgagttctttgatggttgccaataataatttcagtccataattcggtatcaaattggcccaattgcataatttcaaaaatatagggttgggagtgcaggtttatggatggaaataacatcactaaattaagttttaattgaacgtgtacagtttgtcttcaataaatttctatgcattaaattaaaatagaaacagggctgaaaattacgttatttaatctaaactaactaactcgttttgataaaaaaaaaataaaagaggtactgccacttactaaagtgtcagaaaaacactcataccatttcgctgataaaaaaaaacgaattggacctgctccttccaaccccttcaccaccttttgtttagagcaatttcctaagtaaatttcccatttagaacatgcaaaggcagcgcagccaaagaaacttttccagcaattttccaacggcaagagcacggagatgagaaaatcggaggcttttctgaaaacgaggggggtaattgcaggacggtgtaattgaaattcgtttgtttatgttgtcattgttgttgtttctgtttctctggctgctcggaaagcgtcttctgcgcaaattgaaaattacttaatggttcagtggcgatcgctgtcgctcccgttttcccgctggcccctttcccgcttaattttcccgcttgtcgctgtctcggctactggttaaatgagctcaaagtaccggacaaatgcgaaaattgcctaccaacggcaggcaaaggtcaggatgggggttcttggaaggaagaggtgagtatctggtcccaaccaagtcattccatgcagaaatgtctattttgtagaagggaaccgaagagtcaagtaaaagctgggtcagtaaaaacagttgtgggcggagctgggtacacaaatgtgtaatgaataggcaaacatatgactgatcattcacattttttcccactattttgtaactcacttttaagggagatacagaaataaactttttatctgaaataaggctatgtatccagtaattaaatatagtgggtttgccattttttagctaggttttaatgatactcctcaataagttattacgtttttgccaaagggaggcacaaaaaagtgcccactgtgtataagttaattatggcctattctacaaatgcggtttatgtttaagtcgaagcaaaaaacataccacatctttttatcagtggattgagtacacatttatttatcctttagatctaacataattaattgctacatcaaagcagtaaatagagccactcccactcaggctcatgctccaataaaaatcataaaatatggcctggcaattattgagattgaacgcaatcttgtatcgattatcaaatgctttttgtggttttaatacaatgccattaatctgcatcgaaaatggcgcacaaatagacggcacatatgcagtccgacagcttcccatatgttagccatatatcatgtggcccacaaatggccgttaagtgcaattaactaatttgttgtcgaatgtacgtttttggcaactgttttaatcgcctacgcgcacacggaatatgttgcattaatttgtcaaattaacacctttgttgtggattataaaaactttgaatattttttcccgacaacggcagcagtaatttttcaaaagcaacaaatttatgacttttattcgagctggcattttaattcgccgattttgtagctgactggctcaaatctcacgctaaatcattgtttgccatagcagctgcagtcacaagccaactccgtacatatagcccatatagcgcatatagccactccgaaaatgattccgaatcggaggaccagcgacgccatcgcctacaacattcattcaaattatggaaccgcactgagatcgagatctcgttttagtcacgctaaatttatacaaaaagcgcttggaaaaaaacctaaaaatgaaactgagaaaatgaaaaagccaccacaacaataaacacaccttaaaacctcggagcgagtgagacgggcgactgcagagcgaaagagacggcctgtgtggaggggagcaaccaaaatcgtttcgagttaattagcgagcgcgacaaaacccacccaaaagcgtagatttatgcactcggtattcgttttttttttttttttggggattcagtaacgagactcccccaaaactctctaaataaatatgagtttgacatccatcagcgtaatgagtaaattgccaaggaattattcggatccgagtttatttgggccaagcttctaagttgtgtaattgggaatcaggtagttagaagggacgacttttgatggatgaattacaattatttactgatatttcaacgttactttcttcaagctggtgtattaagatctataaaacgtgtggataattggctaaaaactgtcgtaagtgcttaaacagctgagctcggcaatcttacaaattgcattcaatgatacttaataaagcaattaaatttaactagttaaagataaagtaactctcgtaattatatgcccatttaaggctgatattgtaattgaataatgctattgtcaactactctgttgaacaccaaagtttagtaaggtcttaaacgttttaatattgtgttataatatcaagtatctgtgataaaatgcattcagtctattgagtaaacctttggcaattcattaccgataataaactagctgagcaagctaataaaggtaaacaccttaaccaaatgactgccatcaagtggcttaaatcactctccattcgccacttgaaccacatgatccatggacttacccgagattccaggggattagccaaaaactatcaaggaatccgaattgcttgttcaaacagcaataagccaccccataaatgagcatatggggcactcccacccatccgattcccccccaaatttcagccatgaaattattaggcaaacgattacgaattccctgcggtggcataaactaaattcatgagagtgccatgattgctgggagattgttttggggttgttctcgacgggttggggtggtgctgcacacacaaaaacacacacggggtgggtggggtgtagcggcataatgagcttaagttatgttacataagccataaggacatgaaaaccactcgagcagacacttcacttcggggtgagtgttcgcctccctttcgctcgcactcacttcatttcggtggttggcaaactaatgagctgtgggttgctgtggtttggctccgttcgccggctcttctgtggtgtctgtcgcttgtttgcacaaccgctttatgagccaccactcaacagctcgtctcctcgagtgtgtttgagtttggagaaagagtgagtgactagcagtgcactgctttagcataagatgtaagatgctttagaaaatgcaggaaatatccatagaaacatatgcaagtaaataaattttgccaggatctactacagaatatctataataatactggcatggtgctggagaatcgtatgttaacgagaaaacttgaaaccaaaggcttttctttcaagcttatgaagattagtattcaaaacaccaaaacgtaatttcataaactatatttgcattcacaaagttcataaaaagtacgttaaacgtagaaatatacaatattatttcatcaatatttgtacttatgtttcgctagacaacttagataactgaagcaaaatttttaaagagacttggactcacctgagctgggacgatcgctgtagcgggtgcagtagacccacgctggccaaacgatgggagtgccggaatcctcgcccgatttaccggatgctcctgtggcacccgctcctgccgctggcggtggcgacttgaccagatccactggtgcccccgaggtgttcgtcgtgctgctgctggtggcggtgctattggaatcgttgctgttgctgcatatattcgccagcgagctggagaagctcaagctcgagttggcggcggcgttactttgagccagattcagtggctttcccgacttcttgggcgcctttaggggagatctgttgccattggtatttccagaatttttactgctgccagtactgctcccacttacactgccaccaccgatattgccacttaaagcaccaatcttgggcaatctggaaccaaagtccgccttcaggatattgtctatgctgaatttgagcgccctttcgtgcagattttcattgttattcaggtgattctgcatgtgatgatggtggtggacctgatccctttgcagtagcaattgctgatggggatgcaccgctccaccgggtcccagacccaatgccgtggccgtcagctgagccagtgcatcctgaccgctgggcactgtggcaaccgccgccgccgccattgccatttgcagctgttttcccgccgccgctgccgtgagagcgttcaccctggcggcggccattagatgcatctgctgtttcatcagctcctcggcgtacagctgggactttcgcaggaactcctcctggaaggttccagtggagggaggcagttgcaggagatcttcgggtgagaagggcggaccttcgctgggcggcaaaacagtggtagcagtgctgctgaatgccgacggtcgatagatttggctgatcaaaagcctctgcctggcctgagcttgagcggatagcgcagcctgtgctgcttccgattgttcctggcccacactcaagacactattctcactgcagcagctggccggatcctccaggtccaaatcgtgctcctcctcgacctcttcatcctctatgttcagctgctcctcgcactccgtctgctcgtcctcctcctcctcccgcacttggggcgagttgcccggctggacaagcggcaagggcaagcaatccggatgcattttacctacttcctggccacctccgcccgctctcctctcctgcgcgtggtcctctgcctcctctaaggaaggaatagtcagcttgagcgggggcggtcgagtgctggccaaggtggacatcagtttgagggcttaggtcttcagctcgaaagttcacagggaccaaaagccgacggcatttcagggcagccagaaagcattaaaaacattaaccacagccaaaagatatcacttggattggcaaatacgccgcgctatcgtcttcgattgacaattggtttttgggttgggtgataaacttgtcgataccgacgttaatccgctcgtccgttaaaaacgtaacgtgcgctgttacgaaccgccgaccaactgattctctcgcgaactgaatagcaaagcgagacggctgcagctgagagccgattcaaaaagagaactctctctcgcacacgctctctctcactctccgtcctgctctggcttttcgaacatccaatcagcggctgcggggcgtgccctactgttgtcccgctcgcgcacacggtcagccgcctgtcagttgaggttatgttaagtgtttgtatatttgttaattaagtgcgtcgtcgccgcaaaaagaaaaaagcgaaaaagaaggaaaatagggataagaactccactccatttccatctgcgccttgtcgttttgattatgcgctgcagcatttaagtcgtaaatctcactctatgtaggctgctctcgccctcctcctccatcatcatcacttcactccccctttctttcgctcctctttgcggtctggcatctgcagtccttttttgctggcatcctatccgccgtccagcattatatacccacacacacatatggagtgtgtgcctgtttatatacaacacatgccacagcttccccgtctccttcactccttcgcttccttttacttattgttcttgttgctccgatacaacgaacatttttgcgctttttgatgtcattgttgttgttagctgcgctttataaatcaccaccacaatttttgttgccccaacatctgccgtgatttcataattgcttttgatgcttttttgtcgccgttttattgtttgttgtcgttttgccttcacacatcccatcggacaacattgatgatagttctgcgtaaatgaataccaatacgtgtgcaattgcatacgcttaatcatgggcgtagattcaaaagcactggggggataatgatcagcttgctgggtttctactgaacaccttgtccggcatttaaagacctcttagtaatgccaaaataattgtaatttaaatttggtcccacaagctaatcaatctgatatcaataaaaaaatcaaactttgatattcatgattacttacataag

SEQ ID NO: 26294 - DNA, 2271 bp, DROSOPHILA
attcagttcgcgagagaatcagttggtcggcggttcgtaacagcgcacgttacgtttttaacggacgagcggattaacgtcggtatcgacaagtttatcacccaacccaaaaaccaattgtcaatcgaagacgatagcgcggcgtatttgccaatccaagtgatatcttttggctgtggttaatgtttttaatgctttctggctgccctgaaatgccgtcggcttttggtccctgtgaactttcgagctgaagacctaagccctcaaactgatgtccaccttggccagcactcgaccgcccccgctcaagctgactattccttccttagaggaggcagaggaccacgcgcaggagaggagagcgggcggaggtggccaggaagtaggtaaaatgcatccggattgcttgcccttgccgcttgtccagccgggcaactcgccccaagtgcgggaggaggaggaggacgagcagacggagtgcgaggagcagctgaacatagaggatgaagaggtcgaggaggagcacgatttggacctggaggatccggccagctgctgcagtgagaatagtgtcttgagtgtgggccaggaacaatcggaagcagcacaggctgcgctatccgctcaagctcaggccaggcagaggcttttgatcagccaaatctatcgaccgtcggcattcagcagcactgctaccactgttttgccgcccagcgaaggtccgcccttctcacccgaagatctcctgcaactgcctccctccactggaaccttccaggaggagttcctgcgaaagtcccagctgtacgccgaggagctgatgaaacagcagatgcatctaatggccgccgccagggtgaacgctctcacggcagcggcggcgggaaaacagctgcaaatggcaatggcggcggcggcggttgccacagtgcccagcggtcaggatgcactggctcagctgacggccacggcattgggtctgggacccggtggagcggtgcatccccatcagcaattgctactgcaaagggatcaggtccaccaccatcatcacatgcagaatcacctgaataacaatgaaaatctgcacgaaagggcgctcaaattcagcatagacaatatcctgaaggcggactttggttccagattgcccaagattggtgctttaagtggcaatatcggtggtggcagtgtaagtgggagcagtactggcagcagtaaaaattctggaaataccaatggcaacagatctcccctaaaggcgcccaagaagtcgggaaagccactgaatctggctcaaagtaacgccgccgccaactcgagcttgagcttctccagctcgctggcgaatatatgcagcaacagcaacgattccaatagcaccgccaccagcagcagcacgacgaacacctcgggggcaccagtggatctggtcaagtcgccaccgccagcggcaggagcgggtgccacaggagcatccggtaaatcgggcgaggattccggcactcccatcgtttggccagcgtgggtctactgcacccgctacagcgatcgtcccagctcaggtgagtccaagtccacgagcgcgaaagcccaagaagccggcgacgtccagttcggcggcaggtggtgggggtgggggcgtcgagaagggggaggccgccgatgggggcggggtgccggaggacaaaaggccgcgaacggccttcagcggaacgcagttggccagactgaagcacgagttcaacgagaatcgctatctgacggagaagcgacgccagcagctgagcggggaactgggactgaacgaggcgcagatcaagatctggttccagaacaaacgggccaagctgaaaaagtcgagcggcaccaagaatccgctggcgctgcagctgatggcgcagggattgtacaaccactcgacgataccgctgacccgcgaggaggaggagctgcaggagctgcaggaggcggctagtgccgctgccgccaaggagccctgctagaaggaggtggggtgtgcggcaatatctacaatctagtatttatggagtagtgtgtaagctagctttagaaattctgagcgattaagttgtacaatattctagtccgccgcacacgcagtcgaacgcagaatcaggtgaagaaatcttccggagaattggccgctgggcgtagaaatcccccgaagagctatgattgtgtgtgcgttttgtataatagattcataaattcacaactaaataatttaataaacatttaaattataca

SEQ ID NO: 26295 - protein, 568 aa, DROSOPHILA
MSTLASTRPPPLKLTIPSLEEAEDHAQERRAGGGGQEVGKMHPDCLPLPLVQPGNSPQVREEEEDEQTECEEQLNIEDEEVEEEHDLDLEDPASCCSENSVLSVGQEQSEAAQAALSAQAQARQRLLISQIYRPSAFSSTATTVLPPSEGPPFSPEDLLQLPPSTGTFQEEFLRKSQLYAEELMKQQMHLMAAARVNALTAAAAGKQLQMAMAAAAVATVPSGQDALAQLTATALGLGPGGAVHPHQQLLLQRDQVHHHHHMQNHLNNNENLHERALKFSIDNILKADFGSRLPKIGALSGNIGGGSVSGSSTGSSKNSGNTNGNRSPLKAPKKSGKPLNLAQSNAAANSSLSFSSSLANICSNSNDSNSTATSSSTTNTSGAPVDLVKSPPPAAGAGATGASGKSGEDSGTPIVWPAWVYCTRYSDRPSSGESKSTSAKAQEAGDVQFGGRWWGWGRREGGGRRWGRGAGGQKAANGLQRNAVGQTEARVQRESLSDGEATPAAERGTGTERGADQDLVPEQTGQAEKVERHQESAGAAADGAGIVQPLDDTADPRGGGAAGAAGGG

SEQ ID NO: 26296 - DNA, 4396 bp, DROSOPHILA
tatataattctgttaaatgttttcttggcatttaacaaatttattatcaacacaagttgcatggctttcaattcaatggttttcttcatacgtaaatatatatgtatcttgtgtatatcattcctaaacgtacgagtatatatatgtatatacattcgtatgtatatcgtgcatagctgtatgccaacatgagactattttgaatcattttatcggtttgccgtcgaatgtttattattatctcgttaaatatataaatatttgatctagagttgcggttggtaaacgcgttagtaggttcgtaagtgttgctatgcttcgattgacttgactggattttgcttacgtttaaagttattattatcaacatttttgtggaaatcgtttaactagtattatgcttgttggttggtattgtttaggaggattctgttacatttacttgccgctagtactttttatctgttatcatcgtttaaatattcattatattgtttacgttgctgctcagtataatttataataaatacataataataaatatacatgtagataatacgcttaataaatatatttatacatatatttgatttcatttaatatatatatatatagttgttatgtatataattaacaaacaaaaaaaacaacacacataaaaaggagcaaaaagtaggatacaaatttcgcttgtttcatcctcgaaaaattgaattgaattattctttacattgaacaacgaacatcaagaacggtattccgtatgccttttagaatagagtgtggggagtattgtttttgcacaaatatacgtaggtagagtaggtatatgtaggtattttcgggtatataataaatatgtatatgcatgtgggcgggcgtatggtgtggatacgtagctttagcctataaagggacatttgcatagagagcgcattggcgtaggttggtttaaattacaacgatgagaccggataaaaagacctccgaaaactggaggctagaagaactcaggtggaaagacaaaagagacgcgcctccatgggcgtgattaagattacacgggtaatttagttaattagctagagtgtttttctgtttgcttctgccgccggaccaactgttctaatacgtgatcgatctattgtgtgaagtagtactaaatgttcgcaacttgcaacgaacaacaaagctgacgtttgagaatcaaaggtaaaaacgcaaggaagtggcattgcgcgcgtaacgtcttgtaaatttagttagttaatacgtacattaatttaactcgtagttaatttgttaattattgtgttgccaactggtataattttgcacataaaatttagttagcttgctctatggccaccatgaatttagcctgctgtgtgctgctagctaagccgtatcgtaatatccgtaatcgtagtaacccgctcatctaattcaactatatatatatatttgcatttatgtgctgctgctgctgcttctgctgctcctgcttctgcatcggcttgggctgcccaatttcgcgcctctggtggcgaaaccaacaattaaggttattgttctccaatcagcgatctacgtacgtcttcagccagtttgataggatgggattggtttagggatcgggattaatacgaggaacaggatgaggaatagcctagttgccattgggcaggggcacctgcacctgaacatacgactgcgggaagtaaccggtgcggccattcaccgcgccctcgaaccaattgtcgtcgacgcgattcaacagggtgataatgtcgttctccttgaaggccagttcgccgggattctccggctcgaagtcgtagagggcctggcagcagggctgctgctggcgctgcggcgttacggccatcgacttggcgggcgaacgcatcggcgagggcaacggcgaggcgctcgaactaatgtgagacggcgtgccatcttcgttgaggccgccgccaccgccgtccaagttcagatcgagcagcgtcttgggcacgaactcgttgcgtggccggctctccgcctcggagcgcttctcctgcagtgtctcctgcaggcctcgaaggacatccgcgcattgcgaatgaaaatcgtatagtgcctcggcaaaggtgaccagctgggagacatgctccgtatcgttctcgagcaaattgaacatgcccacctgggccagctggagcgattcaccgaacttgtcctcggcaccacgaatctcatcgtccttggcctgtcggcgacgcttgcagtcaaagtctagccgccggccctgcagcttcttgcgatgatgcattacctccttgaggtctttggtctgcatatgatgcagtggctccaaaaagttctgcttgatgttgtcgtccagcgaatacttgacgtcggccatctgtttcagcgcttcgccgaattcgacgagcgcctgcgcgaacacgctgttgtcctcgccgagcttcttcccataagtcagcatgcattccgcgagcaggccctccggttgcggatacgtattggacttggcctgtccggacagcttcgagatgcccttgaccgctgccattttggcccgtgccgttggattcggctgcaggaactccttcgtctttagctgcagctcctccactagctccacggtgacgtccgtcttgcgttccatctccatgaagtccatgtccagtttggtgccctcggcaccgcccatcttctccgtcatatactggttggccttgttgatctgctttttgagtccggcgaaagccatggctgctgctgtctcttctggttttcttcctctgattaaattggtcttggggcgctcgacgcagttgctgtgaacgggttggttgggttagtcgagactcgatttcaaattcaatgtcaatatcatcaagtcaacaatttcatcaatggactggatggctgcctcactgactgcccgactgcctggctggctggctggctggctgagtgtgtctatttttaaaacgtttacgtttggaagacttacgcgtactgcacttttctccgttccttctccgctgggggtgctactttccggggctcttctgctcgctcagtggaggctgcgagtcgggaaactcgaattggcttggtgaactgtagcccgagttcgagttctacttttgctgaccactactgcgggcactttcactcgcttcgcttgctctgcacgttctgccccgtttttttttttgttgctctgctcgtaatcttcgattttttccagaaccttgggctgcgtaatgtttgaaggaccgtgagtcgttactactactactggtcgcgcacagggggcgggggctgtggggtcgcgttttcctctcggctcgcaaaaatcaatatcttgactgtgtacaacaattttcaacggcactaagccactggagctgcgggactatcgataattctgttaaaaaacattcagtgtgaccggtggttcgtaaaataccaaaatcattcgcatacaacaacggacatacacgggatacgctcatctctaggcatatgttaaagatgtgaggtacaacttaacattttcatttaatttctttgcaggggggtattagatagttatatatatatatcaaaacaatattaaaaattaaagtaatatatatattttatattaagaagccagaagcacataaacagttaacataatatcttacatttaatatctaatacttataatgttaatgcattataaatttgaatttgaaatctatgttgattggcagaattattagactagaataaatatggtcggtcccactgtcggtctctgtatttgctctgtccttgtacatgctgttaatcgaatagctgttagattagaataacagtttggcgcgtaaaattctaacattacaatacataaatatattatattgatagaaaacgtactcagcaaaaataaagctgtataactgctgatgaatgttacgctaagataaaaatggaatgactcagaatggataagaaaatatcatgtttatcctgtttaccaaaataactgtgcgcaaaataaccagtagcacagcagtcaattttatctttctagaaggtggcaaatatatcccaggcaaaaattaaaccccatttgcatcgtaaaaaccagtgacgttcacagcatgaagtagcaattttaccaccttttttttttttatatattctggctctatctgaacagataacccccgagaggtacttagcaccaccgaacaaacaatgaacatgtaaatcagttcaatcgcagtagtaatagttgagatatcagagataagatctccctgccgtgtttttaatggcgtataaaagccgcaagccgttgtgcttttggcaattagtctagacgaaa

SEQ ID NO: 26297 - DNA, 1545 bp, DROSOPHILA
ttgtacacagtcaagatattgatttttgcgagccgagaggaaaacgcgaccccacagcccccgccccctgtgcgcgaccagtagtagtagtaacgactcacggtccttcaaacattacgcagcccaaggttctggaaaaaatcgaagattacgagcagagcaacaaaaaaaaaaacggggcagaacgtgcagagcaagcgaagcgagtgaaagtgcccgcagtagtggtcagcaaaagtagaactcgaactcgggctacagttcaccaagccaattcgagtttcccgactcgcagcctccactgagcgagcagaagagccccggaaagtagcacccccagcggagaaggaacggagaaaagtgcagtacgccaactgcgtcgagcgccccaagaccaatttaatcagaggaagaaaaccagaagagacagcagcagccatggctttcgccggactcaaaaagcagatcaacaaggccaaccagtatatgacggagaagatgggcggtgccgagggcaccaaactggacatggacttcatggagatggaacgcaagacggacgtcaccgtggagctagtggaggagctgcagctaaagacgaaggagttcctgcagccgaatccaacggcacgggccaaaatggcagcggtcaagggcatctcgaagctgtccggacaggccaagtccaatacgtatccgcaaccggagggcctgctcgcggaatgcatgctgacttatgggaagaagctcggcgaggacaacagcgtgttcgcgcaggcgctcgtcgaattcggcgaagcgctgaaacagatggccgacgtcaagtattcgctggacgacaacatcaagcagaactttttggagccactgcatcatatgcagaccaaagacctcaaggaggtaatgcatcatcgcaagaagctgcagggccggcggctagactttgactgcaagcgtcgccgacaggccaaggacgatgagattcgtggtgccgaggacaagttcggtgaatcgctccagctggcccaggtgggcatgttcaatttgctcgagaacgatacggagcatgtctcccagctggtcacctttgccgaggcactatacgattttcattcgcaatgcgcggatgtccttcgaggcctgcaggagacactgcaggagaagcgctccgaggcggagagccggccacgcaacgagttcgtgcccaagacgctgctcgatctgaacttggacggcggtggcggcggcctcaacgaagatggcacgccgtctcacattagttcgagcgcctcgccgttgccctcgccgatgcgttcgcccgccaagtcgatggccgtaacgccgcagcgccagcagcagccctgctgccaggccctctacgacttcgagccggagaatcccggcgaactggccttcaaggagaacgacattatcaccctgttgaatcgcgtcgacgacaattggttcgagggcgcggtgaatggccgcaccggttacttcccgcagtcgcgcgtctcttttgtctttccacctgagttcttctag

SEQ ID NO: 26298 - protein, 368 aa, DROSOPHILA
MAFAGLKKQINKANQYMTEKMGGAEGTKLDMDFMEMERKTDVTVELVEELQLKTKEFLQPNPTARAKMAAVKGISKLSGQAKSNTYPQPEGLLAECMLTYGKKLGEDNSVFAQALVEFGEALKQMADVKYSLDDNIKQNFLEPLHHMQTKDLKEVMHHRKKLQGRRLDFDCKRRRQAKDDEIRGAEDKFGESLQLAQVGMFNLLENDTEHVSQLVTFAEALYDFHSQCADVLRGLQETLQEKRSEAESRPRNEFVPKTLLDLNLDGGGGGLNEDGTPSHISSSASPLPSPMRSPAKSMAVTPQRQQQPCCQALYDFEPENPGELAFKENDIITLLNRVDDNWFEGAVNGRTGYFPQSRVSFVFPPEFF

SEQ ID NO: 26299 - DNA, 10518 bp, DROSOPHILA
cgattccatcggaataagatgccagcgaggcaatatgcacataatgtaatggaaattatgacaaattttgcttataatttgtcctgtgcctttgcctatgtaaataagtctcccagaaatgcttatcctcgatcttttccagctctgaccctgtactcgtgcatctttatgcgatttgcctacaaggtccagcccaggaattggctgctcttcgcctgccacgctaccaatgccaccgcccaatcgatccagggtcttcgcttccttcactacaattacgggtctaaggagcagcaggcgtaaatgtaatccttgccccgaaatccacttccccgagacgcgacgcgcgaagccacttcaaatgtttacccaacagcagcagctatcgcaatttactgccaccacacgcaacgaagatctagcaaattgcactgccgcaatcccattcaaatcaaatccaagtggtggagtaattgccgtgaatcacacccgcacaatcggctgaatctcgaatcgcgaagttgtcgtgccccagtagccgttttcgctggggtcaaattccaattccaattgagtctatacccaacttgttactttgcccatttagttaattccgttaggcagttgatcaaaattttaagtcggtgcaatgcttagattacgattatatgaatatggtttaaaatccaataaaagatatcaaaatctaattttgtctagtgtctgtcaatacaaaatggttgtaataaaattgtaacatttaatcattaaaatgaagaacgttatagaacccattcaaatatacaaagttagttgattttgtcacgtttattgaaacatgctttttattcaaacaattacggttatataagttgatatctgtaaaatatacatttcaattgttcttaacaatagcatatttttttgttgacattttttaaacttttttttgttcatcaatggggttaaaacatacgaactcgtaatcatttttttgttgtgctttttttttttttgattacgctttggacgaaaaacatatccgtgggtataaaaattttttagttttctcaaacataataaaagtaaaattaaagttaaacactcctcgcgcactatgggcgccatcactatgcctaataagtggcttaactgatgtccacatggaaatggaaatttgatttctgcttctcgacttcttcaacgacaacttaactaactaaacaattggatgacgacgataggtactatgacaggcttatgctccgcaatttctattctatggctacgagaatctcagtcctgctcctgcttaacgtaagtgctcttctgccgctggcgctccatcaggtacttcttgaacttccgttcccgggaggccacttcgtcggcccgggcacgcagtcgcagattctcggccaatagcgtgtcctcggcgcgcttctcctcctcttcgcgcaccttcgtcttccggcgcgatacgcggctcgcttcgttgttcttgagtctgtcctggtaggccttcctctcctcctcgcttttcatgcttgacatgagcacgggatcgggaccgtcggcatgatccttggcagggcgaccgcgcttccgcttgccgctgattccgctggctggcgaagggctgaacacggacgtactggctgttgaataggcgggcgaggtgggagcagtgaggaagccaccatagccggtctggcaggtgggcgccgcacagctggagctggctgagtagttgctgtgtggtgtgttcggcgccgagaagtcggtggtagtctcctcttcggcactgcgtagatcctctacgatgtctgcatgggtgctgctgctgatggaagtgttgctggtgctggtactggtacttgtggtgggagcctcgaactgcaaataggagagattaagtaaattaggctgtgctggatatttcgacttcaaaagagctgacaatttttcggtacaccatttaatctgttctttacagatacttacccgatcatcattcaggagctggttgataatctccggtgtggtcggactgaatgctggagctagctcggttttgatctggagcatcagtcggctgcgcttggtgggctgcgactcgaccggggccggagcagaacgcttgatgttggtaatgatggggtgttggatgggggctgggatggccgcggcgacgtcactgcaactgctggcaaaactgccgctgacgtcctccacaaggccgaagccgagctcctggctgctggtatagctgatgtcgaagctggtcatgtcggcgagcaggggctcctccgtgatgaatttggtggtgctggatgtggatgtggcctgagagtaggtggcgagataggggtcctctgagctggtgagcatggccgttggctgcgagttgtggaatatgttgatgaagtccagttcctgctcctggttgatgtcgataccgacgccggacatcgatgacatgtcgaaagtctcctcctcgttaagcaggtcattcaattgtagaaagtcgtcgtctaggttgtcgttgttcatcccgtccattgccggactgaagggatccgtcttcttgccctcaagctcaatcagatcctcctcggcaaacatgtttatatcaaagtcaagaatatccgtctcagtaaaaatctcctttccgttttcgctgttgcacgtcgatgacgttgcttctatgtcttgcaggtattctgtgataaaaaaaaaacatttattagtacaagtcaattaatattgaggcagatcgtgctaaatgggtgtgcataaattgaatttagttttaggtaaatatatattttttttttggagaaaagggtaagataccagcaaattgattgattgtataaaatattcgaaaaataattgttatttaatatatatttagttttcaaagtctcaactatctaactgaattaaagttacagcgagtacgtcattgattgaacgcagtgtcactttagagttattctaggcgatccatacatagaacaccctgtattgtgcaaatttagttgtgaaattagccaagagaaaaggaacaaaacaaaatcgaaatgaaaataaaaaataaaaccagaaaaacaaaaagtgctgaaagagaaattaaaatctattacatctgttaatttgtgcaaactaacaacaaccaaaacgtgcgtatagccaaataaaataaaattattattccattactttttcaccaattattctgattcgaaaaaacagtctagtttttttctttccctctctctctctctctctctctctccctctgtgccgggtgctcagccagtgacgcattgcgcgacaacaacgactgacaacaaccacacaaaaatcggacatgatttttcctgctctctttgagcaccgtagtgacgtagtgagtgtgtttgtcatgttaggggctgaccatagacaaagtcttatttctttcaagaacaaaaacataattttttagaaaataactggcatgtaaatctaaaaatgagaaatgcaaaaagaaaacaaaaacagtggttaaatatggggcgatcgcgtacaagtgtaaactaattgcagtcccattttgaatgaaaaccataaagacttttattaattttaggtttcaccaaatatttacctttgctgtcttttaagcggttccgattttaaaaatcggttcagatttatccgcggaccaaaaacacctcttaacgctgcaacgattgaatccaaactgaattggggctcaagttattgtatatctctagtaagagagccggcctgtacatgtgcctaacaaacacagacacagaacagctgtcggcgcaacaagttagaaggccatctcgctcacactctcagattctcagaatgtgggagttctctctgctctttctgtctctttctgcatctgccggcttttttctacatagatttttgaacaacataggccgtaactaagttaaccattcggattgcaccaatacaattgcctcttgaatttcaccagagcggggaaggttcgggaatataatattgccatttatggaagtggatctgcctaatgagaactgcgtttcccggaaagaggtgcaccaatcgaccttaagtttacaagatcaccaaagttgaaagaattaatttttttatctaaaaacaaaagtgaaaactctcaaaacaataaacaaaaacggcagtgaaataccactttcaaacaaacaaaatttataaaatatttcttaagctgtaacagtgcgcattcgcaatgcattttgccaaaaaacaaacgcacacacatgtatgtgtatgtatgtatatgtacacatagaaagagagatcagtcgagtttatatgtgtgcttccgtctcttaggcgcttattggctgagagaacttgattcaagtcagagcgagagaacaaacaggtgtcttcgcttgtcgcacgctatttttctcgctctctcaattttcgctcatcattcttattgaatttcacaataaatattgaactaacctaagagagacagtgaaacaaagaagaattggcttttgaaattaaattaaacattatgttaccctttacttctagaataccctgaaaagtagtatcatattgactagttttcgagagaatattgagtaaaatattgcattagccggctagaaaaacgtgcgccagaatttgggtcatgaatcagctgttgcattctctcgattctgacgtcacagacccgacgagcccctccgtttaaatggaaaggactatttatgcatcaatgatgcaatcccagcatgggacgcggaaaacggacttattgtatactacgagtaactgatcatgcgaagtgtgtaatttattgtttgtactatggttttaattcatttaagaatattagcagatctcataatttgcgcaattcctttgctaaaaatcgaggcggccaactcatcggtcacgaattcaatacggatagcaattatacatacgtgtaataaactaattggtgttacgattttaactctgttctgattggacattttcaaaatgatgacctatacatattaacatccaaacacatattagcgagttctttatcagtggtcgtcgtaatgaaagatacatatgtactatacatattcattcaaagcttaaaaacccgaattgttttcttaactgcgccatcaggtgggaaatgcacctcaaacgcaaacgaaaaagtgaatcatcgcggaaatttaaaaaagaaaactgtcataatttcttctatcaattaaaaacataacaaggtatgtgtatcttcttataaaatgcctcttttacaccaacaatagtgaaacccaatgagcagagggacttcttttgacaattcacattacagaagtatgtacataaatatatgtatgtatgcacatatgttggctatcttaatatatgaatttatataatttccatgtttgaaatgacacggcttgtatagtttatcggcctggtgaccgcagaaatttttctcccctcgcttaaaattgagagcgtaaaaaatttgcttgcttgtgtgagtataataataatcgtgcgcacgtgtgcgtacttgctaggcgacgattttcgagccgaaatcaattttggctaaaaaagagagagtctggagcgagctctagggccagccaaaaaaaaaatcgtgtgcaaaaaaatcctatggcgtcacgcatctttttattctagtgcctttggtctagtctatgtaagagatatcgagagcatgtactttatccgggttacgcagaaatacagaatcacattttgttcggtctaggtcaaaagaacaacacttaagaaaacccctttcagaaataatgacagtctttgaatctcatttatgtacatatgtacatatgtatgtatgttgtgacagttcagggagagaggaaggtgtattatttccagagatggaaaataactgttgaagaaagtcttctcttaaaatttgcattccaaagaaatgtatctgggataaggctaactctgagatgaaataaaaaaaatttatgggaaacacttggggaaagaagttaccgataaatggaagtacatagattgaatatcctgagaatatcgatcgtacgagtaattacgttgccatttaccgagaacgtggacggaatggaggcgcactgggcccccagaccgccctcaatctctcaatcgtttctttaatgggtcattgcactgtgatcttcgccttcgtccgctacgtggtgactgtacctcgacgtccttggcagagcgagggcgccagatcctggggatcgtagcccgagctcgatgcctgctatctgactctttctccaactgattgtgaatcatttgttcgcttttttcgtatttaacttttttttttgcaaagcaacagtaatgagagagtgctgggtacacaggcaacacacacacaaaacacagtactcaccatcaatgaacaccggaacgtctatctcttcaactgtggcagtaggcattgctccactcacatcccggcgggatggcggctcgtccgcacctgtcagctggataccagccatggctgccagggtctgtgtctgaggcgcgctcgataaaaccgggaccgtttggttcaccattgccgtagtcggtaaacctgccaccgtttctggttgcgatcgggatgttagtgtcccagtcgtggggtacgttgagatacggcacctcctcgccgaacctatcggatttactaaagaactcgttgcaggcgcggcctggttggatggcggacgcgttggtaccgaccctggtaaaaagggtattctgatgatgcgagttcgaggcgctctgtgctctgtcccgctgcgagtgctgttgctgttgttgttgctgttgctgcctctgttgcttgtgggcactctgatcagcagaattctgggatttggcttgctgtctatcacgatcggtattgtggtgatcgttgacgtaggcgaatccttcgtaggctccgttggcctcgttctcctctgagagcaggagcagttgggcgacgagtatgtcccgccagccgccgtctcctggtattttgcgttgtcctctcggattgtcgcctcgaatgtgggtgccgcctgtactcgtgctggctcctggatcatcaatattatatctctgggattttcggtagccttcctcgttggcgttgccctgtggttgtggtttgttggtctcgacggcagcacaatggtctgggttgctcttaaggatgttgctggtgttgctctgggtctggttgattgggttgctgttgtttgattcgctcttgggcctggcttggctggtttgggcttcgacggagaatgccattttgaacgtggctattgtgttgtcaaacaatatcgatttcaatgcgatcggtgcagtttacggtttggtgtacggttcgttttcaatcggtttcggatcgacaggatatcaaaatttatacgcaattcgtataatttttatcgattcggacaggatttggcgatgagtggagcaagcgcagttaagagtgttcgtaaaatttgttttgatttttatgtgaaagaaaatagacaaaagaaaaaagattttgttattacacagatcgaggacgggcagaagcgcgatcctttttggggagtacgcgcctccaaatatcttgggttggcttgggtgggttagcaaatgtacaagtggtggtcgtgggcctcggtgtcgcagggatctcgaggatacgcctggccatcgattgtcttagaccatcatgtttgacgactttcaacagctcggatgttagatgcttagtgtgtcgagatgggtggttacgtggttggtaatgtgagtggtgttcttttcttagccatttcgttagtttgtttccattttttcgtatgtttttttccatatttttttcccattttctttctgtgtattttttaaatcttttccttttgttggttattttgtacatggattactccttttttgtttgctttttttttttgttggaattactcctttttttgtaatggaattactccttttttgtaatggaattgctccttttttgattggaattgctccttttttgcatggaattactccttttttcatattttttcttttgttttttgtctcttttcttttttttttcataaaacattcttaaaaaactattggtgcaaggactaagaaagtcgggcaatcatgaggcatgtcttaataataggagacgataggatgtggatactcacttttaattgaccgttagaaagaaacaatgaaattgttagggtccctctaaacaagctctaaaagagtcgtcgacacaagttccccttaaactgtaagcaaagaaatgaaaaacgcaattacttataggccccacaagcattatgatactacacttcagttacaattcaagataagtttgttttttacccaaccaaataagtagttccttgtttgataggagtacctttcaaaaatatcagataaggtgcttatagaagcacgcccatttttttcattttttttttttgcggctggtgctgcgaaaagctctttctgaatttcacaacagcagaggcaaaaacaacaatatggcggccacatcggcaacaggtctttatacaccagatgggcgctgcgggtggggggagggggtgtctaatcagcagttggcaacccccccccccgcacaccgttagccactagttgtcactttgataattgaggcacacgttcgggtggctatgccattatcgcaaacagatatctagaaatcgtggagccggcaaaaaaaacaaacaccagaaagcaattacctcggtggaaaatttccccgaaaagcacacgcgagctttggctaattacacactaatatatagaaatctaatcactcgaagcgccctataattaaatgtttccacaaaaatcccctgacagtataaagtttgattgtatctgtatgcgtgcgtttgttcgacgcaagtgacgtcagcagtgcacttaagtaattcaatatggcgactcgcgagttaaaaacaacaaaagcgccctctatgtactacactactactatacgtatatctatattacttagcatatggaatgctgattgctttacactactacttacatcaattcggtaaatgtgtcttcaagattggtggtctggtttttttggaaaacccgaccgcgaattcacttgtcttttctgctacgcaataggttgggtggttcctggcaccaccacttgtgtattgcttcaagtccggccgttgctcggatataaaggattactttctgggatagcgacaaatgtccactgttattgttccgcgatgaacaacaacgattgccaagtctttacactgggtttccttggttatatgtattctatatgtattttatagaactaacttcactgtgcgatctctgagtcaaccgactgcttggagtattcactacgttttgaacggctgctagtggcgaacagaaatgaaactgttggatttgctgtgcactgtgaatttcattcgttgtgaaattcaaaaagctcccacaaaccagtttgccatagccagatacttttccctatcggtgtgtgtcggtgtatttcagataagcgttcgctgtgagcaagcaagagagcgctaaaattccctgttgccgccagatggcctgcttttataaaatttccccggcatatactattttcatatgagctacaagttggaggctctttgtcacagccggccggtgtttttcatatttgtatgtaagtatgtactttaccgaaccaaacattgcaaagtacattttagtgagactaagtattcatgagtgagatatattataggcatgagtcataatcgtttgcttgggtggaccgacctatcacaatatcatttctattaaataattagatacatacattttgcacaatgaaaataaattgtatttttgactttcaatgcaaaaatatataaagacctctttttaaaattaatgaattttttttattaatatctatttattcataggttttttcatcaatatgtaaaaaaataataacaaaactattaacaatgaacgagaaaaacaactaagtttccaagtttgcacagatttgacactgtcaagaaattttttgcacaaagtacttaagctatcttagacttatagttcataagaaattataataacttgaggtaattctaatactttgcatgcatacccttagcattaataaaatattgcagaagttttttcattgaaaaaataacttttcaagatcattttgttttgggatcttatattctttgggtcaagaactttaaacaaaattaaaaacacaaaagaacgaggcatgagaatgcatggttatactaaataataatatatgtacgcatctgtatgtatgtatgtatgtatgcattagcccaagggagtgatttagttggaagtcttttaaatttc

SEQ ID NO: 26300 - DNA, 2951 bp, DROSOPHILA
ccgttcaaaacgtagtgaatactccaagcagtcggttgactcagagatcgcacagtgaagttagttctataaaatacatatagaatacatataaccaaggaaacccagtgtaaagacttggcaatcgttgttgttcatcgcggaacaataacagtggacatttgtcgctatcccagaaagtaatcctttatatccgagcaacggccggacttgaagcaatacacaagtggtggtgccaggaaccacccaacctattgcgtagcagaaaagacaagtgaattcgcggtcgggttttccaaaaaaaccagaccaccaatcttgaagacacatttaccgaattgattttaaggggaacttgtgtcgacgactcttttagagcttgtttagagggaccctaacaatttcattgtttctttctaacggtcaattaaaaccacgttcaaaatggcattctccgtcgaagcccaaaccagccaagccaggcccaagagcgaatcaaacaacagcaacccaatcaaccagacccagagcaacaccagcaacatccttaagagcaacccagaccattgtgctgccgtcgagaccaacaaaccacaaccacagggcaacgccaacgaggaaggctaccgaaaatcccagagatataatattgatgatccaggagccagcacgagtacaggcggcacccacattcgaggcgacaatccgagaggacaacgcaaaataccaggagacggcggctggcgggacatactcgtcgcccaactgctcctgctctcagaggagaacgaggccaacggagcctacgaaggattcgcctacgtcaacgatcaccacaataccgatcgtgatagacagcaagccaaatcccagaattctgctgatcagaggtcggtaccaacgcgtccgccatccaaccaggccgcgcctgcaacgagttctttagtaaatccgataggttcggcgaggaggtgccgtatctcaacgtaccccacgactgggacactaacatcccgatcgcaaccagaaacggtggcaggtttaccgactacggcaatggtgaaccaaacggtcccggttttatcgagcgcgcctcagacacagaccctggcagccatggctggtatccagctgacaggtgcggacgagccgccatcccgccgggatgtgagtggagcaatgcctactgccacagttgaagagatagacgttccggtgttcattgatgaatacctgcaagacatagaagcaacgtcatcgacgtgcaacagcgaaaacggaaaggagatttttactgagacggatattcttgactttgatataaacatgtttgccgaggaggatctgattgagcttgagggcaagaagacggatcccttcagtccggcaatggacgggatgaacaacgacaacctagacgacgactttctacaattgaatgacctgcttaacgaggaggagactttcgacatgtcatcgatgtccggcgtcggtatcgacatcaaccaggagcaggaactggacttcatcaacatattccacaactcgcagccaacggccatgctcaccagctcagaggacccctatctcgccacctactctcaggccacatccacatccagcaccaccaaattcatcacggaggagcccctgctcgccgacatgaccagcttcgacatcagctataccagcagccaggagctcggcttcggccttgtggaggacgtcagcggcagttttgccagcagttgcagtgacgtcgccgcggccatcccagcccccatccaacaccccatcattaccaacatcaagcgttctgctccggccccggtcgagtcgcagcccaccaagcgcagccgactgatgctccagatcaaaaccgagctagctccagcattcagtccgaccacaccggagattatcaaccagctcctgaatgatgatcgggtaagtatctgtaaagaacagattaaatggtgtaccgaaaaattgtcagctcttttgaagtcgaaatatccagcacagcctaatttacttaatctctcctatttgcagttcgaggctcccaccacaagtaccagtaccagcaccagcaacacttccatcagcagcagcacccatgcagacatcgtagaggatctacgcagtgccgaagaggagactaccaccgacttctcggcgccgaacacaccacacagcaactactcagccagctccagctgtgcggcgcccacctgccagaccggctatggtggcttcctcactgctcccacctcgcccgcctattcaacagccagtacgtccgtgttcagcccttcgccagccagcggaatcagcggcaagcggaagcgcggtcgccctgccaaggatcatgccgacggtcccgatcccgtgctcatgtcaagcatgaaaagcgaggaggagaggaaggcctaccaggacagactcaagaacaacgaagcgagccgcgtatcgcgccggaagacgaaggtgcgcgaagaggaggagaagcgcgccgaggacacgctattggccgagaatctgcgactgcgtgcccgggccgacgaagtggcctcccgggaacggaagttcaagaagtacctgatggagcgccagcggcagaagagcacttacgttaagcaggagcaggactgagattctcgtagccatagaatagaaattgcggagcataagcctgtcatagtacctatcgtcgtcatccaattgtttagttagttaagttgtcgttgaagaagtcgagaagcagaaatcaaatttccatttccatgtggacatcagttaagccacttattaggcatagtgatggcgcccatagtgcgcgaggagtgtttaactttaattttacttttattatgtttgagaaaactaaaaaatttttatacccacggatatgtttttcgtccaaagcgtaatcaaaaaaaaaaaaagca

SEQ ID NO: 26301 - protein, 736 aa, DROSOPHILA
MAFSVEAQTSQARPKSESNNSNPINQTQSNTSNILKSNPDHCAAVETNKPQPQGNANEEGYRKSQRYNIDDPGASTSTGGTHIRGDNPRGQRKIPGDGGWRDILVAQLLLLSEENEANGAYEGFAYVNDHHNTDRDRQQAKSQNSADQRSVPTRPPSNQAAPATSSLVNPIGSARRCRISTYPTTGTLTSRSQPETVAGLPTTAMVNQTVPVLSSAPQTQTLAAMAGIQLTGADEPPSRRDVSGAMPTATVEEIDVPVFIDEYLQDIEATSSTCNSENGKEIFTETDILDFDINMFAEEDLIELEGKKTDPFSPAMDGMNNDNLDDDFLQLNDLLNEEETFDMSSMSGVGIDINQEQELDFINIFHNSQPTAMLTSSEDPYLATYSQATSTSSTTKFITEEPLLADMTSFDISYTSSQELGFGLVEDVSGSFASSCSDVAAAIPAPIQHPIITNIKRSAPAPVESQPTKRSRLMLQIKTELAPAFSPTTPEIINQLLNDDRVSICKEQIKWCTEKLSALLKSKYPAQPNLLNLSYLQFEAPTTSTSTSTSNTSISSSTHADIVEDLRSAEEETTTDFSAPNTPHSNYSASSSCAAPTCQTGYGGFLTAPTSPAYSTASTSVFSPSPASGISGKRKRGRPAKDHADGPDPVLMSSMKSEEERKAYQDRLKNNEASRVSRRKTKVREEEEKRAEDTLLAENLRLRARADEVASRERKFKKYLMERQRQKSTYVKQEQD

SEQ ID NO: 26302 - DNA, 7269 bp, DROSOPHILA
gtttgaaagccaagcctgcactatgaatcctacaatttatttgaggtaagtacacgtatttcactttaaataagtatcttagtattttctatttcttttagctgccttatggtcttctcagtgtttctgctgggaaaggtaaatgctgagaacgaagatgagttcgtcacagaaaaacagcgcctatttagtgtgtatggtgattcttcggttgatgaggccaccaaataccggaacatcgacagcctggtcactttctacgataagtacttcactcgacttcagttgaaaccggacttgaacacacgcgcccatgatctcttgaggcgttacaaggaggaaaatgctcgtgtggtcttggtggacggtactcccgcacaaggcggattctggttgccactggtgaagctactcattgtccagctgggcgtcgaaattgcctctgagggagtcaagcgtgctattgaatcctaatcccttccattaggaatcaaatcaaattggatgtttattcaatatcatatgtaaaaatttaaataaatctttttgagcaaagaaattatactttccaacccattccaataaatatatacttccaatttgtggtttggttatatattttatacgtagtatttacaaattaatttatttgctgcttgcgatatatgaaaataccaatgtacaatgtttatactcgtaattgaatcgttagctaaacacttagctaaaatgtgagtgggtgaggttgccttcgtcaccaggttaaaattcgaaaaacataaacctgctgtgaaaaatgcatatatacttaaactctagatacgtcgatccttaaatttctgtacagttttgggatttgcgatcgggatagagaccacatctatggttaatgctaaacaactgactcttaagtaagctcaatacgattaagcttaggcgattacaactaggttaccaactagacatagaaacgctagccatgcgcctggaatccgaattcctaaacgatctgcacggcggcatgtggtttctcgatgaggctactctgtgcctccttgtccttctccgcattccggccgattgagacgtgctccggttttagatagtaatgcggcggcggaggctgcgatgtggcttgaaggcccgccttcttccgacgctcgcggaggaagtgcagtcgcacatagttaatgggtatatcgacgctatcggcgcccacgccctcggcgtcgatgaacacgccgcgcaccaggatggaattggagcacttgagggcagcgaggagcaggaaaggaacgatatgtgtcagccagaagctcagcagcttgttatctgaaggatatagaaacatattaatatgattacattactacagccccgaataaaccatcttacctggatacagatacacatccagcagattccagatgccgcgccaggcgttcacagctccaaagaaagtcattagatagtagatgtcgcatatgatcagcttgaggattccgctgatccgacgacaaacgtacctcatcagtgggtgaataaggaaggtcacaaaaaccgtcagatatccaatgagctaaaacaagaaaaaggacttcaagtactgtttaagccgaaggactatcagagatccctaccagcgatccccaggccgatttggccttgtccgccgggaacagcagcaggtcaaagattccccagacgccgcgccaagcgatgaccaccaggctgccgatcacaaagaccgagaagagggtgtccaaaatgtaaaggccaggttgatgaaaaccctgaagaattccggtgttaggaaatccaatctactatacttcagtttggcaaacagcttacgggtattttgaacatggtgtccacctcaaagtagtcactcttgtgatccatggtaacggtgtagggagctgctccgaggttccgcagagtgcgtgtggctaccagaaagatgagcgcgatggccgtgaccacggacacaatgatcagagagtccacactggtcagccaatcgcagagcagccaggcaccacgccacatattcacgcaaacgatgccgaatacggccgtatagagacgcgatacggcgtagtatgtgagtcgcctccggtccggatggatgtgctccttgaagaagttctgtgtgactgtgaagaagaagtgccccagtccgccgatcagaaagctggccatcgcagacagcggcaagctgccgggaaacaggtagacgaacatcagttcccaggtgccacgccagtaggcgatcacacagggagccaccaccaggcaggacatcatcatgtccagcagctcgagcagcagctcgtggagatcccggcgcggcgtctccgcctccaagcgcttctcgcaggcgggtgagtgtgtggcatgtgcgggtggcaggtgcactggacgcggatgcgtgtgtggatggaggtgctgcaggagctgctgatccgacacggataccgatccatggcaatgagatttttgcggcctgccggccgtcaaactgcccttgtccgtgggcaacatctcgggtttattgggattttacaggcttttaaggtctcctcctcctcctcctcctcctccttctcctgcgcctcccttctcctctgttaatttccttcaattatgggcaattatcactccggatatttcggctgggagagctcctgttcgctgctcgtcggcggctcggttgtttttgaaatggtcaggtaactaaatgcattccgcaaccggtgtgctctgcaaccgtcaccgtcgctgcatcgccgctgcggtgataataatctggcactgataattaagtcgtctatctgcgaacccctctcgatctctccagcgtctggccgcagttgcataatccgcactagcattcgcatccactgtcacatccacatccacagccacatccacatccacgttcacgttcacgtcgaggttggcgttcgccgtctggaatctgggtgagttgtatgtattaaagaacaatcatcaagcccggctccttatcactatttccaccgactcaaatgccggttatcaagctctgctccgggcaagacattcaactagggtcctaataagtactttatattgtagtctcttttttctttcctagtttatagacctagcagctgacgtgattgtgggcttatcaaaatccaacgctttccagtattcaccgacatttgcaagtgaaccttatgcactatagtagtgctctaagttttggcattaaggcaggcttactataaaatctaacagataaccccattgtcttggaaagctgcgcacattaattgaatcttttattattaggtggttttattagtgagctagcagattatagcaaaatttttagtttgatttacagaacattaacattgacgcttagaaacgcaatgttagtttttaggtagtaactacgaacacctgaatgaaactttcccatgtgactcatcaacttcaccatcaaatgtcatgggaatcctttatgaggggtgctaaaataagatccatctcaacaaccagatatgaaaagccagcacacttgtttgtttgcccatgtcagatgtcccagattttatggagatcacctgagagagccgggctcttttactgatatctcaacgtcaacgtgacaattgtgcgttgagtggcctctccacgcggcacttaagtcgccccctcggacttatctcaagtgacttaatagatccaatttagtggctttgattaaacgcaaaatgccagcgaaacaaaaagcgaaagtgatgtccaacacacgacagggcatcgaaagtgtcgcgaggtgtcttgaacttgtgccacttgaacttgccacttgagatgggcaggtcaggggcttcagttactctcaaatggattataaatacattcgctgaactacagggttttttccctttaaaagtacttaaagagcaatcaaatgggaatttttaatgtcaagatccaacattttctaactttcagaatattttaagtaatataaataaataaatataaataagcagtttcgtgtgttgttattctttccctaaatatatatgctctctaatgaatgctacgctgattccatttatagtcttttgagttttcaacaattatgcactgacagtgactaattagcaaaagtccggctcgccagccccttgaaattaatgcaggatgtttgtgattttcgtgttttgcttgccgttcgtctgcggcggcaacgcggcgtatgcgcgataattaaacacacgacttgcatggggccgccgtcgaaggtccaaaagcggaattttcgtcggatccactgaggctactgctgccatcgctggctgtttgggtcaagctcattcgcatttaaagcggctggctaaatagacgacccactgggcggctcattgcgcccagcaagacttcctcgttttgggggattcagagattgatggagggatgcttgtaaattgagatcagggatctgtcgcaatccggggtattggggaaatggggaggggggggggggtggggtggactgggaattttcaagttcaaactccccaagtgggccaagtgacctgccgatgcgatgcgatgcaaatgcacattgtactccaattatgcgagataattgacaaagaacgggtgacaattcaaatgcaaaattggacactgcgactgattcttaattttcgcaaggctctcgacaagttccagcccccgacttacgacttggctgccagctaattagttttgccaacgcaaacaagctgcaaatataacgcgaactctatttgttactgggcaaagatatataagatatatagataactggaggggctccgccaaacagtcaaatcccacgaaatgccgcattttatttggatattgttaagtgtttatgatcttcaatgataatttgcctttgactaattcaaagcgttttcaggtgcgataatctctagagtagatctccttacagctcgccttttgttcagtatttgctttacccattatcagcttctaagtgctctttttatttttgcctgcttttctcaagttgaataatcgcagctgatcgagctaatttataagtttgacggccgcacaattacttcgagattgaacaaacatttatgtatgttctagaggcctttatttgtaacacttcaactttaaatatagctaagtaaaaattgtattctagagtcttaaatacataactatttttatttgaatagtaatgaatatttgctataaattcgtttacttatttcaagtaacaattcgtttggcaacactgcgcatgagtgattaaagcaaatgcttttggttttagttttaagatatgctaatcaaaatatgtaatctttttttatcggttattttctatcaattatcgttttataaagactgcaaacaagattaaaaagggatcttaatcggtttgttttcaatttcccttatttcaaagtgaaatcgatttgaagtgaaattttacaatattttcggtgtcaagagcaatattacgaaatttggcgattagattcgaactgacttacttcggaatcgttgtcccttatcagttatcgatttacaaatattacaaaattatatatttcgagcgagcggaaaatgcgtggacagcgataaacaaataacaaacgcgaccacacacagacacacacactggcaaaagcacactatcacactcacagctacgttggactacaataaatttgtgcaagaacaaaaacatgggattaccgtttaaaattagcagagcttgctgttgctgattttattattattattattactttttgctgctgggtgcgtaagtcgccagtgcgaaagagggagatgcagcctttattcagttgccatcacttttacaacacactcacaaacacacacaccggaagtgatcgggttttatcgaattgcttcgattactatttgcgttcggcttcgattcttcgttttcgatttcgttcgattgcgaccgtttcgaccgttagacgttggccgttgatgttgatgctcgaatgcgcgtacgcgacttctggcgctactatatatatgcctatacccgtagaaattggctaagctcgcccgctcactcacacacacacacagacactcgcaggcacccacaaatactgacgcagttgcaatctagtttatttgtacggtggtttgaactcggcggactgatcgctctgatcgttctgatcgctcgtcagtcgccggtggccgccgctactaaactggacaactgtggttccggggatttgaaactgcgtctgaattgggtctccgccgcgaactgagtgccccaaaagcccccagctcaaaaatcgccacagctttgcacccatttccccttttatcgagtcgaaatctgagcttgagcatttttaactttggcgaaaatgagattttcttcttttgcccgggaaaagcctactactttccgattttccagatgttgtgaaaccattacgaaaattttttcttctaatactttgaaatggtttgaatctgtccattaagagctttcttattagcggcaagctttattcacggaatgtggcatcactttcattttgcattaggatcacttttaaacagctacagtattctttagttacaaaatattgactataacacgtagaatatcagttaatttatgaattcataaatactaatttgaaattttcacctatgaatttcaatttctttagagagctgtgtaaacgctttgttgacaggtacctttttcgcttaattatgaatcaattatttaatgatacgtgtattaaaaaactattacgtagcgatatacaatgtttcaagtgccatttattataactggtggcactaatacgacacaaataagcatggaattgatttagttaataaagtgtgagaaatagtttatatagttggaaaacttggtgaaatgattttgcgcattaattttagcgaaatctcatgagaatgccctaaagcttcattagtaggtacatttttgatttgaattataattttaccagaatttccgtaataattcgcacctaataaactcataaaaacgttgcaagtgcaacgagtgcaaatctataaatatttaattacgcctgagaactggaaaactggctaacacagttatagccactttcccttcgaatcggattgttgtaattaatgcgtgaataattttagataacgaaatta

SEQ ID NO: 26303 - DNA, 2218 bp, DROSOPHILA
agcgatcagaacgatcagagcgatcagtccgccgagttcaaaccaccgtacaaataaactagattgcaactgcgtcagtatttgtgggtgcctgcgagtgtctgtgtgtgtgtgtgagtgagcgggcgagcttagccaatttctacgggtataggcatatatatagtagcgccagaagtcgcgtacgcgcattcgagcatcaacatcaacggccaacgtctaacggtcgaaacggtcgcaatcgaacgaaatcgaaaacgaagaatcgaagccgaacgcaaatagtaatcgaagcaattcgataaaacccgatcacttccggtgtgtgtgtttgtgagtgtgttgtaaaagtgatggcaactgaataaaggctgcatctccctctttcgcactggcgacttacgcacccagcagcaaaaaattccagacggcgaacgccaacctcgacgtgaacgtgaacgtggatgtggatgtggctgtggatgtggatgtgacagtggatgcgaatgctagtgcggattatgcaactgcggccagacgctggagagatcgagaggggttcgcagatagacgacttaattatcagtgccagattattatcaccgcagcggcgatgcagcgacggtgacggttgcagagcacaccggttgcggaatgcatttagttacctgaccatttcaaaaacaaccgagccgccgacgagcagcgaacaggagctctcccagccgaaatatccggagtgataattgcccataattgaaggaaattaacagaggagaagggaggcgcaggagaaggaggaggaggaggaggaggaggagaccttaaaagcctgtaaaatcccaataaacccgagatgttgcccacggacaagggcagtttgacggccggcaggccgcaaaaatctcattgccatggatcggtatccgtgtcggatcagcagctcctgcagcacctccatccacacacgcatccgcgtccagtgcacctgccacccgcacatgccacacactcacccgcctgcgagaagcgcttggaggcggagacgccgcgccgggatctccacgagctgctgctcgagctgctggacatgatgatgtcctgcctggtggtggctccctgtgtgatcgcctactggcgtggcacctgggaactgatgttcgtctacctgtttcccggcagcttgccgctgtctgcgatggccagctttctgatcggcggactggggcacttcttcttcacagtcacacagaacttcttcaaggagcacatccatccggaccggaggcgactcacatactacgccgtatcgcgtctctatacggccgtattcggcatcgtttgcgtgaatatgtggcgtggtgcctggctgctctgcgattggctgaccagtgtggactctctgatcattgtgtccgtggtcacggccatcgcgctcatctttctggtagccacacgcactctgcggaacctcggagcagctccctacaccgttaccatggatcacaagagtgactactttgaggtggacaccatgttcaaaatacccggttttcatcaacctggcctttacattttggacaccctcttctcggtctttgtgatcggcagcctggtggtcatcgcttggcgcggcgtctggggaatctttgacctgctgctgttcccggcggacaaggccaaatcggcctggggatcgctgctcattggatatctgacggtttttgtgaccttccttattcacccactgatgaggtacgtttgtcgtcggatcagcggaatcctcaagctgatcatatgcgacatctactatctaatgactttctttggagctgtgaacgcctggcgcggcatctggaatctgctggatgtgtatctgtatccagataacaagctgctgagcttctggctgacacatatcgttcctttcctgctcctcgctgccctcaagtgctccaattccatcctggtgcgcggcgtgttcatcgacgccgagggcgtgggcgccgatagcgtcgatatacccattaactatgtgcgactgcacttcctccgcgagcgtcggaagaaggcgggccttcaagccacatcgcagcctccgccgccgcattactatctaaaaccggagcacgtctcaatcggccggaatgcggagaaggacaaggaggcacagagtagcctcatcgagaaaccacatgccgccgtgcagatcgtttag

SEQ ID NO: 26304 - protein, 453 aa, DROSOPHILA
MLPTDKGSLTAGRPQKSHCHGSVSVSDQQLLQHLHPHTHPRPVHLPPAHATHSPACEKRLEAETPRRDLHELLLELLDMMMSCLVVAPCVIAYWRGTWELMFVYLFPGSLPLSAMASFLIGGLGHFFFTVTQNFFKEHIHPDRRRLTYYAVSRLYTAVFGIVCVNMWRGAWLLCDWLTSVDSLIIVSVVTAIALIFLVATRTLRNLGAAPYTVTMDHKSDYFEVDTMFKIPGFHQPGLYILDTLFSVFVIGSLVVIAWRGVWGIFDLLLFPADKAKSAWGSLLIGYLTVFVTFLIHPLMRYVCRRISGILKLIICDIYYLMTFFGAVNAWRGIWNLLDVYLYPDNKLLSFWLTHIVPFLLLAALKCSNSILVRGVFIDAEGVGADSVDIPINYVRLHFLRERRKKAGLQATSQPPPPHYYLKPEHVSIGRNAEKDKEAQSSLIEKPHAAVQIV

SEQ ID NO: 26305 - DNA, 4512 bp, DROSOPHILA
gcaaaagtaaacagcgagcgcatctttccccagctcgtctttatagagcaatttggcgcccaaaagaatgttccaacacggcgataaaagcgatgtgtctgtattagctggacgacacctcggggaagagaagggtgatcataaatgacaaaactttccagcaatttaatattcaatcctccttgttgttttgttctctacactcgttgcaaaattttcgatataaacaatgtccctttagctcataaacaaaacttttacctaaaatacgccattaagtgcacaaagaaaatcaaaatggtaaactatttgcattcctttacactaaaactactccctgtcaactagttttaaaaactggtatttaaacataaaacggtgccaattcaaataacacctaattttcaaaaagcaagaagtcagccgaagatttaacttcttttacttaatttcccacagataagagaatttaatgactttgctgatataaagtcatgtttttgcgaatatttgtttttttttaatttatccactttatccctctgtaagcgttccgttgtcctcctagacatattcgaactctgtcagttaaggcaacgtcttggcattcgtccaatagcaaggcagcccacatccttgctccccaccacccagcgccttcggctattcagccccctagacttccgtttccgttctgctgggtatttgcaacattttcggctgtctcctgtcgactgccagacttttatacttttatagggcgggggggttctcggtgaaagcgatgaaatttccatattcctcgcattagccaactagcggcggctgcgctgcgctgagtgactgctcattaaaatgctataagtgtaggaacaatttgcatgttgcacgagcttcgagctgcgagctgcgcgccacgagtctcgggcttggagctgaataattaacaccccagcaagacctgttggcagctggcgtttctcttaactttattcgaggttcaggagcgtacaatcagtgagttggagttctgtcggatgaagtccatgtagttgcgtatggccagaaagctggacatgatgcggttgttctcccagcgccagtcgatcatgatgcccaccaggtagtagttctgagtgacgtgccccttcttctgcaaccccactagaggtgcgcccaagtaataagctaccggttgcttgtggtagccacaaaccgtgttgctgctggtcaccagcgtcttgaccttcgattgacagaagccgcgactcagcgtgtttacccaggtctttagtctgaagtcctcaaagacgcgaagaccagctactacaaacgtctgagcaaccagggtctcgttgagcaggcttggaggtggcatgcaaattggcattacatttgggtagatctttgcgtctcgctgaagagtcagcaccgccagggagttctttaaggttcgcgagtcgtagtccggatggatggctatctcggccagcttgatttcctgcgacggacgcacgcaatagccatccgtttcgcagactcgcactccgaccggagcactcttgttgtggacacccaggtggacggagaaggcctccgctactccgttgtactggacaaaacagtgggcgggcgccaagacagtgcgcttcgataccagcacgcccagacatccattgtcccgaatcttgccctcaaaccctgaagtattaaacgaagttgtatttcggattaactgagcagctcagagattcttacccttgccatacactatccgggccacccactggtgctccgtgggaatggcgaaggtgctttgcatattgagcatctgatcttcgtcgaatgcaccgcactggtcatcattcactttcgccgaccgaacttccgggccaaaaagaccgacgagcaataataaaactgcgattctaccaagcattctgaagcgcagctcaaagtcaactgactgggagctggaaaaacagacaatgcatgttgctcaggggatttacccagaagcttatgatcgatagagcttagcaggaacactagaacgaaaatacaattgtttttacaattttttaaaatatatatgaaatcaatagtgaagtgtatttcgaaacctttatataaaatattttaagattttaaatattactattagtgttactaatactatttgatcagcacatttcccttctccaagaatgagttgatttctttccgtgtaatgtttgttaaaattttcaactaactcttccaactacctgttattctacgtatctaattaatggtgtaagattacattacggctaccgatcgaaaacccgtttccgatgcgaatccctgggcagttcccgtcacgatgcatcagttatttcactgaacccacaacattttacttcctcatgttgaatagtttattgagtattcacataacaagttgtactttctacttcaaattttccattatccaggagcgggcgcgtcggacattctgatagacttgagtggtagcctgtccggcatctacgttccggaccagaatgcccaccaggtagaagttgtgcggcttctcatctcgcacatcgatgtccatcagtggtgctcccggatagaacttggtcctcttcacgggatagccgcacagctggttcaccggtactaggacgctggaggatgtcaattgtttgcacttttgagtagatactgtcatggccaaccccttgcccttctccgaggccatatggttgaatccggtgtagtgcaggttgcgattggtcagcgtttccggttccgaagtgccctccaagcagatcggctgaacccagttggtccactcgactggtttttccagccgaaggatggccaagtcgttgtcccccgtgtccttgtccgtttgcggatggaccttgatctccaccaccttgtacagctcaggccccggcacacagaagtccttgtcgttgcacgacagctcctcctccggggagtcagtctcgtcccaaacgcccaacattgccacggctttggtgtctccggatcgttggctaaagcgctttacgcacgtcgcagtactgaggatgtgcagctcgttaataataactacggagcaccttgtattctcgtaccgatttcctagaaaatcatcgaaggtggacacaaagggcattagcaaaagcataggtcatgttattaattattaacttggggctttagaagggggcttttcatagttaacacttctaaagttaactgaccctgatcctccagcagaatgcccacccagggattctcggagggttccgcctgctcgttggtggtgtacaatagcttttcatccagacgaccgcatcgaaattctgccatcgtcaatgctgaaaacgtatatagcgtttttaataaatactcgtagtaaacatacaactgtttcaattttactaaccgcctagccaagccagagtcaaaagctgaacaagttttccgctgtgaagcatttttatgacgatgtgctcaagtgctcagagttaactaatcgaacagaattgaattgaatagtatgagatcgcgtagagcgcagtttccttttgctgtgaataattaattaacaatctcccgctctctcgttgtttattattaagattctcagtgtgactatcaagcatttttggtaaaccttaatctttttgaatcttccttagtctgactactttctttgaagtcatattaaagatattaagatatgaagatatgccacttcttagccaacaaaatttgctcacagacctaactcaccttcaacttacaactagtattggagttccccaatcataaattaaattaaaatattttattaactcaaatagacggcatatcggctgtatatagtcccatattaggcatattaaaataattgtgcaaaatgccagagttgcggatttcaaatcattttggttttgctcgactgcttggaaatcgatggaatattattcttaaccgcttaaaattacaggcaattattaggaccttcattatatagccattagactcttggaatctcccctcgcgccctcttaccctgggagcctgctaggagcctcaactaggttgaataattaatgtttcaattagaatacgattatcgaaggcaagcgcacaagctgctcgatgggatgcgaaggtgaaggacaccgaaggacattgtaactcatccggcctggtggtagtagtggtggtggggggctggacttaacactctactaagaacgcttacaaattgccggcgagatccggttggcagtttattgtccactcaacttgacctgcttgagctggggcgttcataattcgcattgttatgagcccgtccctcgcctttgtggccatccaatcaatgtgctcctggtcgggtctggactttaatgaacggccggctggcaggctgtttggttggttggttggttggctggttgtgcggcggtgctcgtaaaacttggctgccctagccttgag

SEQ ID NO: 26306 - DNA, 1782 bp, DROSOPHILA
cacatcgtcataaaaatgcttcacagcggaaaacttgttcagcttttgactctggcttggctaggcgcattgacgatggcagaatttcgatgcggtcgtctggatgaaaagctattgtacaccaccaacgagcaggcggaaccctccgagaatccctgggtgggcattctgctggaggatcagggaaatcggtacgagaatacaaggtgctccgtagttattattaacgagctgcacatcctcagtactgcgacgtgcgtaaagcgctttagccaacgatccggagacaccaaagccgtggcaatgttgggcgtttgggacgagactgactccccggaggaggagctgtcgtgcaacgacaaggacttctgtgtgccggggcctgagctgtacaaggtggtggagatcaaggtccatccgcaaacggacaaggacacgggggacaacgacttggccatccttcggctggaaaaaccagtcgagtggaccaactgggttcagccgatctgcttggagggcacttcggaaccggaaacgctgaccaatcgcaacctgcactacaccggattcaaccatatggcctcggagaagggcaaggggttggccatgacagtatctactcaaaagtgcaaacaattgacatcctccagcgtcctagtaccggtgaaccagctgtgcggctatcccgtgaagaggaccaagttctatccgggagcaccactgatggacatcgatgtgcgagatgagaagccgcacaacttctacctggtgggcattctggtccggaacgtagatgccggacaggctaccactcaagtctatcagaatgtccgacgcgcccgctcctggataatggaaaatttgaactcccagtcagttgactttgagctgcgcttcagaatgcttggtagaatcgcagttttattattgctcgtcggtctttttggcccggaagttcggtcggcgaaagtgaatgatgaccagtgcggtgcattcgacgaagatcagatgctcaatatgcaaagcaccttcgccattcccacggagcaccagtgggtggcccggatagtgtatggcaaggggtttgagggcaagattcgggacaatggatgtctgggcgtgctggtatcgaagcgcactgtcttggcgcccgcccactgttttgtccagtacaacggagtagcggaggccttctccgtccacctgggtgtccacaacaagagtgctccggtcggagtgcgagtctgcgaaacggatggctattgcgtgcgtccgtcgcaggaaatcaagctggccgagatagccatccatccggactacgactcgcgaaccttaaagaactccctggcggtgctgactcttcagcgagacgcaaagatctacccaaatgtaatgccaatttgcatgccacctccaagcctgctcaacgagaccctggttgctcagacgtttgtagtagctggtcttcgcgtctttgaggacttcagactaaagacctgggtaaacacgctgagtcgcggcttctgtcaatcgaaggtcaagacgctggtgaccagcagcaacacggtttgtggctaccacaagcaaccggtagcttattacttgggcgcacctctagtggggttgcagaagaaggggcacgtcactcagaactactacctggtgggcatcatgatcgactggcgctgggagaacaaccgcatcatgtccagctttctggccatacgcaactacatggacttcatccgacagaactccaactcactgattgtacgctcctga

SEQ ID NO: 26307 - protein, 568 aa, DROSOPHILA
MAEFRCGRLDEKLLYTTNEQAEPSENPWVGILLEDQGNRYENTRCSVVIINELHILSTATCVKRFSQRSGDTKAVAMLGVWDETDSPEEELSCNDKDFCVPGPELYKVVEIKVHPQTDKDTGDNDLAILRLEKPVEWTNWVQPICLEGTSEPETLTNRNLHYTGFNHMASEKGKGLAMTVSTQKCKQLTSSSVLVPVNQLCGYPVKRTKFYPGAPLMDIDVRDEKPHNFYLVGILVRNVDAGQATTQVYQNVRRARSWIMENLNSQSVDFELRFRMLGRIAVLLLLVGLFGPEVRSAKVNDDQCGAFDEDQMLNMQSTFAIPTEHQWVARIVYGKGFEGKIRDNGCLGVLVSKRTVLAPAHCFVQYNGVAEAFSVHLGVHNKSAPVGVRVCETDGYCVRPSQEIKLAEIAIHPDYDSRTLKNSLAVLTLQRDAKIYPNVMPICMPPPSLLNETLVAQTFVVAGLRVFEDFRLKTWVNTLSRGFCQSKVKTLVTSSNTVCGYHKQPVAYYLGAPLVGLQKKGHVTQNYYLVGIMIDWRWENNRIMSSFLAIRNYMDFIRQNSNSLIVRS

SEQ ID NO: 26308 - DNA, 15141 bp, DROSOPHILA
tatatataatatacatacgaatatacgtgtacacgcgaatcaaaatagcatttgctgatagtgtggctgctaaggtagctttctatgctgcggcctgtataggtgagcgtttgccacttgacaactgtggaacatttgcattttcattatgagtgtgccataaatattcatttatgataaatgcctgtgtgcagctgcggctgcaattgcaacgaaagcgaacagctcttgtttccgcagctcaactgaatttagccacggaacagatcataaataaatgtattaggctgatttaacatagcaaatcacgtatactactacttttagtcaataaaactactaatactaatccaagtctaaagtccagtagcttcaaacacggcaaaaagtgaacccactagattcatcagctgttaccagggcaactaatacgtcacgctcttgtgagcgtggccgaacacatcgcgtatacgcaacacgtcacgcacaattcgcaaatcgcgcctcttttcgtttgtttacattttggccaatacgttttcatgcggctccctctttctcttctcgtttgcctttctccttctcttgcctttctcacgcacttttcggtgctcggatgcgcgctcttctggatcgcaaatttgtgcgtttcgcatttgtttggagtcaatgaactttgttgctcgctttgttgtctcctctctctcccatgctccctgctttatcgcactccccgtttatctcattccgcgagtgcgtgcgacggtgcgtaagttgccaatttttcgtatttctcgtatttcgcacattctcgcgacccattttttaccaagcgctcgccgtttgtggctattttgcgttcgttgaactctacaaggtgattttataggtcgcacaatttgtgggtgctcacttgaatgtatgtttcaagaatattaatatttatgtataaatactcaatatatatttataacattttattatcgttgcacttgcagaaatggcggaaggtaatggcgaactgttggatgacattaaccagaaagccgatgaccgtggcgatggcgagcgtacagaggattatcccaagctgctggaatacggtctggacaagaaggtgagtgctttgagaacccaacaccacatgccaactattaccaacatttgccacatgcaacatatgctcctaggtcgccggcaaactggatgagatctacaaaaccggcaagttggctcacgccgagctggacgagcgcgccctggacgcgctcaaggagtttcccgtcgatggtgccttgaatgtgttgggacagttcctggaatcgaacctggagcacgtgtcaaacaagtccgcctacctatgcggcgtgatgaagacgtaccgacagaagagtcgagccagccaacagggcgtggccgcgcccgcaactgtcaaaggtcccgacgaggacaagatcaagaaaatcctcgagcgcaccggctacacattagatgtgacgacaggtgagaaacattttcaagtactggagaaacttttatctaatactattacttataccgtactcaggtcagcgtaaatacggcggaccgccgccgcattgggagggaaatgtgccaggcaacggttgcgaggttttctgcggcaagatacccaaggacatgtacgaggacgaactgattccgctattcgagaactgcggcataatctgggacctacgactcatgatggacccgatgacgggcacaaatcgtggttatgcatttgtcacattcacaaatcgcgaagcggccgtcaatgcagtgcgacaggtatttaagccaaccacagatcatccataccaccaaccaccagtccagcccagcccagcccacctgaaaacccagtctccccaatgaaaaccccaccccatccgaccctgaccaccaaatcagtttgatccccgcttcaatgtttttacgtattgctaactcttaagacctatacaaatatcctatatatatacatatttaacgtattgtatccacatatttactatcgtgttataacacatcggatgaagtaggaacagttatgcggccaaagcaaaattcaaatatttgaaattctccacagcaagagcgaaaaattaccgatttgatcacaaccgatttggcgcttttagatccgaccatgagaaattctgcaattccatttagtttttaacgtatgcttactttacctctctgcctttgctattaagaattcgaactatgggcaacgctatctgtctcactctctcgctgtctctctctacttgatctttctgtaacttatgtaatgcatgtcccgtctcctatgagttgtaatcttgatttacgcaaacgaatctctacagcgccctaaaatcgttcaaattgcaagtttgaaaagagttctctcctcttcgaataaaagatttggcctcctccctgataaatcacacaaccccctaccctcctctctctctctatcgtctctatatctgttctacttcctttttagttgaattttctcttgtcttaagctcagctatgtagctatcaacttttgtagacaacttagcagcgtacgttcaaaaatctcactgtctggttttatttagacgagcatgaccaaaaatctagaccatgatattgggaggcaagacacgttgcctccatatatcacctgccctaaccagttaaccactaacaaaatgtttttcctttaacatttccaaaacgacactcaaccgaaattcagaccacgcggcccgcttcaaaattggtaacgaaaacgataagatttacaaatccgtatattattatttaacccattcccctgttcttatctaccttatttgccttagttcaaaattatttacttgttatgattttattatttatttatttattattaacattgaattggtattaaaacgaatcgttttaccttccctcccacaatttagctcgataatcacgaaataaaacccggcaagtgtctaaaaataaatataagcgtaccgaatctgcgccttttcgtaggcaatattcccaagtcaaagggcaaagatgaaattttagaggaatttggtaaacttacaggtaaattgacaaacacaaaattaaccaaaactgtattttaaattaccaacactggagctgctatccgccactccgcaatcggcactaaattgtaaacaaaaatccaattggctataccaacaaacaacattggctaattgcagggaaaaatactacaatagtttgtttactaggctaggttaggtagaaagggtcgtagggttttcttttttttttatattccgttccgcttaatttatatgtctttgttttgaactcattccaactattcacccccacctcaaccatccaaacatccgccattgccatctcgacacttcaaaatgaaaaactgaaaaccgaaaattaagaattgaaaagtgctctcccccgaatcaaaaattgagacactcttttcaaatgcgctaccgcccccatgatagaaaccgaaccacgaacatcgtcggatggtttttctcagtttaatcacacatatatgttgcctcatatacatacatataagcaccctcacacaacgacaccgatactattacatgcccacatagatacagcgacacgcccatttgactcattgccattcgttacaagcttgaattgtcgtataagaatatttctttttaacttatttacataatatctccagtcattaatcttgcctacgaaaaagaacaaaccaaaaaaaaagatattcaaatttttaaattttttaccaaattgttatgcattccaaaaattttatttccattatgttttgtaataataatcacaccgtaggaaagcaggctcttaaaactataaatattaagtatacgccgtgtgccagctagaaagtcgatattcccatgaaatttctaaggtaagatcgagtcgcatttcactttctagctgcactgagcccaaagagttgccctttttgttaatttcgaagtaattatttcgcatagtaagtactagtactggtagtgacaaccgataaatccacatcgaatcaactggaatttagctaaagaacaacgttatttttgagtaaattcatttttatttggcacgcattacaaaatataccgaaaaataagttaataaagtttagataatagaattcaacactttatacccccccacccatgagaattactatcaaacacgaacactcattcttccacctttgaaaccacaagcccgataccaaatcaatccaaaatcaaatcgcagtaccaatgaattacaaatttttcatagcaaatcaaaattttcttttgttttgtgtgaactttcaaacaattgcagctaaatgattttgaaattcggacaggcaaaaagattggtgttacgatatcatttaacaatcaccggctatttgtcggcaatatacctaagaatagagatcgcgacgaattaattgaggaattttcaaaacatgcacgtaagtgatccaaaaaccaacagcaacagcaaccacaaacaaagcaaaagaccccaaaaacaaccagcccagcaccaaaaaaaaaaaaaaaaaaaaaaccaaccccaattggctcacagaattggccaaccccaattaattgtacttaatcccataaatgtttttaggggcgatacttgcagaattgaaaaacgcatggaagcctacaaaaagaagtatcgattggatttttgttttgcaattttcgcttttaaaatgccatatccccccaaatcgaaaggaatgaaattatcaaatacttccgcacaaaattgaaacattttaacaagcgaccagatgaaaggacatggcttttttttcaaattaaagccatgtccttgggtcgattgtattattcattattctttcatattctgtagcgttgagcgctgttagtaaatacaacaaaaaattaattgttctttagttttttcgtttaacgttccgattgttaaatgtgcccaatttgttgacattgaaaacctgtagctgaacaacaacaattcgctaaccaaaacattttgaatatttttgaaagaaaaaaaaacggaaataccaaaggaataaacctagtttttgttttagtgcagacctatatcacatacacatagctaataaacggcgcacacaaacgatcccgcccccaaattccagaaaccaaaaaaccataaaccagaaaccgaaaaccaaaatgtgaaacagtaattcgcctactcaaatcgatatgttttggcccattcatgttgaatatatgaaattcatttacttaatgactggagactacaagccttaaaaatgaactcattttactctaactatctctgtatctatctctcacataagcgctacttccccgagcaattgatgcaaacgaatcgacgagaaactaagccaaattcaaaatccgatatccatatttcgttgttacgttattgttctctacatatatctctaccgatctctctttgtatctgagtgtacacacgttctctctatctcttaatctgtctaactctggctatgtttgtgtatagttttcccgttatcgtttccattactccaaacgaaaataaatccaagctcaatgtgtgcttctacttcgtgttgtgtttttggttatatacatatatcctttttactttcctgttttgattgcaacatgtactatataaaaacaaacagcaacaatagcaacagaggtttttaagtgtttttctaaatgtgtgtttcattttgcaatactactctctatacgtactacatatccaacttaatgttatatcctcccccgctctctgtaatactttctctaaatctcgaacctcgcatacacgaaaccgaaaaatgtattagcttagcgcattcaattattcaaaaatatttcaaaaagttaagcaagcagcaattgttggcattggttttcaaaatcatctaattcgctctacatattatatagagattcagattacggaaatgcacattactttacagggcaaaattaatagcgaaacacccttcgattgtcgtgtaaattttgtgcgtttcccctcaaaatgtaatccagtttccaattacttatatatatatttatatactcgatccgagtgcgtctcacctgtgctctcaaacattctcgcacacaaacaaacacctgccaataccggtacagatacaaatacttttttgttgtattactttcgtttcgatttttacatatgcaaccaactaaccatattgcatttgaattgataacacggtctatatttactgtactcaaatgaatattttctttatttaaaaataaacctgatcccgaatctgaacctatagctggcctatacgaggtaatcatatacagttcgccagatgataagaaaaagaatcgcggcttttgctttcttgagtacgagtcacacaaggcggcgtctttggccaaacgaagacttggcacaggaagaattaaggtaagaccgaatttgcaatacattcattcggataaacttgctaacatgaagagggatctttcaacaggtttggggatgtgatataatagtcgactgggccgatccacaggaggagccggatgagcaaacaatgtccaaggttaaagttctttatgtgcgaaatcttacccaggacgtctcagaggataaactgaaggtaaggctaatggggggaaagctaaacctaaacttcaatatctaataacatttaaataacaggaacaatttgagcaatacggaaaagtggaacgcgttaagaaaattaaagactatgcctttatacactttgaggatcgtgatagcgccgtcgaagctatgcgtggccttaatggcaaggagatcggcgcctcgaatattgaggtgggtttcacataaaaggatatagcttgaagttctttatctaacagacttgctttcaatccttgcgcaggtctctctagccaaacccccctcggacaaaaagaaaaaggaggagattctgcgtgctcgtgagcgccgcatgatgcaaatgatgcaagcgcgtcccgggatcgtggggtatgtatctccttcaactctcttctaaacaccccaccagaagctctgcctcaaaacttgtttagcacagcaacaccaacattaccacagattggcgcaaaatccaaaaataactaaaaatcaaatgcattcacctaatgcaatcccttggtggacattccgtttcggctaaatccaaattgaaaatgtctgtttgcttttcaagtcgccaccatttaaagcagtcgattaattatacttatattttctgttattgttttctttctttctttctttcattctttgccaattgcccgccacgcgaatgaaatactttgttgtaccccgaacacgacaccaatttaaaccaaaccgaaaaccaaaaaccataaccaaaccgtataaatactcaatccatatattgaaatgccatatgcgtgtgggattaccttgtaaagatttgaaaccttgtctccatacagaaacctgtcgccgacacatcctagcataatgtccttgacgcccatgcgcccaggggcgcgcatgccgctgcgtacgccgataccccgtgaatacggtaagtttggcaaatttgccaagtgaatatggccgcatccgtcggatgcgtgttactagatgtcttctctgtatgtatatgcatagcctgccaatggctatgctgtttgatatttatatttgctatttgatgttaatattgatgatgaggaggaggagagctaaggccccatgcgccttcccttttgtggctctacacaattgagaaaaaatagcttaaaaattttgttaatttggtttagttctcgtactcgtagtagtcagttagccgagttgtttaggcatactcacatactcacacacacaccactaacaccacacatacacccacacatacacatagcgtatcgatcgagtaattgctaggtttgtttttagactttagttcgtgtttctaaccgaaaagcagcagcaactaactgatcctaacactaatccggtctgcagcttaagaattaaagttcaacgatatacctatatcatgtctgccatcgaacgcaacattttgttaccctctgtttatcttggttttaatttctcctcgcctcatcgtttaagttctttaagatttagaaagcgcgcgctatccactaacatttgtatgatcgccctccccacccaaaaacagaaaccacacgcacacacacacacaccagcaagcacactcccactttcactttgactctcaccctcactgaaaaggccctaagtcacgcttagcactgccctcgagtcccagtcgagtgagaaaacgtatccagctagattgagattaacccactaactaaccttaagatctccgacaaccattggcaatcaattgaagtaaccgagtgtaaccatttctcaccgaattctattacttttccccatctgactaatcgtaaatgttgtttctttcttatttgtatactctcgcatttgcaagttatatgtcgatgctatgtttatttaaacaataattactatcctcggtttatttgcatgcccgtatttatttccttatcgatgttgtccagttttactttccgttgttctttaatacaatccatctcggactccaacgatccaacgatcctccgatccgaactctctgtgtcgcaagtgcagggcattacgaacacacacactcagtccataaccaaagcatatagacatagacatttaaccttaaacgttgtccatagttgtttacgataattaaatgttgcaattgtgttctctgtgtagcgaatgttaagcaccctgtatactgtttgatgttatatcaccggtaagtaaccctaagtctcatctacttaagccacataccgtaccgattcgatcgcgtgtgttagtgtgacatttaaaccattaaaccaccaaaccaccaagccaccaacccaccaaactgcccacgaactcaacagccacagacaataccactaaaccatatatcccctcgactatcttgttgcgttctcagtacccgcccgattcgattgcaaattggcaaagtgaacaattggcagcatatgatagctaggtatagggggggtttatgtctccatttaaaaatcctaatcctaatcctaatcatcctatcgaatccctacctaaaccccatagactacttttacgactttttcggtttctcggactatcgccaaggggggtcctttggcaataatgtgtcctactacgatgacatgtaccgctggattgatggggattacaactactatgattacccgaacggtggcggcgggggcagcgggggaggaggaggtagtgtgtccggcggtacggtgcttccgctctcggccggcggctcccagaattcaccgatggctagtggacagcgatcggccagaggatcggccagtggtcccagtgcttccccgagccttatggtgcgttttaactaatcgaaacttgattattagctcccttcgaatcggtgtataatttgaaaacagatcgagaacacaacgcacacagaaacacaagatttgtagattcaattttgatttagatatatttacatacttaaatgccctcagctgattaccttcccctttttgtagttagtttactttttgctttgtatttcgtactttgatttgtttagcaaacgcttcatcatttggctttaactttatttcccccgaaatgtgttctctttgtttcgtttataaagtcaaaatttgcacgtctcttgctgccaaattgcaccagaaaatgaaaacaccccccactactcacccaaaaaacacccaaaagccatgccacgcccacacacgacccgcagacacacgtgcacgcccattgccggaacaaggattatttgttgcttgtttcgccttctttcgcctaacatacccacacccacacccacacccatggaagtacaaacaaccatcatacaataatttaaggactcgccgtgccacgccgcaattgataaattaacacaaacggtgctttattacgcttaacttacgcttatgctttgcttgtacgtattaccttcctactacctgcctatttatttataattttaattgccaggccgaagtaaacattttaaataatatatttatgagctgaacacggcgtgctgacgttttaattttaattttaattaatttctagcaattaagtgaagcgctttttattacgattgcgcaccttatgttaagttactcatttatttattgtatccaacgctttaaagtttaatccaattaaccgcacacgcttattgtactttagttacatacgttatacaaaacaaatttacaaacatggtaaagttattttttgaatattgtgtcaatcgcaagaggcaaaacaaacttttgtgccccagatccgttgttataagtatattataatacccaattgactagttaaatgctcactcagtctacacagaatacagagaacagtgtctactatacatttagtaatttctatataaataatacatactttatatgcatacattacatcgtgtatgtgtacaatcaaacaaacagttttacaccaagaatctaacgcgtttatttcgatttttcttttcttttctttctttttatgtgttcttgttatatacttatctatatacaaacaatttatttgtttttcggtacaatatgacaaaatacgacaaatcttgaaaaaaaaattatatatatgttcgtcaaaaccaaaaaaaaaacaaccaacccacattaaaattgccaactctttctctgccacaaatctaaattcaaatcaaatcgaaaaacaaccaaaccaaccaaaatctatcgttaacctttcgattccaaaaccacaacgaaacccgtttttctgacccctttccgacaacgcaaccgctccaaattcgaaattctcatcgattcgacactccaaattcaaaatcaattcaaaaacgttctttattttgcttactcttctgttcgattcgaaatttgaaatgaccaaaatttgacaattatcttggcgatccatatatatacaaacacatttaattatgtatgaaaaacatgctaatgctattggaaaattgtaaacgcaactattcgaacaaaaaacaaaaaaccctgaattcaaaaccaaatcgaaacgcaatacaaccaaaacaacggccgatggataaccgaaaatgatggaaaatggatccgaatctggaaatgcaaaacacatgctctcaaaccaccaaccaccccacacacacacacacactaaaaacacacacatacacctacacatacacacatcaaccacaatcgcaaccaatgcatgcaataatgaccataatgatgatgatgatgatgacgacgacgaccgaaaatactgatgactatgatgacgacgatgctaatgatgtgtagggagttggtcgtgggcatggaatcacagtaccgcgtggcagagtcgttggccaacgtggcagcatcagtcgtctgggggcccaaacagtgccacaggcggcgggagcggcagcggcggcgggacaggcggcggcggcggtagctcagcggggggccaccggtcagggggcgccggcagcaaccggggggttccgtggggtgttgccaacgcgtcccagcgctcgtggcacccagcacgtcaagccgctacaaaatttaccaggtgagctcaacaaaacacaaagaacgttctactcgtatcccaatctcagaaaaatactacacctcaacaaaagcaaaactaaaaccaaaattaagccaaagcaaacaacaaaaaccaccaatcaaattcaaattcaagccaaatcaaaacaaaacaaaagcaaatcgaatcccaacaacctgcgccaaatgaaatctgcataatcaagccaaacaacaacgtcaaacttgagagaatatatatacattgcaaatgtcaaatttaattcaattcaattataagtaaagccaagtaaaatgtaaacatgcaaacgacacacgacccacacccccaaacaacatacacacacactcatcacgcgcaccactaaaaatacgaacataacgagagattttaaaaaagtgtgaatcctctacccgagttcctacaaaaaaaaaatttttaatcactttaatgtcgtgtgtatcgcatttgtgactgttttaaatgttgtaaagtttaaaccatttggttaatttcttatactttcttatcgaataatacttttcaatactttacctaaatgtctccttgtcatcctaacagttgtcccccttgctgcttacaattgcgtttcactttgattttcattacttgttcagcgctaagatgtatgctacgatttttgatgcatgccttgattttgtttttttttaacccccaaccaaccaactgtaagcagcaatttacagccatgtccattagacacgccccacacacgcacacacgcacacaagcacactgacactgaaacaaacatcgcctatgtatgtatatggaagccattataacaaattgagtaattgtttacatacgcatattgtcttgaatatgtacctaactatatatgagccatgtctgtaaacgtttatgaatcgattagtatttatgtccaaccacctccaccatccaagcacagagaatacattgaatctattgtcacctactaattaagcgccatagagagtcgaaaaggaggaatcgagtgggcgagctgattaatcatgattagcacacgtctccgttgcgtttacttccactgtttgtccctaacccatccaaccgcctatcgaaaaactccatcccgccaaacagatccaaaaaacccattccaaaattttgacgtacgtgtatataattttttgtcttttttttcgacccgcgtcaccagtttacaaataatatacttatacaaatgaaacgcgtttcaagattgacctgatcgattgcgattgcacaagtctaaatataaaacctttatttatacattacttatattctagcccattactttaaccatatacatataatattttgtgattctatgtatatcgaactgtgagtcttgtttaataattatccaacatgctttgcaaagccaaaataaaaaacaataataaaaaaaattaaaatagtttagtaacctacacatttgtatacccatatgacctaaatatgtatgtataatataaccacccttaacctttcatacatatcatattcacacacagggtgacaccaatccaatgccaactgagatcgtttttatttactttacgtatgaacaaatactaatcgattcgtgtattatgtttacaacacgcacacacactcacaccaatcaatttttgttataatttgttgcctatatacatatagcggagaaccccaaccagatcacgtttttgccacactaaaatgtgggttgacaaacaccgtctgacaaaagcgtgctgacctcgacctcgagaagcgaaccacccaattcccccaatcccctccctttcaccaaccaaacaaccaatcacccacccaccgttcacatgcttccgttttgaacacgctttacatttttgtggctgtatgtagtagatacttttatcctcaaggaagacacctttttattactttcctttttaagaatgcttcacacacacacacttgctcattgccatatacaaacgatcgctttcttctgtatcagcaaggaatatataatgaaaaccaaaaaacgagaaacacacaaatgaatgcaaaacaaaacactatcaaaatcaaaatcaaaaacctaaatctgtttctagctggagctgcattcaaaacattcatggagggtaattaagcgtagctcatcggccacctccttggacagcgacaagagtcgctctccggggaagaagcgtaaagtccataggtcacataacaaaaacaagtcacacaagtctaagaagcatgcccacaagtccaagtcgtctcggcccgataaagaaaagaaatccaagcggaagtccgaataaaactttgtaaccagaccatatcatatcatcttcctttcgaaatcaaatccaaacgaagaatctcgtcattggcaatcgaggcaaattcaagaacactaatcaatcatcacacatcccgcatctttcaagcatcaaaatccttaacgccagatcagatcagttcagttcagcctctgaaagtccttgcaaaattccaaatttcaaactaggagtgtacgaccacacacttatagatacacgaagaagtcccaagtctttcaagtacagcgctctgttctcctcccgtccagggatccatagatctggcagacgatcctttttattacactgccccatttatcgccgctacccatcagtgttccatgtttcatgtgtcaggcgataatatcatgtacaatgttttacttacaaaatgaacacgtttggtaattgttaacaccacacacacacacacacacacactatatgcactatgtgttaacatcatagtcacacaccccaaacaccatatatttgtaaatgtaacaagtcctaagtcgtccctggcgttatgtcgagttaacacaatttcccgatttgtgatgtgtataaacaatgatgagataaattaaacgaacaatgatcaaatgtgttgtctttgatattttttaaaaaacactgaaacgaccatcttccccctacttactagccaaaaaaaagacacgaaatcaacctggacaaaatcatctatcaaattgtgctactaaaataactaatacaacgtcaagaaaccccattcgaaccatagaccagttaaatccaaccgaaaacaaccaagaccaaaacaaagcaataatagcaacaactttgaaccatttttgtattaacaacatttttaactctctttctcttttttttctttcgaaaaactccaccacccaacaacaccacccatcccaacaaaacaaaaaaaaaaacaccaacacacaacgcacaccaaaaaccaaccgaatgccgccaa

SEQ ID NO: 26309 - DNA, 2022 bp, DROSOPHILA
atggcggaaggtaatggcgaactgttggatgacattaaccagaaagccgatgaccgtggcgatggcgagcgtacagaggattatcccaagctgctggaatacggtctggacaagaaggtcgccggcaaactggatgagatctacaaaaccggcaagttggctcacgccgagctggacgagcgcgccctggacgcgctcaaggagtttcccgtcgatggtgccttgaatgtgttgggacagttcctggaatcgaacctggagcacgtgtcaaacaagtccgcctacctatgcggcgtgatgaagacgtaccgacagaagagtcgagccagccaacagggcgtggccgcgcccgcaactgtcaaaggtcccgacgaggacaagatcaagaaaatcctcgagcgcaccggctacacattagatgtgacgacaggtcagcgtaaatacggcggaccgccgccgcattgggagggaaatgtgccaggcaacggttgcgaggttttctgcggcaagatacccaaggacatgtacgaggacgaactgattccgctattcgagaactgcggcataatctgggacctacgactcatgatggacccgatgacgggcacaaatcgtggttatgcatttgtcacattcacaaatcgcgaagcggccgtcaatgcagtgcgacagctcgataatcacgaaataaaacccggcaagtgtctaaaaataaatataagcgtaccgaatctgcgccttttcgtaggcaatattcccaagtcaaagggcaaagatgaaattttagaggaatttggtaaacttacaggcaaaaagattggtgttacgatatcatttaacaatcaccggctatttgtcggcaatatacctaagaatagagatcgcgacgaattaattgaggaattttcaaaacatgcacctggcctatacgaggtaatcatatacagttcgccagatgataagaaaaagaatcgcggcttttgctttcttgagtacgagtcacacaaggcggcgtctttggccaaacgaagacttggcacaggaagaattaaggtttggggatgtgatataatagtcgactgggccgatccacaggaggagccggatgagcaaacaatgtccaaggttaaagttctttatgtgcgaaatcttacccaggacgtctcagaggataaactgaaggaacaatttgagcaatacggaaaagtggaacgcgttaagaaaattaaagactatgcctttatacactttgaggatcgtgatagcgccgtcgaagctatgcgtggccttaatggcaaggagatcggcgcctcgaatattgaggtctctctagccaaacccccctcggacaaaaagaaaaaggaggagattctgcgtgctcgtgagcgccgcatgatgcaaatgatgcaagcgcgtcccgggatcgtgggaaacctgtcgccgacacatcctagcataatgtccttgacgcccatgcgcccaggggcgcgcatgccgctgcgtacgccgataccccgtgaatacgactacttttacgactttttcggtttctcggactatcgccaaggggggtcctttggcaataatgtgtcctactacgatgacatgtaccgctggattgatggggattacaactactatgattacccgaacggtggcggcgggggcagcgggggaggaggaggtagtgtgtccggcggtacggtgcttccgctctcggccggcggctcccagaattcaccgatggctagtggacagcgatcggccagaggatcggccagtggtcccagtgcttccccgagccttatgctggagctgcattcaaaacattcatggagggtaattaagcgtagctcatcggccacctccttggacagcgacaagagtcgctctccggggaagaagcgtaaagtccataggtcacataacaaaaacaagtcacacaagtctaagaagcatgcccacaagtccaagtcgtctcggcccgataaagaaaagaaatccaagcggaagtccgaataa

SEQ ID NO: 26310 - protein, 673 aa, DROSOPHILA
MAEGNGELLDDINQKADDRGDGERTEDYPKLLEYGLDKKVAGKLDEIYKTGKLAHAELDERALDALKEFPVDGALNVLGQFLESNLEHVSNKSAYLCGVMKTYRQKSRASQQGVAAPATVKGPDEDKIKKILERTGYTLDVTTGQRKYGGPPPHWEGNVPGNGCEVFCGKIPKDMYEDELIPLFENCGIIWDLRLMMDPMTGTNRGYAFVTFTNREAAVNAVRQLDNHEIKPGKCLKINISVPNLRLFVGNIPKSKGKDEILEEFGKLTGKKIGVTISFNNHRLFVGNIPKNRDRDELIEEFSKHAPGLYEVIIYSSPDDKKKNRGFCFLEYESHKAASLAKRRLGTGRIKVWGCDIIVDWADPQEEPDEQTMSKVKVLYVRNLTQDVSEDKLKEQFEQYGKVERVKKIKDYAFIHFEDRDSAVEAMRGLNGKEIGASNIEVSLAKPPSDKKKKEEILRARERRMMQMMQARPGIVGNLSPTHPSIMSLTPMRPGARMPLRTPIPREYDYFYDFFGFSDYRQGGSFGNNVSYYDDMYRWIDGDYNYYDYPNGGGGGSGGGGGSVSGGTVLPLSAGGSQNSPMASGQRSARGSASGPSASPSLMLELHSKHSWRVIKRSSSATSLDSDKSRSPGKKRKVHRSHNKNKSHKSKKHAHKSKSSRPDKEKKSKRKSE

SEQ ID NO: 26311 - DNA, 18977 bp, DROSOPHILA
agcgaacggagcggagcaaagcttccatcttcgtcctcatcaaaatgagaagcgcagggaaaggcgtaaacacgaggacgttgcgaggggggggggcgaaggttgaggttcagtgggtttggaacctacacaggcatcttttaatattgtagtctaccgttgtttacgtacacttggagaagtcgagcacacacaatacaaaagcatgttgcaagcaaacagcaaactgaataaactttttgaaaacttaaacgggtatgtctccgttaaataaatatgtagcttaaaaatgatataataaaatcatatgaaactcgaatataaattgatcaattagtttacataatatctatcaagtaaaattttaaaagcagaagcaaaatcttattaataataaaaggctgtgctaaacaaacttctagaccttaacaagcgttctagacccaactaaagccaaaatgaaaacacatttagcatatatagatttttactaatcattggtatttttttctcaatcagttttgcttatttcgttaccaattagttaattattttacattgttttcgttttgaatcacagttacatactaaaaatttattacttattacacgctacccaataaagatttttgcaagcaaaaatttatgttacccaacgttttttcgcgcaatgcattctgtaaagatgtcacagtacacactgtctacgtgtgcgtgtgtgtaagtgtgcggttgtgtacttgtatttgtcatcgtctgtgtttttgtttgtgtaagtgtagttgtttgaggttgcgcttcgcgctgtttacacggcctatgtctacatttagcgtatatatttctatatatatagtatatatatatatatataagttcgctagctatacttggttgttgtcgttcatgtttttgttgtcatgtgtcccgtgttgctgttgttgttattgttgctgtttctgtctgtctctgtgtggttgttattattattgtgctacgtttatggcacaagtttcttaaatccagcaccttcttggccaagtttgagctcttcataaattgtgggatttacttcattgcactgcgtattgctgagcgggttatgaaagtgatgcgccgcatctgccgcactcttatgttgctgctgctgttgctgctgctgttgctgctgctgctgatgttgcctgttccccgtgagtgcgacacctgccgaggtggcagatgccgctgctgctgccgtcggcgccgttgtcgttgtggatgtcgtcatggtggcggcgatgccattacgaccatgactgtgactgttgctgctgccgttgttgttgctgctgctcatcccgtggtggttgccattttgcgtcgtgatggccgatgtgacggtgggtagctatggccgttcatatatgtttatgtccgggtgtcgatgtgtcgtcggttagaaggggaaggcagaaaaagacattgacagttataacacacaaaatataagtaaatacacacctacgaaaaacacacaaaaacatacagctattataacactaaacaaactttggccaactcgcagtttagcaaaatagctaaggtgaaaaaagtcgaccacgccgactaagtgatatccagaggagattgtttaaaaggtaggcctatagcaaactattgaaaatatgtattggaagtaaatttattataataataataaaatattatttatctactgttggattcttcaaataattcctctctctgttaagcggacaacatgccactgcgtatgcatttatttatagtaggcaacggcagtacataaaatattatatacccttagcagatatgcagataccctcataataaaacagaatgatggaaaaaatggcaatcgatcgttgtacacacctgcacctgttcgaggcccctggtgtaggtgggattctcaaacgccacattgccgttggccgatttgccatagctggagcgctgtcggcgatagaacacaatggccgccgctgccaggagaatggccaaaatgctggccacaatgccactgatggtgcccacggcacttgagtagctgctggtggccgaggtcacatggtgctcgccgagggtgaacctaatcggatctgtgagcacgctggcacctgcaagacaagtcggcaaattaaaacctcgcccaggactcgaatcagctttttggccatccaggtaaccaactcaccgtagctattgccagccttcaccaccaactcgtagagcacatccttcttgaggccattaatgcttattgttgtgtcctttacgtcgatgcgtcgtatctcgagagcagccatcgcgttgttgctgttgcccatacttgttgcattattcatggcggccagggtatccatgccgggattttccatcgaggaacctgaatccgaggatggggaacccgaactcgaactcgacgttggcggcagaatggcggcctcgtggtaaaatattctataaccgtcaacggcatttggattctttgtcggcgcatcccatctgtaatgaaatagttttcatagagcgacggcgccgcattatgagtgctcggtaatattgttgcaggcgcgcacacacaacttgtctggaattttaataaatttaatgcggcaccaggttgggttcagtttgaaaggtccgctgccctcatcaacctttgacgttgaccgagtatattaaagtgagataaaaaatctgtgctttaatggatttgcggtctattagtggcccagtcctcacacaagtccttcctcacacatacatacatacatacagaggcacatgagtggatgtgcggcacagagaaggataatgaatgtattgggtttggtgcgctaaatggatgagtctacttccgcttcggacaaaagtgtttaagagcttagccgaggggttggaacgtgtcccacatagtttgagggcttaaagccaaatggcttatgctcggttaaactttgtttaggtagggcacactggacaaaaatagattgtattaaatttgtggcctaacgacgcaaaggaactctcatctttataatatcaaaaatactttgctgatcttttttaaattccaaagaagttttttcttgaaaagctaaggtaaatatacaatttcaatgacgaagcgaaaaagattaactaacctgacattaacttcgctgtcggataccacgcttactacaatattttccggcggtccaggcaatcgatcgcggttcttctcaaagcaacccacaatggttcgggcatactgcaagctgcagatctccttggatcgaacggattcaccgcggcaccaattgaggcactttcggggcacatgctcatccgcacagcaggatctgtgatccgagccatcggcggcacatctcatcagcttgtcaaagtccacaatgcactcaggtcgatccgcgatggcatcgaagtccacataatagctgcaggcactgcgacaagccatcgaaacattttgcgccgcacagcattcggaaacgttgtgattgagtgccggcgtattgcgtatacgcaccgataccggcgtggtggtggctccgaagggattatccgcatgacagaaataatcgcctacatcgttggcctgcagcttgctgatccttaacgacattgtatatatcgagggtcgggattcattggcttttacggatatgaaatagtttccgccatttataacgggcacccttccatccttttctctccagaaaattgtcttaggcgccggtttggagtccacggtacaccgcagttcgatctcatcaccaatattggccacggtgatgccagcagcctggattttcggaggatctgcaagaggaaatgtataataattatattgcaaatcttttttaaaactttaaattatatcatgctgcatttaaaaggggatattttttgcgattgcgctaataaagtacttcaaatcaaccaatgaaattaaataataaaataaatgcaattttagaacctctccgtaattagttttacataaatcttttcaacagcaatttaaatgtgagtatttacttgcagtattttacattttgcaccagaaggacacttgacactataaggcagctaagcgaattaaccctcattgcattacttacagcatatgttaaccctcctggtggcctgcatgggcactccgtagccgttgtccgcatagcaagagacgtgctccatgtcggccgagacgttgtgaatgaccgtgaccatgtgccgcgaggcgtcctgccgcaccagatgtccacccacgtagagcgaaatggtgggagccgggttgccgaaggccaggcagagaatggtcatggaaccgccctccgggatgttgtccgccggatgcacagtggggggctgcaagtaaggtacacctcagttaacccgaaaataaagcctgaagcgagcactcacatccacgaaggcgggcagggcgggatccgtccaggccacaagcgtctccgagggcagggaatcaccccgttcacccacagcctccacgtagagcacatgctgggagctcggcttcaggttgttcatcctcagccaggccagcttcgtttcaatctttatgaattgctcggctctcatggccttgtggtaaactctgcaggaggaacaaaaagaggggaagagggagtcttagatcccgaccaaactggagaaaggactgcaaattgggtttttaaaacctgcaccaaaacactttataggtctttaaataatggggggagggggtgccacttttttgaaatatgactcaaaaataaaatcaaatattctaaaatcattatatacagttccaagtctatccaacttaagttattaacaattttctttgagtctttgccttcaaagtggcaaccacattttattctaaaataaatacaaaaattgttactttgaagatttaaaacacaaaatacgtatgtaacaactgaactattaaaaacatttttaaaatgtccgccaattttttagcagtggctgcttaaggcacgtttccttgctcacctgtaggtaatcctctcatgcggatgggcgtactctggcggctgccaggtgagctgcatccaggtggcgctgtgggccaccaccgtcagcgagtggggtggtgagggggctccccaggctgcagtgcacacacacatatgggaaagtagaccatacaacaattaaatctacaaattttggagctgagttggcctactcaccttcgccggtccgttgttggtcggttgtattcagcaagagcatggatgccggcagcgatgtgccaaattttccgcgcgtcacaaccgtaattcggtacaaggcattcgcatccaaattggtcaaatcgatactcgtctcattggtggtcaattcctaagtgtataattgcatgtgagtagccgacgacgagacgttaacgagaacgagaaaaaatgtgtgaaaattgcaatgaataaagtgaactcaagaatcataagcaaaacagagtcgactcggaaatacccttaaatataaagagcaatcgaaattgaataaaaaagtattaagctaaacacgactatgtacatacgccttataattgcaatgttttatattactcccccaagtatccattcttagtcaataataaatcacctaaaaactcggtggtaaatctttacacagccatataccccacatactgtgctttaattttccaattaaccccaaacttccactactcctcctattgagggtcctccatttccctttaagcgaataaaaaatttgtccagtctgcactgctgtcgtctgctcgtggctgtggtttagcttgatttcgctgaaagacatgtcggcatgattagtactttttgtaattgctgccacgcagcgcaatttgtggtatttagcccacaaaatgacaccacaccccgtttccgacagcgtccaacccaaccagctgcatcatcatcagagtcactcgcagtgtgccattgtcgcagtcattcaactcatcgggctttctgcctgcccctatctcgccatctgtgattcaggtccagttccagttccagcaccatgtccccactgtccgcactagcgctattttgtttcaaaagccatcctcgaaattgacagctatatctcggactctggtctatgcatggagtattccccccacaacactcgacgtgaccccaactcccaaaaaaacttcgcgcaaatccacattaaaaatcgttagcgtaatctgttggcgttacagctttgggggcagatagatgcgctgaactgtgggaattgggcggcatatgggttgggattgaaagtattaaatttctgttcagggtaatcctcataattatattgaaatctcactgtctccttaaaaataaatgtgatgattttaacgaatctgtttaataatttaccatggagacagtgtgaaaaaagagaaatggacttatgaataagtcattgaaataagtatttaacatggttcaattgtatgaatgcacattataataatgaaatatttattaaacattgtcagcaagttcattacattctttaaaaataaaacccaccagtattattttttacaaatattactatattcaagtattaaattatttaaagtatacagatttttggtatacaaaattagtttacccgatgaataaatcaagttgatctagttatgatcttcttttcacaaagctataataaaaatccaaacgtcctaatctttgcatcataccctacaatctcaaaaccatctcaatcatttacacaccgaatcgcttggctgcctgatgttgctgctgaattaatgttgctgctgcgttgatgttgctgctgctgctgctgcttgtgctgccgatgctgctgttgctgctgctgttgcgttgtttcattctgtttcttttttttaatctcctgcagatgtcgcagtcgcggtgcggttttttggcctttaattgcatttttggctgcgtggccagtgcgaaaaaatgcggcgcgttaagtaatttatttcgttttatggcctagcgctgtttgtttttaaagcaaagtcagttctggggggcagcattaacttctttttatcagcagcttggcagcagaagctgccgtggcggcattatcatcatcaccatcaacgtcatcggcgaccagaacagagtttgttatttcagctacttagtgctggcaatgcgctaaaattatttgatttgagtgccacgccccctaccgagcagccgcccctaatagcagcggcttcacacgatgagcttatccggcgtaacgagtcattttgagtatgtaagtcaatgtcagagcgatgttggacatctgttcgtggagccagtttggccaacctcactaaatatgtatggaggttcatctcgcttatggttagaggttttattttctgtatttttttttttttccttctatgttttttttttttttggtcatgcctgggggggtcaagtcgtaaatctcaatttcagcggggcttgcttgccctgcttgtgacaacttgtgtcaaatatgtaatgccgagcaatggacccattttaacctcagaacccgtccgaaacaggaaagctgagtaggggttaaaggcagagatagagacatccatttgacacaggtagtttgcgataaactaactagaatttagtggccactgcccgagagaataaattgcctggctcaatactaatttccttccattagaaacttatctaaaacgcattaaattcaaagccgaaaaagattgtcaaggcaaagaaggaaaaaacgatttattatgctctcgacagcccttacagcaaaaaaaagggcaacactaatagcagccaaaggacttttagttgggcggttgtcctgtgggtgtcgcgattttgctttgctttttcagtcccctttcgtaattacattaaccgcaacttaaatgtgccacaattggcatgacgagctggtcctaactgaataattaatggggttaccttccagaaatggaggtgagtcgtccccagcaactacttgagcgaatagctgctcaaaatgcatagcgcgatgtccttcggtgctaagctagtgcacttacagaaattaaatgctaaattagggttccctttaacctttacttccactggaatatactactggtggtattttaaagccaaagcaaaatatttttattgaatcattctattaaaaattgtatgattcgttgtaagatcattatacaacaaatatttagcctatacccgtctgatttgcgaaagggtatattattttattggattactatcaatgcaaaggacatacttttgtttcgagtgtgtatctactgtatctaaagtccttccccctaacgggagtcacattccggccataaaactaggtccctcgtcgctcatttaccagttgtcttggcccgaagtcgactgcagtgacaaagcacataatcgccgtggcccaaacccctttggctccttcacaactgtatcagaatatttaatgtgtctaatttctggcatcgtggtcagtcccttcccaacgtttttttttttattttccttacttttcagtgttgctggctatattaaaaagttttttatggtcgtgtgtttggcaaacacaaacacaaataggaataaaagtccgactccaactaacgcagagcggcggcactaaaaatcatcacaaaagttacgttcgttttcggccagcgtcaacagaggaatcatttgaaaagcagcgactgtggaggaaaaccttttatttccgttttcccgaaatcccccctatcccattccgcacaccgccaccattcctcgtcctgatggtatgtaatatcctgtagattcgaataatgtttttgtgggactgtttgttgctgatgctgctggtgacacaatgccggccgtgcattggcgacgaatagaaattgccaaattattggcactgattcaatcaggaagggttgcaaaaacacagcgggctgccggcgaaattacctttaaatatcgaaatggtggaattgccattgctagtttgagcacaacttttccgccaaccattagtcgtcttggcccagcggtttgtcgcccactgaggttttactttgaacccattctctacatatttctgacacgtccaaaagcaattaagtttgtccataaaagtgtcacactgagtcaacgcattgcagcctgctgctggggtacagtttcccccgatagccacgaacttatagatatacatgcgatacaataacccattcaaaaggggtcgcgaggcgcgtttaaaccatttgacaccaacgggcgatggcgatgcgatgcgatggtgagctgatggagggggggcaccgcaaaaacggcaaaactgaaaagcatttaagccaagccgaagccagccccaagttaagccaacagcaacagcatcaccgcaacagctgcgtgcactgctgaccaaagcaagcaaaaataaaacaaaaaactaaaaaaaaaaagtggagggaaaacgaaaaagtaagcagccaacagggcgaatgaattttccacaacacaatcaacaaaaaacagctcagagtataagaaaaaaatcgaaccaaagctgacaccgcacagtatcttccatatcgattggttttctggtgtagagttgctcacgtgacgaaagattctgtcacgcttgctaaggggattttttttcatttttttagatgtcaatagaaactgtgattcccacacctcatgatcaatcattcatatttaatcaatcgaatggcaatgaatcttgtagagaaaaataaccaatgtctgccatcgcaaaatacataaatgaaaaaaatgcaaaaaataatagaaagtaagttgacacaaattttatttattttaagataaactttgaagggttgtttaggtgatgatgataacgaatgtatgttgctttgagagtttataaaaaaaatcagttaattcttgctctactgctagctagctattatcgttaaacattttctggataccgaaaatagtcctattggactccctaagcgtatctcacgactacacctcccatggagcagccgaggctggagcatcattggcaggtcgtcgacgacaggttgcaatgcccccagcagcagcaacagcagcagtagcagcaatgccaacagcaacaacatcaagaacggcaacatcgacctcactttaaatacatttctgtgcgcatcaacacgcgacaaactctggccaggcttcttttgttgttgccgtattgctgtattttttagcatttgcgagtttttcgaggccaataactctgttgatggccatggctgatgctgcagcagcagcaacaacagtgcagcagcaacaacatcgcagcagcaccatcaaccaggcccagctgccagcaaagcgcgttgatgtgtgacaacaacggccaataactacaacaacaaatgcaacaaccaaatagcaagagcaacaacaattgcaacaacaaaatgactaaaacaacaacaagtggcaacaacatagaaaattacaacagtgccaatggcaaagccagagccaagtttggtccgttgtctggttttggttactctttttttggggatttttcttcatctatttttgtattttttagtggatcggctgcactttttaccagtttatagtcacgttttgcacgttgccagtgcatatggcggccataagtcccccagccccgcccccctgttgaaaaggcgtcaaaaacttttgccattgctctacgtacatctaaacctggccattcccccttcaatcgatgctttttggacagagttcaaagattattatactgaattggattagcggcggcggcggccaaccaaaactatttgccaatttatatatataatattatatacatataaaactaaatttaagctgaatattttggttagagaggaatgcacttgaaattcaggaaaaatccaattgatttcagtcgattcaatggataaacaatggccatcgatatatgcatttagtgagatttagccgatggccaaggatttaaataaataattgaataattggcttaactgcaaatataactcatccgccatgtgtttggtaatttttatcacagccttggagtaacatttcgtttcctattttatagatttgtctcctcttaacgtgatttaaataatacctattacaaaacctttataaatgcaataatttaaaagatatttgaatagaggtgctccaggtgctccaacattcaattgaacaatagaatccagatagacaattttcagctgtcgtcttaattgaacaattagtatagcctctcacgttgctcatacgccatgtatgctcaaacggccacaatatatgcttatgtgactgcttgttatggaagcaatttcctgtccccgaacttcttcattaactctgctggcaatttaagttctccccggtcggaaagttgttgaaacggttattgtcctgactccccggcctccggcgcacagacaaggcaatttgtaagctcttttcaattccattggcactcgaatatatataatgtcagcattttggcccaaaaggcaaatcgtaataaggcgaccgcccgcaggccccaatgcaaatgaagtgccccattgtgtgtgtgaatctctgagcctgtccaacacaaaaaaagaggaaaaaaccttttccgagccagctcacaggtggggcgaacagggaaggcaaagtgggggaatagttctgcactggaaaagtttgtgcagaacgagacgttccattgtccaacaccgatatatactcacattttccaatttggcaactgtctcgtacatggtcatgttattgactttgccatattgtacgatgaattcaatatcctccgttccagttgtcccacttgtggcatcgccagcattcggcacatcctttccagcgttagcaggatccacggcaccagctgccagttcatcgccggttatcatgtcacctggcgatgcgttgccactgctgctactattgctattatccacatcaggctgcgtccaggccaaactgacgctgctctgattcacgaatgtcgcatgcacatcttccggtggtcctgggatattctgtgtgcctgaatagaccaatagggggatagtgaagtgagcaaacggcattgttttgttttataatgcaactttaattggccaatattggttttgtctgacgggctgtggttggttgccccaaagcattgaccaaataatttagcgtacaatggcgtgcaacagtgcgtatactcgacgtgcacagacaagccattaaacaaacagaattagctgcaaacacagcaaggccagcgacatcccatccacagagaagacccaccgatggattcaccacagggtgtggccagtggtgcagtttatctgcctgccgggctggttagctgtgacctccagtgaccctcagtcacgcatttaatgagaaaaatgaagtttaatatcgttttgcacatgctaaatcatccttaaaagtcatatagttcttccattacataaaacacttgatggttattcaaataccattcaaaacaaatacaaatcaatttgatattatcgttaaaagtgatttatgtgtttataaatttaaaatttcaaaatccaagtttaggattttaaataaaataacgttttcttttattcttttaacttagagaataaagttcatttctttcttgtttgaaaacattggaagacagctggcatctgtgacttttggtgattcgcatgcatcttgcctaattaactctacgttgcacggaataatttcaaatgagctgattgcattcactacagtcacagttcgctatccaatctcaacacaaggcactcagctccaacagacaaagaccaggatgtggacggaaggcagggagcactgccatggttaccactcaccttcctcgaaacactgcagaatgttgccggcatatgataaacaatcgggcacattgcttgatgttcccgatgaggcagacgatgatgatgatgatggtgctcctgccgcattgctattactggtggcagatgcagatgttgctgctgttgctccagatgatgatgatgttgcagctgcagccgccgatgctgatgacgatttggtggtcaatgcgagcggcatgacgccacgacagaggggcatgcaggcgttaatgactccacggcgactgcagcacggactatgatcacgtcctccggctgcacagcgggccaggattgctaaggattagagtgccagatgggttaatattgtggcatcatttgcataaatttccccggccagcgatacggctcattgtgctatgttatggaacaatttgtgacatgaactcatcaattctgccccgtttgccacttcggttgagatgataatttaaaggatctgagccatgagtcggcaacttggcagcaatttacaggaaattaaccgaaagatttcctatcattgactaggtgacgggtaaattggggcacaattctgcccactcatcggtggcattggagcagattcaatttatttgattgagaatgacggggatatttttggcactgagtgtttctgagcaaacacaaaaaaaaaaaaaagataatgtacaaattcaaggaattttgaaattttggctgagctctgattgcccgtaaatcaatatttgtatcttatttaaagcgctttcgttgaaaaggcgtattataatataacaatttatagaaaatgttgacctaaacttactttaattaaacaagacctaagccaaaagattaataacaatattttcaatattgctgtataaatcaatactccctactacttatgtattaaggcattttaaacaaataaattaacactgcaagccacctatctacttttataaaaacattaggtgttgttgggtattgtcttagctattcgagaaggcaagagaatctagttatgaaatgcaaccattaaatgttatgggaaaccaagggggctcttgcatctgttctggaaagcattgtttactctaacgaggccaaacaatgaggcacagaggcacatctcttctaaaattacataagcccaggcaaacactggcaatctcttgccaaacagttttcaatgatataaccatttcgcaaaattaacgtgtatttagtaacatcaaacatccctgttggccattttcggtgcttctatgcgtctaattaacttaaaattgatttgcataagtgcaaaaattcatgatgcccaaatggccaagcgcgtcacttaatattccaaattgcatcgccatacgaaactaaaaatgcaaaatgagctcgttaaattaacaacagtccacgggacaatgactggtctatccactcgctaattagtgttttccaagggagcgatatcatgaggttcggggaaaacccccgaaaatccatctgttacttacgcatttgggctcgacaagccggacccagtcgctcgatatcggacagtcgaatgttgtaggagcagaggggggcacactggggcagtagtccggatgcctggcagcaggtcgtcatgttgtatctggcggctgtctgctggacaggctccgccggcagagtccgggtgatcaggcggggggaggcctcgctcttgccgtacgcgtttatcgagaccacgtagaactcgtagtagatgtccgactccaggccctcgagaatcagcggcggttggcgctgcaaagcttaatgaattagccaaaccatttagggaatggttgcccgcgccggcagattgcctgcacttgcggaaaaatcaatttctaacatcaagaactttttggaactataaaaagcacaaaatcgtatcctgtagatacaaatgaaatattttctattgccacttagcatgaccagtagttataccactgttcctaatccaacacttatttaacgcaatttatttatttaggtataatgtatatatgctcttttaaacatcttgatattataaagaattttttttccaaaatgtccagtgtaataataccttctccacggtcagatagtcatcacccactcctagacgtcggaacttgacgtgatatgtgctgacggtgtcggccaagcgcttcggcttgttccagtccagaatcacgaagctgtccgtcttggccacggtccggagttttgacggcggatcggccagtacgccgtagccctggaacagacagctgttgtactcggacatgaagcgcaggcatctgcaaataaccggagagcggagagaagcaaagctccgtaattggcattcggcataaaaactcatcctacggagtcattagcaagtagcattgtgtttgggcgctggataaggataagggtgcggagttgtggaaaagaaaaaaattggaatgggtgtaggcataggcatgggcatgggcataggcataggaataggattgttattagggcttaacggcctatgggtttcctaaacatggatgatggggaaggatgggcttgctaagcgattaactgcgaaatgagaagctcattgatgattatcgattcaaatttgagagtccttatgagaagtaccaatacaaaggaagatatatgaaataaaggcaaattgaaaaaaatgaatttctgggagaaataggcgcaatggtttcaatgaacacaattgttgctcattactgatgaggcaaatacattatttgctggttgaatccatacattacattttaagcaccaatcatcttagttttatttaattattcaaaaatgtagttataaaaaatgatctacttacttgaataaactaaagtcaagtgacgtcagcttgccagcacatagtggaaagcaagctgatggaattcccctggcgcgacaacacggcgtatgatcaatattgttggccaaacaattgaaggtgatatttgaccagggagcgcacaccatgaaatcgggcaagttggcctgatcggtcttctgcggatcgcacattttgtccagacacatgcgatgggtcatcccattgtcctcgcaacattgtcgggtatccggtagttggggcattgcctgtttgtccgtggttccggctttcgattccgccgccgaggcgctggtgtgggtgaaaaatctcagccgctcggtgggtaaactcgatccaaattcgttggtagccgtgacaattacggcgtacatggtcagcggacttaaattgctgagcgtcaactgagtttgattcgtgggcaccgaatagagactaatcgattctggagaatcagacgccgttcggtgaacaatctcgccactcaactcatcctcatcgaaactgtgcaaagtggtcagattaatggtatagcctgaaacgcgatcagccagtttatccggtgcagtccagccgatggtcacactcgtttcgctaacattttcgatcgtcacgaaggtgggcgaacttggtatcaactgcacacccttcaggatgcactgcagcccactcagtgtgtgctgaacgcaggatacacgggtcttcaacttgtccgtgaatggagtgtactcgccgcggcacatgtcctggcacaagtccggaatctgcttgtccacgcagcagggcacatggttgcggccatccgccatgcagcgaacaatgccggggaagtcccgttcgcaggcctccggatcgatgccagtggtgccgtcgaggatgttgtgcacgttgcagaagcccatgcattgggtggacacgttagcccgttcgcagcactccgtaaagtcgtgggtcaccagcggtggcacttgactgggcctccaaaagctgcgattatcctgcgcgtccaacggtggcggcagcaggaacacatcactcgactccgcggttgaggtgtccgtggaatttcccggaccacccgtcgacgaatgaagctccttaactgtcaggggttaaggcgtgaaattaatttcagtacagggaaaaatttaatccataaaataaataaaatgttttgccattttatagtttaccaatggatatataccaatttcttaaggtatttaaatggatataacaaaagattgaccgatctttaagggattaaaacataagcggtgaaaattaagtaataccttttaaaatgtaatatttgtttgatatctcactaaccaaaacaatttataaatcgtttgctttttgtatataagggcttaaatacaaatttgctaaaacgcatgttgtttcttcaagtgtatagattttttgtcggtactcacctgtcaggatgtggatgctgcggagaacgggatccgagttaagttcgcatatatacgcccccgaatcgttgggcttaagagtcttaatcaaaagcacccaaacctctccccccgtttccaggttcttccccttaggatctaataaaaaatatccatagtttggttagatataatccacactatcttttataacatataaaacatactttcatcgtgcaggattcgcacacgatgatccttggttacccgcactgtgccggcggtcaggatttcgtcacccttcttccatattactgtgttgttcgaggagttatctgagactacgcaggttaataaagcatctttgctctccaaaataattgaaggtccgccggttccttgaattcacagaaagaaatatatatatcttaaatataagttaaaagcattcacttaataatactacttaccaattggcacaccacacttaacaatagttattagcacacatatcgtaattatgtgaaccagcaaaagcctgagcattattccttgtaggataacctgcaaaacagaattcaaaggaaaaacgtttactaaattttgcgaatcacctgtaatgcgcaaatcaaacaacatttttctccaaaactttaaagagcgaagccatggaacagagaatatttttcaatcattttcatcgccggaaaggaaacattttgatattgcaataaatggccgggtgaggcgaaatgccagtggcaactatgatggggacggtaaaagcgagggcgttggcagaggagggcgtggcagatggctgacctgggaaatgcagccaattgggaaacgttggacaagaggaaggaagcgagcacaaacagctgaaagcagcgtcacttttgccttggatcccgtgttgacgtcaacgttgccagaacatttgatgtttgaaaaataacattcacaacccctctcgaaactcgaaacgccccacggcacttttcccgcgcagttttcccgcaggctggatgcctggtttggttacctgttcgcttatggccaacgtttttggatttttgtttaaaaattcgaacgagttttttgctttacctttttttctgcgttgataaaatgtttaacattgcagtgctaggctacacaatgaaaaggaaaatgtattttcctgttaaaactacaaaattaatttacaaattttaaaaatatatcaactgaactaggattttggtatactttaatcgtaaatttgtacaatagaaggtacaggtatacccaacaattcaatttgttggtgttggctttttggtttcagaaaaatgtatattggcttatagatacaacgttaaaattaaatctggtctaataaaagctagttatatattttctggttaagttccaaatgcacttagctctttagaaaatatcagcgcttagattatttttctcagtgtgtagggggtctagatttgttgaaattggttcgtgcattctgtgaaaggtgctcgagctgattgtgcctgtgagtgtgtgtgtgtgtttactcttgcagctgtgtaagtgcccagtacgtgagagcgtaactgagaatttgttggcagttttagcgaccattccacgg

SEQ ID NO: 26312 - DNA, 3570 bp, DROSOPHILA
atgttgtttgatttgcgcattacaggaaccggcggaccttcaattattttggagagcaaagatgctttattaacctgcgtagtctcagataactcctcgaacaacacagtaatatggaagaagggtgacgaaatcctgaccgccggcacagtgcgggtaaccaaggatcatcgtgtgcgaatcctgcacgatgaaaatcctaaggggaagaacctggaaacggggggagaggtttgggtgcttttgattaagactcttaagcccaacgattcgggggcgtatatatgcgaacttaactcggatcccgttctccgcagcatccacatcctgacagttaaggagcttcattcgtcgacgggtggtccgggaaattccacggacacctcaaccgcggagtcgagtgatgtgttcctgctgccgccaccgttggacgcgcaggataatcgcagcttttggaggcccagtcaagtgccaccgctggtgacccacgactttacggagtgctgcgaacgggctaacgtgtccacccaatgcatgggcttctgcaacgtgcacaacatcctcgacggcaccactggcatcgatccggaggcctgcgaacgggacttccccggcattgttcgctgcatggcggatggccgcaaccatgtgccctgctgcgtggacaagcagattccggacttgtgccaggacatgtgccgcggcgagtacactccattcacggacaagttgaagacccgtgtatcctgcgttcagcacacactgagtgggctgcagtgcatcctgaagggtgtgcagttgataccaagttcgcccaccttcgtgacgatcgaaaatgttagcgaaacgagtgtgaccatcggctggactgcaccggataaactggctgatcgcgtttcaggctataccattaatctgaccactttgcacagtttcgatgaggatgagttgagtggcgagattgttcaccgaacggcgtctgattctccagaatcgattagtctctattcggtgcccacgaatcaaactcagttgacgctcagcaatttaagtccgctgaccatgtacgccgtaattgtcacggctaccaacgaatttggatcgagtttacccaccgagcggctgagatttttcacccacaccagcgcctcggcggcggaatcgaaagccggaaccacggacaaacaggcaatgccccaactaccggatacccgacaatgttgcgaggacaatgggatgacccatcgcatgtgtctggacaaaatgtgcgatccgcagaagaccgatcaggccaacttgcccgatttcatggtgtgcgctccctggtcaaatatcaccttcaattgtttggccaacaatattgatcatacgccgtgttgtcgcgccaggggaattccatcagcttgctttccactatgtgctggcaagctgacgtcacttgactttagtttattcaaatgcctgcgcttcatgtccgagtacaacagctgtctgttccagggctacggcgtactggccgatccgccgtcaaaactccggaccgtggccaagacggacagcttcgtgattctggactggaacaagccgaagcgcttggccgacaccgtcagcacatatcacgtcaagttccgacgtctaggagtgggtgatgactatctgaccgtggagaagcgccaaccgccgctgattctcgagggcctggagtcggacatctactacgagttctacgtggtctcgataaacgcgtacggcaagagcgaggcctccccccgcctgatcacccggactctgccggcggagcctgtccagcagacagccgccagatacaacatgacgacctgctgccaggcatccggactactgccccagtgtgcccccctctgctcctacaacattcgactgtccgatatcgagcgactgggtccggcttgtcgagcccaaatgcatcctccgaaaatccaggctgctggcatcaccgtggccaatattggtgatgagatcgaactgcggtgtaccgtggactccaaaccggcgcctaagacaattttctggagagaaaaggatggaagggtgcccgttataaatggcggaaactatttcatatccgtaaaagccaatgaatcccgaccctcgatatatacaatgtcgttaaggatcagcaagctgcaggccaacgatgtaggcgattatttctgtcatgcggataatcccttcggagccaccaccacgccggtatcggtgcgtatacgcaatacgccggcactcaatcacaacgtttccgaatgctgtgcggcgcaaaatgtttcgatggcttgtcgcagtgcctgcagctattatgtggacttcgatgccatcgcggatcgacctgagtgcattgtggactttgacaagctgatgagatgtgccgccgatggctcggatcacagatcctgctgtgcggatgagcatgtgccccgaaagtgcctcaattggtgccgcggtgaatccgttcgatccaaggagatctgcagcttgcagtatgcccgaaccattgtgggttgctttgagaagaaccgcgatcgattgcctggaccgccggaaaatattgtagtaagcgtggtatccgacagcgaagttaatgtcagatgggatgcgccgacaaagaatccaaatgccgttgacggttatagaatattttaccacgaggccgccattctgccgccaacgtcgagttcgagttcgggttccccatcctcggattcaggttcctcgatggaaaatcccggcatggataccctggccgccatgaataatgcaacaagtatgggcaacagcaacaacgcgatggctgctctcgagatacgacgcatcgacgtaaaggacacaacaataagcattaatggcctcaagaaggatgtgctctacgagttggtggtgaaggctggcaatagctacggtgccagcgtgctcacagatccgattaggttcaccctcggcgagcaccatgtgacctcggccaccagcagctactcaagtgccgtgggcaccatcagtggcattgtggccagcattttggccattctcctggcagcggcggccattgtgttctatcgccgacagcgctccagctatggcaaatcggccaacggcaatgtggcgtttgagaatcccacctacaccaggggcctcgaacaggtgcagctacccaccgtcacatcggccatcacgacgcaaaatggcaaccaccacgggatgagcagcagcaacaacaacggcagcagcaacagtcacagtcatggtcgtaatggcatcgccgccaccatgacgacatccacaacgacaacggcgccgacggcagcagcagcggcatctgccacctcggcaggtgtcgcactcacggggaacaggcaacatcagcagcagcagcaacagcagcagcaacagcagcagcaacataagagtgcggcagatgcggcgcatcactttcataacccgctcagcaatacgcagtgcaatgaagtaaatcccacaatttatgaagagctcaaacttggccaagaaggtgctggatttaagaaacttgtgccataa

SEQ ID NO: 26313 - protein, 1189 aa, DROSOPHILA
MLFDLRITGTGGPSIILESKDALLTCVVSDNSSNNTVIWKKGDEILTAGTVRVTKDHRVRILHDENPKGKNLETGGEVWVLLIKTLKPNDSGAYICELNSDPVLRSIHILTVKELHSSTGGPGNSTDTSTAESSDVFLLPPPLDAQDNRSFWRPSQVPPLVTHDFTECCERANVSTQCMGFCNVHNILDGTTGIDPEACERDFPGIVRCMADGRNHVPCCVDKQIPDLCQDMCRGEYTPFTDKLKTRVSCVQHTLSGLQCILKGVQLIPSSPTFVTIENVSETSVTIGWTAPDKLADRVSGYTINLTTLHSFDEDELSGEIVHRTASDSPESISLYSVPTNQTQLTLSNLSPLTMYAVIVTATNEFGSSLPTERLRFFTHTSASAAESKAGTTDKQAMPQLPDTRQCCEDNGMTHRMCLDKMCDPQKTDQANLPDFMVCAPWSNITFNCLANNIDHTPCCRARGIPSACFPLCAGKLTSLDFSLFKCLRFMSEYNSCLFQGYGVLADPPSKLRTVAKTDSFVILDWNKPKRLADTVSTYHVKFRRLGVGDDYLTVEKRQPPLILEGLESDIYYEFYVVSINAYGKSEASPRLITRTLPAEPVQQTAARYNMTTCCQASGLLPQCAPLCSYNIRLSDIERLGPACRAQMHPPKIQAAGITVANIGDEIELRCTVDSKPAPKTIFWREKDGRVPVINGGNYFISVKANESRPSIYTMSLRISKLQANDVGDYFCHADNPFGATTTPVSVRIRNTPALNHNVSECCAAQNVSMACRSACSYYVDFDAIADRPECIVDFDKLMRCAADGSDHRSCCADEHVPRKCLNWCRGESVRSKEICSLQYARTIVGCFEKNRDRLPGPPENIVVSVVSDSEVNVRWDAPTKNPNAVDGYRIFYHEAAILPPTSSSSSGSPSSDSGSSMENPGMDTLAAMNNATSMGNSNNAMAALEIRRIDVKDTTISINGLKKDVLYELVVKAGNSYGASVLTDPIRFTLGEHHVTSATSSYSSAVGTISGIVASILAILLAAAAIVFYRRQRSSYGKSANGNVAFENPTYTRGLEQVQLPTVTSAITTQNGNHHGMSSSNNNGSSNSHSHGRNGIAATMTTSTTTTAPTAAAAASATSAGVALTGNRQHQQQQQQQQQQQQQHKSAADAAHHFHNPLSNTQCNEVNPTIYEELKLGQEGAGFKKLVP

SEQ ID NO: 26314 - DNA, 4731 bp, DROSOPHILA
tcacgaaatcgtggtcctgttcgtctgtgtcatctcatgtctcttcgggatgcccaacatcatacagggtggcatctactacttccagctaatggatcactacgccgcctccgtgacgatcatgtttctggccttctgtcaaatgattgccattgcctggttctacggcacgggaagactgtcgaagaacgtcaagcaaatgaccggaaaggcgccttcgttctatctcagatcctgctggctagtcctgggaccctgcctcctctttgtaagtcatcccatggctaaactttgtagaattaatctaaaagcatttaatttttgcgaacgcaggccatctgggtattgagtctgatcaactaccacgagcccacctaccacaatggacgctatacctatccggactgggcctacggaataggctggatgttcgcttcattctcgctgatctgcatacctggatatgcggttatcaacttcctgcgctccagtggagataccttttgggaagtatgttgctgctagcattttcctatgccacattattaacccgatgttgaactcatttcgcagcgcatccggaacacgctgagacccaacatctacgagtgcaagatttgcggggaacaccactgcgaacacgactatccggagcaggagcagtttatgctggcccaggaaatggccacagtgtacaagcccaccaacccacacctgctcaatctcggccagaagtgcggctacaacgccatgcaagcctcaccctcacatgcggaggcaggaggaccatgtggccagtagctgttaggaacctctcccaacaatagccatttccgagtatttttaacgaatcacttgtgtaagttaaatgcagaaattaaagtatttaaataaattctagagcgagacattggattagcgatgttatttaacttaatataatatataatatattttgggaaaacaaactaaaatatcaattgacattacatatcagtgactacagcttttgcacatattgatagagtacatcgaattcctccagtttgggcacagcattaaaggtgcttcgagtgcgacagtactcggcatagatagttagactcttgcgaggaacgaccggcggacgcacgctgagataggagtcggtgccgtagtcactgagtggacgcagggtaatgccacgcataatcttggccagctcctgatcgcgctgagcaacggctgtctgagccggcctcgcacctccactggacagcttgcccatctgcacgtacttcttataaacagccatgctctgcttggagggcggattgatggtgcacccatagatttcctccatcgagggcagtcctgtggccagagtggcggcggctggttcggtcgattccgtctggtttgcctccttctcggcaaaacttgcacttaactcctcgtcactggagctatcgtcaccttcgctggaacttgaggaattgctattcatagaacccgtggaactttgccccgtcatcgagggattttgacgagcctttcgcgatgtctggatttgcctctggaacggactgaaattagtgcggaatgtgggcatgtatcgcagtgccagctggctgatctcgaacgcaatgtgctcgctgaaatcagtccacttgaaggactgatgatagtttgagtaggcatcgatcatttccaggccgctgctgtgaacgcgaaacagctccttgaccagtttgttggagtccgcacacgaatagggtaggcacgcgcgaaccttgtggcgcacccaatcggtgatggccttgctatccgctctcggcacgaatgcgttgtgcatgtcgtagtccgtctgtagctcccaaatgggtggaccctctgcgtgaaaattgtattaaataatttaatttaaatattaaagagtttagtttagtcacgctttgtcaaactgggcttgtatatgcccaagaacaagttgatgctgtgctgcttctcggtgtcgctaaacgtgttgctgtagtaccgactgagggtctgcatcacatcgctaccctgagatccccagggcgccgtctttcggtatgtcttaatccggtgcaccagctgcgacccgccgtattgcagggccagtgtatcgccgtgctcctcatacaggttttccagcatcgtcacgcaatccgagtcgaactccagcttagcggatttaacaaaacccagacgctccagttggtgacccaaagcgcactttccaatcgcaaactgggccgaattggtgcgatccaggcagtctacgcagtttgtgcgtacaatcccagtctgcaaaccgggctcactgccagccgccttgaaaaacatacccgtcatttggacaatactttctgcatgaattgctaattgctccatgacgttgcctccgctcaggcgactttgtcgtgccatatcgaagtggatgtgcttcatgcggtgcggcggcggcaggaattggttgagatagcggatactgtactccagctccttggagatgatcgactcgtgcttgcgccgctccctcttcttcaccagattgagcataatgagcggcgcaccataatggaagagcagccgttcgaagtgaagcgacggagtctgcgcatatggatcgcaaatgtccaattgaatctgcggcttgggcaccattttactgatatcctgggaccagtgtgacggtatggagcctcgcatttgggtgaaggcgcagattctctgaccatcgctgacgatctgttcggtctccacctcattggccacgtccccttgaaagttggctccacgcttaaggaaacgggtaccggcgaagcgtgagctcctgcgtgccaccaggcaaacattgacgtgcctcccaaaaatgctgatgcaggattggctgacaaaaccgtgagtaacctctagaagccagtccttgagcattatgccttccatgggctgcaggagataggcattccagacaaagcgcttgcgggaatcggagcgaaacgcgtaatccacacgctcatgggccttgtccacattgctagttagcgtattccaatcgggaagaggttcgtcgcggtcgagatctaccttggcaccaacgtagcgaggcgcggactcgttgtactgcagcgttcgcgtcaaatcgtaggagtatgagaaatagaagttgctacggaggtcgatattctgaaacatccgcttgtagcgatcctcatgcggatgcggtggtcgttgcgaggtcacctcgttcacacgcaccatcaccgtgtccttaatagtgtagaccaggtggcggccgatgtgggcgcagcatttgcgctttgtcaccagcaagaggtagtagccctcgaggaagcgcacaaatccaaggacgccataagcggacgtcaccttgggcgaacccgaaagggaagcgacaaaacgtcggatctccaggctgttaaactcgttggcattctcctcgatactcagccggttgtgggcaagtcggtctatggtcaggaggcgaaaccgagtctcccgattgttgctgcccaccaaatagaggcgctgaaattatggcgatatatgtgattagtcaaaaaaaggtcagctggaggtgatttcttaccgctcgtgtctcatagagcactactttttggatggagcttatcaggggattgaaaactatattcggattatcattgttcattttttcagcttttccgaaatttttttgttacaatttctcaggccgctcccacataaacaacaaacagctgatcatcatctgtagttggatatgcgagaaatggccagtgttggcagcgtgagagggagtcgattaattaattttgttttggttcaatcaaatataaataacattttattccatcataaaacatatcaaaataggcatattcattaccaaccaattttatgccttattcttacaatacctatgaatatgttagcttattttatcatctagcaaaatcatttttgtccattttaaagtagtgcacatggaagatatgtcttccaagtgtttttaaagtagtggtcacttgtgtatctcgaggatatgtctagcaagtgtttttctctgcttatagaaactggcacagtgaggacacttaaatgttctttcagcgttgtgtacgagcttgtgctccttgagagtgctgctcagccgaaaagtcttgggacagtgggagcagcgaaatggacgatctggtaagtgcaggcggctgtgctgcttgaggtgctgcttcatagcgaaggccttggggcagtgggaacacttgaatggtcgttcaccagtgtgagaacggaaatggttatcaaggtgaaacttcctcgtaaatgttttcgtgcacttggagcacttgaacggtctctcgctgccatgtgtgcggatgtgacgccggagatcggatgatttaataaaggtttttgagcactgtgaacacttgaatggtcgttcgccagtgtgagttcgctcatgcgactgcagagtggactgctgcgcaaaggtcttggcgcagtgggaacactcgtagggtttcgctgcattgtgggtcttcatgtgcgccttgagagtgactctaagtctaaagttccgcttgcagtaggggcatgggaaggattgtccgtccatgtgtgttcgcatgtgcctcagaaaagttccctttcgctggtatttcttgtggcattctcgacattcgaatgctaccttcttgctgt

SEQ ID NO: 26315 - DNA, 2611 bp, DROSOPHILA
attgtaacaaaaaaatttcggaaaagctgaaaaaatgaacaatgataatccgaatatagttttcaatcccctgataagctccatccaaaaagtagtgctctatgagacacgagcgcgcctctatttggtgggcagcaacaatcgggagactcggtttcgcctcctgaccatagaccgacttgcccacaaccggctgagtatcgaggagaatgccaacgagtttaacagcctggagatccgacgttttgtcgcttccctttcgggttcgcccaaggtgacgtccgcttatggcgtccttggatttgtgcgcttcctcgagggctactacctcttgctggtgacaaagcgcaaatgctgcgcccacatcggccgccacctggtctacactattaaggacacggtgatggtgcgtgtgaacgaggtgacctcgcaacgaccaccgcatccgcatgaggatcgctacaagcggatgtttcagaatatcgacctccgtagcaacttctatttctcatactcctacgatttgacgcgaacgctgcagtacaacgagtccgcgcctcgctacgttggtgccaaggtagatctcgaccgcgacgaacctcttcccgattggaatacgctaactagcaatgtggacaaggcccatgagcgtgtggattacgcgtttcgctccgattcccgcaagcgctttgtctggaatgcctatctcctgcagcccatggaaggcataatgctcaaggactggcttctagaggttactcacggttttgtcagccaatcctgcatcagcatttttgggaggcacgtcaatgtttgcctggtggcacgcaggagctcacgcttcgccggtacccgtttccttaagcgtggagccaactttcaaggggacgtggccaatgaggtggagaccgaacagatcgtcagcgatggtcagagaatctgcgccttcacccaaatgcgaggctccataccgtcacactggtcccaggatatcagtaaaatggtgcccaagccgcagattcaattggacatttgcgatccatatgcgcagactccgtcgcttcacttcgaacggctgctcttccattatggtgcgccgctcattatgctcaatctggtgaagaagagggagcggcgcaagcacgagtcgatcatctccaaggagctggagtacagtatccgctatctcaaccaattcctgccgccgccgcaccgcatgaagcacatccacttcgatatggcacgacaaagtcgcctgagcggaggcaacgtcatggagcaattagcaattcatgcagaaagtattgtccaaatgacgggtatgtttttcaaggcggctggcagtgagcccggtttgcagactgggattgtacgcacaaactgcgtagactgcctggatcgcaccaattcggcccagtttgcgattggaaagtgcgctttgggtcaccaactggagcgtctgggttttgttaaatccgctaagctggagttcgactcggattgcgtgacgatgctggaaaacctgtatgaggagcacggcgatacactggccctgcaatacggcgggtcgcagctggtgcaccggattaagacataccgaaagacggcgccctggggatctcagggtagcgatgtgatgcagaccctcagtcggtactacagcaacacgtttagcgacaccgagaagcagcacagcatcaacttgttcttgggcatatacaagcccagtttgacaaagcagggtccacccatttgggagctacagacggactacgacatgcacaacgcattcgtgccgagagcggatagcaaggccatcaccgattgggtgcgccacaaggttcgcgcgtgcctaccctattcgtgtgcggactccaacaaactggtcaaggagctgtttcgcgttcacagcagcggcctggaaatgatcgatgcctactcaaactatcatcagtccttcaagtggactgatttcagcgagcacattgcgttcgagatcagccagctggcactgcgatacatgcccacattccgcactaatttcagtccgttccagaggcaaatccagacatcgcgaaaggctcgtcaaaatccctcgatgacggggcaaagttccacgggttctatgaatagcaattcctcaagttccagcgaaggtgacgatagctccagtgacgaggagttaagtgcaagttttgccgagaaggaggcaaaccagacggaatcgaccgaaccagccgccgccactctggccacaggactgccctcgatggaggaaatctatgggtgcaccatcaatccgccctccaagcagagcatggctgtttataagaagtacgtgcagatgggcaagctgtccagtggaggtgcgaggccggctcagacagccgttgctcagcgcgatcaggagctggccaagattatgcgtggcattaccctgcgtccactcagtgactacggcaccgactcctatctcagcgtgcgtccgccggtcgttcctcgcaagagtctaactatctatgccgagtactgtcgcactcgaagcacctttaatgctgtgcccaaactggaggaattcgatgtactctatcaatatgtgcaaaagctgtag

SEQ ID NO: 26316 - protein, 858 aa, DROSOPHILA
MNNDNPNIVFNPLISSIQKVVLYETRARLYLVGSNNRETRFRLLTIDRLAHNRLSIEENANEFNSLEIRRFVASLSGSPKVTSAYGVLGFVRFLEGYYLLLVTKRKCCAHIGRHLVYTIKDTVMVRVNEVTSQRPPHPHEDRYKRMFQNIDLRSNFYFSYSYDLTRTLQYNESAPRYVGAKVDLDRDEPLPDWNTLTSNVDKAHERVDYAFRSDSRKRFVWNAYLLQPMEGIMLKDWLLEVTHGFVSQSCISIFGRHVNVCLVARRSSRFAGTRFLKRGANFQGDVANEVETEQIVSDGQRICAFTQMRGSIPSHWSQDISKMVPKPQIQLDICDPYAQTPSLHFERLLFHYGAPLIMLNLVKKRERRKHESIISKELEYSIRYLNQFLPPPHRMKHIHFDMARQSRLSGGNVMEQLAIHAESIVQMTGMFFKAAGSEPGLQTGIVRTNCVDCLDRTNSAQFAIGKCALGHQLERLGFVKSAKLEFDSDCVTMLENLYEEHGDTLALQYGGSQLVHRIKTYRKTAPWGSQGSDVMQTLSRYYSNTFSDTEKQHSINLFLGIYKPSLTKQGPPIWELQTDYDMHNAFVPRADSKAITDWVRHKVRACLPYSCADSNKLVKELFRVHSSGLEMIDAYSNYHQSFKWTDFSEHIAFEISQLALRYMPTFRTNFSPFQRQIQTSRKARQNPSMTGQSSTGSMNSNSSSSSEGDDSSSDEELSASFAEKEANQTESTEPAAATLATGLPSMEEIYGCTINPPSKQSMAVYKKYVQMGKLSSGGARPAQTAVAQRDQELAKIMRGITLRPLSDYGTDSYLSVRPPVVPRKSLTIYAEYCRTRSTFNAVPKLEEFDVLYQYVQKL

SEQ ID NO: 26317 - DNA, 16989 bp, DROSOPHILA
cactggggaagccactaactccaccgccagcgatcaggttgcggcgttcgttgtgcagctggagaatcagcgggatgtgggcatccacttggacaaactcgccgctgcaaccgctcacaaagcgctagaaaaagtcgacgaacaggattagacaggatagaacgtgagagcgttggaaacaggtacagttgaaccttcgtaactatggaagttcaacttcatttgtgcagatttatcatcgtgtgcatcaacttacaccgctgttttggcaggccacgtgtcttccactgggacacagttctggatcgcaatagttttgtgcgaaagtaaaagtgaaaatgataaggaccaaatataaaaggaaaatccagcagggagatcgtgacattttggtttcatatacgcaaaattactaaatttgctacacatttcgcaaacagacataacgttcaatgaatggagcgacgcacgtatttatttaggccgcagtctgtcttttgattttgcgacgaagtaaacaagtgctttattaaaaaaaaaacatatttaatacatatatgctgattgaatgaatgcacgctcgagtacagtgcggaccataagtaaatattagttacttgttttgttttatcccgtaagtcccttcgaatgctgctgtgtatttttaaatgttgcaaaataattaaagacaatttcgaagactttttcaaaatgtcaagatataatccccgtgatgggctaaagccgtgacacaaaccaacggctagtggtattcttatcgttatcgctgcagttatgtcttgcaaatattaagctatatataagtgccgttactatgcccaaaattagtccgagctcaatttgataattgatattacaaatttgaattagtttgcatttcatcaggggtgctctcccaaaatcaagtttggtatttaaagtgcgcttggtgtgtggccacaccggccgataggcacgcacaatcgaagaacgattgccaccgattggttgcgacgacgaatccgcacgaatccatgagccctcgcaccgccgagtcttccagctcctcccgatcgcccagtcgtccaatcgccatgtcccagacgcagtgccgcctgtaaacaaccgccgagtgaagtccgcagcccgcagtcatcggtagcagcagcgtcaggagtccggaatccgtttctcggtttccgcaacaggttgcgtcgccttcgccaacagaaggttttagtgcgagctttgatcagagcgtggagtgcgtatacgcgccaggatgcagcagcgccgacagccggcgaatggcaacggcagaggaggaggaaccaccgccgccgtccgtacggaggagcagcaacaacagcagcagccattgagtcaggatgctggcgccaaggaggcgggcagcacgccgggcaaggcaacgggacgcggctgctatttctcgctggccttctccatcggttcgatgggcctggcctgcggcagcctgtggcagataccgaacagcagtgaccgcatctcgctgcagcgcggcctggtgctcacctcgctgggattcatctattttgtctcgctaacggacttctgcaacaaatacctgctggagacgacgcatggacagcgctttcgtcgcaagtaccgcctgatgatgtccgacgtcctggagataaccaacaagtgagtaggagtggacgcccacgcaatgcacggatgcggctgtcttgcacgcacattagtatcgattttcccgcactgccacccacacacgcacttactgcacttgcgttatgcagccgaacggggtattggcgggtggtgggggctttccatccaaataactctgtggcagccaatagttgcccttttctcgaccacatgatctacgcaatctatttatgcgtttctaatacttatataagttcataattatagacacttctgtgttggctaaatcattaccatgagtgcaactggagcgatttagttaaattctcatgttactcatatttccacacagacttagttagacttttgggttgaaattcagatagctaaagatacagctagatgctgtcatcgattacgtaggtaattgttggcccaagtaacaggtagtctcaccatcaatcatattcccgccttacgtctttgggcgagcatgacgatgactcacccagtgacattacgctgcggagcttaattaggttagactatgaagtggaaacctacccaagtggctaccctccctaccttcagtcttatcttgggcaatttattagcgggcgcgagttaatagtgagtgcctagcccagttttaagtacgcattttggagggcacttgctcatcgacgtgtagacagatggaatcgagcgcgctcggctggacgctggctggtgtccccgacattcggcaatggcgttccttagccgacactgatttatatcatcatctcgagcacagcgacatgcgggtcaaggtctcgtggcgggcgtgggatgtgggcggtgggcggttggatagaacgggttttggctcaaggcgagtcgggtttcgaaacggaataattgcgtggagaacaagcatccatcgacttgacgacgcatttaactagccagtgaaacatgctccaatttcgcaaagcacaaatatatcctgaaattcaattgtccatttggcaaaaggcatttgtgatctattctcccttgcttgagcgagtgaaattatttcacagcttttcaattcatctgatgcaagcgtacaaaacggccatttattagtaattgcccaactatggagtgccccttgcctaactattacccccgcagtccaaagtgttaattaaactgtgtgtagaattgtttaacgcgcttaaattgagtttcgctctcttctcatttcgtatctactcccctcctgccctcatcaccgccaactgcgattacaaacatgcacatttgtcatgatgaaacagagagtgccggtctatatgggtaacgccatgtgtgcccaattgctgtacaggtgttatacaacccgatctctggacgggaattggctcaatctgctttatcagtagacttggataagcgctcatcacatgctttcttccacaatgaggtgtatactagatcttgggttctcttctttaccatttgtaaagacttttccctttctcaatttaagttgagctacagaatttactgccttagttatgctattcaaattgtatgcatggaatctattagtatccgcatgacccgggttacgcatctaatcatcaaagaccctgccagacgacccaatttcctggtggctaattgattcaccacgatcgttgtaagtccaacagacgcacttcacctccacgctgggcgataaggcaatcagccggggctctagtgattggccccgcctatctgcccgtcctctatctatctatctatccgggtctgtctgctctggcttctgctatcggggaaacgaatcgatttgggtgagtgagtgcatctagcattgataagcggcttgtcgttagatgcttagaaggaggctttcgaaaagctcgagaatattgcgaggaaaaactgggtatgacaacaaacaacaacaagcaaccaaacaacgtagaactatttaaaaaaaattttccatcgccactactcgccatttccccgagcccttgactttcgtcataaatcttaattggacatagttgaggctatttgtttatttacattaccgctggctcgcttggattgtggacattcgtggcgctttgatggcgactcagtaaccgatatctaaatcacattcgatacgattcgattgccctatcgtggcccaacccagatattatacagcacctgtacgcgaatacatatagattcgcatgtgtaacatacatatgtgtatatatatagtgggtataatatagccgacgactatatagtaaaatgcgcagccggtagcggggcgcagtgacaccttttgggaccattcattaggtagaaccggctgcgcttctaattggaactaatgcccacattcgatgtgggggactttgcaacggttctgttggcctgaggccgagtccgattctgattccgattctgattccgataccgattcagtgccagaatgctactagtgctccagggtgcgtccaaggttaagtgatcactttgcactaggcggcggaatcacatttgactaattgattgcgtgggcaaatgggtcaacatctattgtagtcgcagaaatgatgtcaaaagttatggactaaatccccagtattacattgctatacatttcttttaatattgaccattaaagctgtattggttctattaaaacattaaccaattattatcgaagcacttcagctaatttgagtctatttcaagcggcttcattacgacttggggggttgggcaatcgcttcgtattagttggtggcgccagttctgcgctaatgaccaacatcctggcattgagcaatcgccacagcaggaccttggccggttccaccacccttgacctttcgcaggtgcgcctggtggtgaagtcatcgtcattgccattgcgtggaaaccctatgtgagtgtatatggatatgtagaacttgaactggagtgtgcttagctggtattatgttaccatttataattgagtggtagtttattcaaagcctacaaaatcacgtataatttgtaaaggttaaaaaaaggattgatttttcacatctatgtatgctatggagatcaatagaaattgcttagtttagcttgtggtccacgatgccggatacttggtggtcaactccagattgcgcaaacctcttatcacttacgcaacttgccccttcccttggacttggacttcctcttcttggaggggcgagaggttttggtcttggttacgccacagttgctgctcgaagttaagctgatgctgatggagctgctgctcaagtggaactcacttacttctgcctcgacaggatgaaagctcactgatttggttgttccctctttgcgttcctcctccttttgaaccggcttctcatccagtagcttttgctccgtctgttcgatgtcgtcataggttatggcctgaatcattggctcatctggcagaataaagtggtccgagtccgccacggagtgtccgaattgcaccggagaatgaaatgacatgggagcaccggtagccgtgcacagacgtttaggttctggttgatagttgactggttttggcaaacgcgaaccagatttccatatggaggacacctgctgcagggagttcatatcacttttaggcgcgtcaccgtctccaacgcccaggctatgcaccgatgtaggcacctggtcagcgccaccggcagcgcgagcttggcgattggagcgtcgacgacgagcacgagatgatcgatcctcgggatatggcatctgggccaactgctccatcatcgacttgtagcgggcatccagcttgagcggtggcacctcgtacggaccatttagaactgcctcgggatctacgaatatctttggcttaactgccggttgtggtgatggctccttaacctgcggtggatcctccagcggcacaggcactccgcccagtgctttcagctcgggatctatcttaggtgatccctcctccgctgcctttaactgctcttcttcgctggccgctgcagctgctgccgccgctgctgcttttctacttgcccgcctcgagcgtcgattgggcgaagtgggagcgttaagttgacgcaccattgggcggtaaaggtagcgaactacctgtggcttcctgccacgctttaggggaatagacacgaagtactggtagctcatatcgatgccgtcttccatggtacgaggcactttgtgctgttccttcctaatgatcttgccaacaattggagattctggtttttgcggttctgggggaggcagaactttagggattccagtggatgtcgagggctggcgcggtctattgaccgaaacggaaggtggtctccgggctggaaatctcgataaagttttgctctcttcaatgtacggattccttgatattcctgccttcgactctctggacctcggaagcaaagagcttttcgatggattcctcattgggtgccttctagtctttggcggcattacatactgattcattgaatgattaactccagttgagtcccttggaaggcttatcatatgattcacagatgggctctttgattcatttctctgctgacttgccgctctcaccgttctttggtttatatattgcctgggatgttcaattgattcgtctaaataaggattcgtcacttcattcttgtgcagattaatcgtagatgagtttggttgctctattggttgaataacccacgaatcctttgtaggttcgtttgtcgaagcacctgattgatttcttggctgatccatgattagataaatggaagcttttctaaagggatcctttggtccgaatgcttcatacgtatcacgatccttcggtagattgtctttcgatttgtgcatcatggcagcttccttcagttgagcggttagctgattgacgacatgatttaccgactgactgattggtatcggtaccttaaccatgggactgaactttggtggcgaaatcgattggaccatgggtgcgttcatggccagcttagttttggcgtttcctttctgcacggtcagctttttcttctccttctccttctcgttatccttctccatgggaatttccggcgattcgacgtcacctttcgatgcgacaggctggatgagcctcatcaccgttgaggttagcttaatggacttgctacccaatgccccttgaattccaggattctgttgcacggtgctggacgtcctgatcccattgatgcactctatcacactggtcttgctgctggtcgtgttcgagtggggacttgaggtggacatgctactccttacaccgttctccatggtacagcagctggaagcgttgctaatggttgggctctgaaggcgactctggctggtagcgggactagcgtccggactgggagagcaggattccagcccggtggcgggtatcttggttacggttctggcatcacgcagcgccacatcctttacctccgcaatttcgtttgaactggtcgagatgcttggcgatctaaaggatgattgttgggacaatggacttggtaacctactggctgaccagttgggggacctactatgtgaacgactgctggactgggctctagtttttcggctatccatctggcgcagctgtgcctgcatcagctgatcgacgtgcatgatcctctggctgggcacacggaatatgcgcgatgttcgtcccttgatctttgtccgcccaacctgttcagccggcaaagacatcagtagctgcgacctgtgcagatggccactgctactgctcccgtccaaatcaccagcgtgatcctctttgcgctcctgcgatccgctggcctgttccttgaaattatcctcggaggaggactcgctgcacggcgcaaagttatccgatggcttcatgatccacttagcctcgtctaggcgccgcgatatgggtatccttgcagaagtcggtggagctggccttcgacgcaacgtggatgtggcagtggtttgcataacaccccttgcaggaacaccaccaccagttgctctcttgggcactgccttgccagcttctgctgtcaccgcagttgcaggacttgctcgattcggtggtctcttgggcacagctccagctgctgatggtccactagcaccattcgatggtcttggattcgatttgactggcggctgtgatgcactcgttcctcctcctagtcttgaagctcctgctgcacctggtacatctgcgtcctttgtgggctttggatttctttggcttggtggtttcgatggagcaccacgtgctgttggctcgccaccttttgcggcgacaccagttcctgttttggtctggagcgccttgtttcgatttactggataacggcggcctccgcccaagaattttgacatttccgtagacattgcgtttacgccgaaagttttgtaataggtctcttggtcgaacgggaatttcaattgatctcaaaatttagtttttgtactttttctcaatggttgaaaacgattttgttgaatttttatgcaataatttaacataatgattggtaaagagaataaataggaatgacatttagtagagttacatagctactttgatgtgaaaaaaaaaaaatatgttcgaattgtccaagttaagtcatggctatgttttcaatctggatatcaaactttcgataaacccatcaacaaatccaaatttgtagtttctcggcgagattgtgggagatgtgctgtgcaccgatgtgtgggccctcggtctgcgggccttcgatgtgcaacccgcccgcttgtcgtgtgccactggagccactgcatccgtcaacagtctaccactgctgtccgtccacgaagtgcacgctgtgctgtaataacgaatcaaaacacgagtgccactgcacctgccagcgcaacaagcacatcgtggaggcgttcagctgcctgttccgggttagcaagttccagatcctgaccaccctctttctactggcctatcatgagagcagaccgctgccgcgctttccgcgcgatcgcaactggtcggtgatggagaacgtgaaggcaccgtactcggagttgcacgacctgaggatctacgacagcctgttcgatcgctgtggcaaccgcatcgatccgctcgaccaaaagaacacgtacaagctgttgcgcctgatctttctcggtccagtgctggtgcccgatcagcaggcacagctactggccatgctgtacacgctaaatgcccatgccgtctgtcccgtggatctcaatggcctgctatcggtactgcagtatgtgaagctggatgagctggtgtgcggcatcttggagcaggacggacgagcgaaacgtttccacagcgggcggcagtgcttggagctgtgcaatctctaccagaaagtggtcgccacggacaaggatgcggttattaaaaagcatcgccgtcgcaaggagaagtccaagagcaaggattcggaggcacagaagaagccgcgtagaaccatcaccgcgcagatatactgcacgcgtcgcgttccggagcccgaggatgttagctcacggatcgagactatcactccaatcgtacgcagtacagccacctcgttgcgtcgctcctccaacaagaaaagctggatgccggtcaatcggagcagcattaataactcggagaagggatctcgccggggttcgcgcaatctcgcgggttcaccgaagagaaacaagccggaagtgtccaatgtgggagtgcgaatgcagggcggcgaccgccaaagaacgaagtgaagccacagtgatttataagtctcccccatctgtttttaatctcggtccatctacatttactaaattccgtaatgcaaatggtttttcttctcatctactatgatttattgatcacaaattagtggtatactgatacatagaatcctgtacatccggacatatcatgtccatgtccatgtcagttatattctgcgcttacaccgcggactaggcagatactccccgagcacttgctcctcgaggagacctgtgtaggtgggcgggatgaccatggtatcttccgagggcctgcgcagttgtccgtgcctccagtccaggctgtcatctgcgtccgcatcatcgtcactggaggattgtatggtatcggaatcattgtcacccgactgctgcatatttctggatgggatttcggaagaggcgcgttttgctctcaagctctcgaaaaatatggcaagtggcgagagattggacattttcttcggttcattagctaaaggagaagctcctgcgacttgccgtcctccaccttccatcctgaacgacgattggtccctttccgtatttccccttgcattacaactggtggttgtttcattcctcaacggataattctcgtagtatgtcgatgtggatggtcccctgtaaagtggaaaatcatgtatgcggtttttcgccccttgagcttgtagatggcaggcatcgtttgagtggagcatccccctcatctggttttgatacggcctggttgacaatgtaggattctgttcttggctgtagcctctttgatggtagtaatccagttgcggattgtgtcccgatctaggcctagttccacccagagctttgaccacacctttaagaccctgagcggcggctcttatggctccagctcgatcccttcccagcccttcttgatatgtcgcctgaccagagtaggagttattccgtggactattctgcatgacgtagttgttttgcgtataatacggcgagccatcaacctgatcttcccacctttggttaggatcgtttgtatagtgacaaggtgcttggtactctggaacccattctgtggtttgctgaactggtgggttttcgagatgatactgcgtatactctggacacatggccaaattttggtgtttcaaaggtggaggcggtggacgtggacgctgagtgcgcagtagagtgcgagcgtggtgatgctgttgtggctcccatctcatagcatcactgaataacatggccttatgacgtcggcacgcacatggaagtggagaggatctggtctgtagatatgatgcatccagcggctgacttggctgatgagtgtggtatctgcagcaacagcaataatcttcctgctcttcctcttccgcattgaccacctcatgtgatggctccacactggccaccgagggagcaggagcacagggacatcgcacactatccgtattggagctgagtgcccggatggaggtggtggagcgcagggagcgacaactacaccgtgatccagacatttgacttcccggctgcgtgtccgtgtagtatctgcgacccgtctccaaatgcgatggtgccgtgctgcgaagcgatgcctgatattgaattggcgccttcttcatggccgatttcagaggtgagcttcggcactgggattgggaatccggccgcgaccaagctctggagtactgactggagtagacatcggagttgaagggatacgtagagttatattgaaatcgttgcttttgttcccgcttctttgcgggctcccgactttttggtgtccaggaagatggatccgaaatgttaggagcatctaaagcatgctctcgttgcgattgttcgaaggaactgcaggaggattgtctcttctgacatcgctttttgcttggactcggatttgagagcttcgcttcttgttgtctattcggagatgttcctcttgatgatcctttgggtgatgtcgtctcatcttgttgcatgcaactgggatttgaggaatacggcgcttggttttcccccttgctggtgcttggtagctcctgactcatcgctaatggaacagcgttttccacctgagaccttcccaggctaagggaactactgcccttggccgggggagtttccctgccgggctcatgatcctgcttctttttcttgactcttccaagactacgtagcttcgttgtggctgagctagtgatgtttaatcccttggcgttgaattcatctggcaacaatgtacctattatcctcggtttagattttggcgttattatggttttcgaatgggattcggcttgagccttggactgttccgatgaagcttcagtgcctgaagctgcttcaccttgatctttcgttctgttcgatgctttagttgtagatactggactcgatctactggacctacttgaaccctgtttaggattgggtctcttcttcgccacacgcttcattagctgatggaaatcattggccagatagcaggccctggttcgatgtccacacttggagttatccaccttactgttcgacttccttgtaacctcggaactttggagcacctcttgttgtgcttcagccagtgcaaaagtgcaattactaacgggcggaagttggtaggattcctgcggcagtgcccatttacagtcgggatggcattgtgtcgccttcaattgaggttgctcctgctggacttgattccaacccgctaaagttcgttcgctggcgggtgtgcgaaatgttaaggattgttcgctatatgcctgctcacggataacttcgctatccggatgacagttctggaaaccattatcggaaaaagactcgggtttcagtgtggtgctgctggtcccctcctcgaacctatcattccaatcccccttggactttttccagctgcagggtgccggctgtgaggctaaatggaatggcatacttgttccccggtcctccttttgccgtttcttgttctgacgcatttgaccgtagcgctcccggttttgttggtagttcacattcaaattgtagagtagatgacggcctggttcaatgcaacgcttgcagatccctgtgaatccactgaggatgccccttggctggtgtcggcactggcatttcctgggcatttcgggcgaatgagcagttgatgaagtaggtgaatagacgggcgaagaagcggttggattggcgggcactggaagagctgatggataggaagggggcggagaaaaactcgtgggaacataggcagttcggtatgactgcgactgtcggcgaaaacagttggggaatctcctccttcgttcgggattcgtttgcttcctgtccttttggtcacctcttcggccctgccatctttcagagttactattctcagagaaactcgacgattggaaagtctgtccactgtccacttgccggacctcctgatcatccgctttgttctgctgcttgtccaaccgcttcgttcgcctttgtttctgtcgctcatcttcgaatgtggttgactcgaccttgaattccgttcgcgtttccttagttaccaagcatgaatcatttgtgcagctttcattggtacagtagttcttcttcagcttctctgatttctccttaaaagattttgaacctttcttttccgccgtcttcttggcgggttgctttaagtcctccgtttgccgtgattcgaatggtgaccacgctggaggcaacacagttgtggccaccgtatcgtcgcccagaaatcgatgcttcaaattcggatggcgctccccacatggacaatatgcctcagtgtcgccccagtgatgcatcgagattccgtagagcgggcagctctcgctcatggccgcctcgtagctggcgaggatgcgaaagaactccggcgaaatgcgtcggaagcgcgccggatcgagacgccgttgtggcgcctggcgcaagtcgaacttgcgtcgcaggcacggcaacagcggctccgtccggagtgcatccaaacaatcgctggccatgggctgtccatcggcctggaagaggcagtccagggatgaaccttctcgtcgcttcaggcaggaacagctgcctcttctcgatggacaacgatggccatgcctctcccagtggaatctccttcgcttgggactcttactttgcatctcctccgtttgggcattgccgatgagaaagggattaccattaccacctcgagtctccgtggtgggaatgcatgctgccaccttgcctccgcactcctctgcatccttcatttggctagccactggacttgatgctccggacttgctggcttgttgttgctggcgacaaggagtcgagctactcgactgtttctgtccggacttcttgctgtccttatcggccaatccgtcactcagggcggccagctcctcggggcttagcttgtccaaaaatactttctgcttgcggaaccactcggtggctagatcgggaacaagtaaacgctccgatttccggcttccgccggacaagagctgctcgaaaagcgagcaacgggacgccttgccttcgagtgaagatggcggcggaaaattgctcatgcccttcttgacgaagcggtccagacagccggtggatcgggaggtgccggtctccagcagctgggttaggtattgccgcatggctcgttccggtccaggatcacatggctccatttccattgccttgggatgagggtaaagatgacaattggctgggatgacttcttctggttggttacctaaaattttgatgattttccagataatttatgagttttgtcgaaatccgaaggttcaattgaattttgagtcataagaacgaaatcgcaaaatgtgaatttaagtccaagacttacagtcttgatacgataaggtaaaatgcgtcatactagattatttctacaatatattttatcacataattggagcataagatttagtacgtacacacacatatatgttaaggggggaattattatgtatgattaatgctaaaacaatatgagatttagagaaaaggcttccttatcccatcgcattgctatccaatgaatataaattaaaactcgcccatttttccagaatcgtctcggcaatccaggcctcattctccttcttcgtgggactcatcgtctgcaagtcgacgtgcaccaaatcctttgtatatgcatcccacttcttgatggaggcgtacggttggttcggcactgcttactttatgtacgacatctggtcgatgtacaaggtgcacacccagaagatcgccgacaagctgcacctgctgcgcattaccaagggtcaaggggcggtggtgagcaatggccacgccaatggcaaggtcaacggcaagtcggccagcggcaacaacaacggcagcactccaacgaatctgcacgagatctgcgactacgatggagcctgtgtccagatacccaaggacggcagatgggactttctcaagtacgtggtcacgcacccggtcatgatgatacaccatgtcttcatcggaacatttggattgctggtggtgacggtaagccgcccaacttggcacatgcaacaacaagatatgtatagttaataattgtaatattccgattgcagtacattcgcggtggcggtcactgcatctacagctacatgttcatgatggagttctccacgccgttcgtctcgttgcgcagcatcctgagcaccatgcgcctcaaggattcacgtgtgtacatcgccaacggtctgctgatgctggccaccttcttcgtgtgccgcgtctgcatgtggccatacgtgatgtggcgctacagcctggccattgaggctgcatccctgtggtcggccatgtggggcctgccgcgaggatgcctcatcagcatcgctatactgttcttgccacagctctactggttctatctgatggttttgggtgctctcaaggtgtgtgccagctgagatcgtatacattgtattgtgtcttgctcacatgcatgtgtctctttcattttcaggtctttctaccgcaaaagagacggccgcccaacgcagttctatcggcaaagtcggcggccgtgcccacaccaacccccaccgcccttataaatggcaaaaattagtgcaaattgtatttattttgaggcagagttccagccgcatccgttttgcggagatcttgctattgtttatacatttttaattatacaacaagaacgacccactactaaccggaaaactgaaaaccggaaacagaaaaccatgacggacggaggatgaaaaaggcagcggaaacgatggcgacctacaaatgaaccgaagaccatggacagacccttagtgttaaataaagacattatttactaaaaaaaaaacaaaaaaaagaacgataaagatgaaagtgaagaactaagaacaagaacaaaactaaaaccaaatgcagataaagcgaataaactatgttgcttattttttgaagcaagcccctaaccattaacgaattaatgttgcattcaatttccgctatatccacgaaatcgatgttgttaaccgccccgaaaaattgtcgaggggaatgaatgcttgtgttaataccataacctgttagtaatatatatattgcaaatgcaaatgcggaagaaggataactgagcatagcatatgaaagccaaaagaaattggccagatgcacagctaggaatgttcgatgtgcatatattaatatacatatacatatatatatatatattaatattgtgaaagtcaccaaggatatatatatagataccagataaccggggaccgtagatcatttttcggccatctatgtagagaatatggtcaagtggaaaacgatgtatatatattttctgaattgcatatcacgatattttacaagacacaagaatattagtaatcagaattttaattgtgctacattagtatcttctttatcttatcgtttaaattcaaatgctgtaaacttgtttgatatatttcgatatgctcattttgcgaagcttctgatgttcagacaatttgatattgatttgttttactagattatctttattaggttatcaaagaaatgaaaaaaaaaacacatttgttacattttccacctacgagtataatatatatgtatattggcctactttgtgcgctttagcctaacttgcttagttcattacattataccattgaaaactcttccaaaataaacaaatagcacaatccagacttataagcattacggtccctgaaatagaagtcctatattggttgcttttaaacgaactacctatgtacgctggacattggtgtatatgtttatttgtgaactgtatgtgaaactagcacaaaatcaaattttaattgagcttacaagaatataattatatatgtagttaactatttatatgtaacaatgtggcgcaacatcgctttggcttattgccaagtcaatgaaaaacgcagaacggcagctcctatgtgtttt

SEQ ID NO: 26318 - DNA, 1948 bp, DROSOPHILA
ccgattggttgcgacgacgaatccgcacgaatccatgagccctcgcaccgccgagtcttccagctcctcccgatcgcccagtcgtccaatcgccatgtcccagacgcagtgccgcctgtaaacaaccgccgagtgaagtccgcagcccgcagtcatcggtagcagcagcgtcaggagtccggaatccgtttctcggtttccgcaacaggttgcgtcgccttcgccaacagaaggttttagtgcgagctttgatcagagcgtggagtgcgtatacgcgccaggatgcagcagcgccgacagccggcgaatggcaacggcagaggaggaggaaccaccgccgccgtccgtacggaggagcagcaacaacagcagcagccattgagtcaggatgctggcgccaaggaggcgggcagcacgccgggcaaggcaacgggacgcggctgctatttctcgctggccttctccatcggttcgatgggcctggcctgcggcagcctgtggcagataccgaacagcagtgaccgcatctcgctgcagcgcggcctggtgctcacctcgctgggattcatctattttgtctcgctaacggacttctgcaacaaatacctgctggagacgacgcatggacagcgctttcgtcgcaagtaccgcctgatgatgtccgacgtcctggagataaccaacaaaatcgtctcggcaatccaggcctcattctccttcttcgtgggactcatcgtctgcaagtcgacgtgcaccaaatcctttgtatatgcatcccacttcttgatggaggcgtacggttggttcggcactgcttactttatgtacgacatctggtcgatgtacaaggtgcacacccagaagatcgccgacaagctgcacctgctgcgcattaccaagggtcaaggggcggtggtgagcaatggccacgccaatggcaaggtcaacggcaagtcggccagcggcaacaacaacggcagcactccaacgaatctgcacgagatctgcgactacgatggagcctgtgtccagatacccaaggacggcagatgggactttctcaagtacgtggtcacgcacccggtcatgatgatacaccatgtcttcatcggaacatttggattgctggtggtgacgtacattcgcggtggcggtcactgcatctacagctacatgttcatgatggagttctccacgccgttcgtctcgttgcgcagcatcctgagcaccatgcgcctcaaggattcacgtgtgtacatcgccaacggtctgctgatgctggccaccttcttcgtgtgccgcgtctgcatgtggccatacgtgatgtggcgctacagcctggccattgaggctgcatccctgtggtcggccatgtggggcctgccgcgaggatgcctcatcagcatcgctatactgttcttgccacagctctactggttctatctgatggttttgggtgctctcaaggtctttctaccgcaaaagagacggccgcccaacgcagttctatcggcaaagtcggcggccgtgcccacaccaacccccaccgcccttataaatggcaaaaattagtgcaaattgtatttattttgaggcagagttccagccgcatccgttttgcggagatcttgctattgtttatacatttttaattatacaacaagaacgacccactactaaccggaaaactgaaaaccggaaacagaaaaccatgacggacggaggatgaaaaaggcagcggaaacgatggcgacctacaaatgaaccgaagaccatggacagacccttagtgttaaataaagacattatttactaaaaaaaaaacaaaaaaaagaacgataaagatgaaagtgaagaactaagaacaagaacaaaactaaaaccaaatgcagataaagcgaataaactatgttgcttattttttgaagcaagcccctaaccattaacg

SEQ ID NO: 26319 - protein, 429 aa, DROSOPHILA
MQQRRQPANGNGRGGGTTAAVRTEEQQQQQQPLSQDAGAKEAGSTPGKATGRGCYFSLAFSIGSMGLACGSLWQIPNSSDRISLQRGLVLTSLGFIYFVSLTDFCNKYLLETTHGQRFRRKYRLMMSDVLEITNKIVSAIQASFSFFVGLIVCKSTCTKSFVYASHFLMEAYGWFGTAYFMYDIWSMYKVHTQKIADKLHLLRITKGQGAVVSNGHANGKVNGKSASGNNNGSTPTNLHEICDYDGACVQIPKDGRWDFLKYVVTHPVMMIHHVFIGTFGLLVVTYIRGGGHCIYSYMFMMEFSTPFVSLRSILSTMRLKDSRVYIANGLLMLATFFVCRVCMWPYVMWRYSLAIEAASLWSAMWGLPRGCLISIAILFLPQLYWFYLMVLGALKVFLPQKRRPPNAVLSAKSAAVPTPTPTALINGKN

SEQ ID NO: 26320 - DNA, 3690 bp, DROSOPHILA
aatcctgcaaggtacagttgtgctcggcttgactatacatgattttctgcaaacccacccaaggatattccctcttttccgctaccatcatcgatgggtgagtgaaaaatatcgataaactgcactcgtagcacccgcccacaaatcccaaactgcgtgcattttatttatttatgtatattataaattttacatacacatcattacgttgggtcgaaatgactgcgttaactctttttatgcagtggggtggttggttgcggggtgccaatttacgcacaatgaagaaagttttgtgggcgttacaccgagggctccatgggcaagttgggcgataaggggattgccgtggggtttacctggtaatttttagcttccgtttgctgttgcttatttgggcatgactgaacgtccgctgacgcccacccacccacttcagcccactccaaataagtcagtccgcttgtcaggtggactgaaggactggaggactggaggactggtggacaggcggactcccctcaggtgtgcatgcgtgaaaatttttccaccacatcgattactttacgcaaattagtgcgtagatattttgcaaaaatgttctataaataattcatgtacagttcagtttgatgtgcacgtaatcggcgtaatacgagttgacttggacccctgccaggacctaaaggacctaaatggtccttcggctggagatggtaaatgggtggtcggcgaacacacactcatattgtcgcttcacttaatctaaacgcttaatttagcaaatttatgcaattttcatgtcactatcgagggtcaaacacgcatttctgtatacgcaatccttaaaggatagcggacataagagcttttcgacttgaatcgtttcgagtaaaatcttgtctatgttatttatatttaatttatttaataaaattggttcacaaaactcgttcatgcaataggtgttaagattagtcaaagattttaaagtaaatcgctaatcgtatccctgtggagtgggaaggccataaaagcttacattattgatatcgtagagctgtttcagatacttaagaacttcatctgttctccactccgagtcatttgaccggcaagtggggcaattctccgcgctggggaactgaatcttcgggaacttgggatcctccgtagagtctccagcaatgcgtgcattgacttcgttgtgggctgcccacagccagaggatctcctcgtcatgggttttcaccgaagtcagattacgacgaatggccatctgctgaaagtgttcagagcaatccgtgcagccgaagaagtacttggcgaatccatgaaaggttttcagtattgagcccgcctcaaagtaatttggtggcttagctgcctccacggtcaaatggtgaaacagtgtccacatagagcaggtaaagcttcgcagtaatggccgcgatccaatgcagccaacgtatcgccttgccttaaacacccttcgaccattttcaagcgaatcaaccaaatcaccaaagtcggctccctttatactctgcttcgagctcaacgagttgtccaggtcagtcagcaatagctttccgtccttgttcaatggattcaggtatcggaaaatcttaataatatttttaagagcattcaggctattaccctccaaaaggacccatttacgaagctcaatgtgcagcagtttatcgattgcctgctccaagtcggcacgatagacctgcagtggtggcgtaagcactttagttagtatcgcttgattttggtgatccagaaactcagtaaagtttggggctacagcgatgggtagtggtggatctggctgaatattgcggttcttaaggaagtctccaatagtgctggcatacgcttcactggagtccgaagatggtgtaagatactgggcggttccatttctatcaactatagccagtttttggtcgtcgggacccagtccaaattcgttaaatatctgagaatcttcgattatcctcaccgatagctctttgaatggcagcagttctagcagcgtgtccctgccgatctttgaattttttggctgaaggacaagagccacaaattgtatcggagtttccccatcttgatcttggaaaatttcatagtctgttgcttttaggggacgaaagtttggctggccgggtccatagtcattttgggataccaattcggccagtgttgagctaatgaactcgggatcttggcctgggattaccgctccaagaacatcatcgttcttcctcatgtcgggaccaaagaatcgcaatgatggcgtctggcggatattgaattccctgcagagttgagcatttctctcctgggcacaatctacggcatagatccggagaattcttcgccacttgtagaggtcgcgggaaagggtcttgaagaccggtgcgaagcgatgacagtcaccgcagaagctgttgaggaactggaccagcttgctgttcttcaagtttagagctggcctcagcgattcgatgtccaacataatcacattgtctgtatcgctatagagactcgcctcgttcgccgactttctggcattaagccggcccagcacatcagcaggggagatgaggagcaggcaataaagaagcgtcttgagtagccgaatcatttccacactgtgctcacaagtcaaatgagccacttcaactgattcaatagcaagggctctttggtaattatagccacatttggattcgccctgctccggttgttaagtctcccccaccatgccccaaatctctctctcaaaacaggttttcttaatttggtgactcgctattctatccaggcacacccaaaagaattcatgaatttcatatatattttaagtgtgtgtatatatcggaaaaaatgcaagtaaaaattggttcatgcggataataataataacaattacttctgtaaatattttttctttgatttacattcatttgatcttcttgaatgtggttctgcatcgccgcttaaataacttaaattatacacgcgttttaggtatttaagcacctcatctctatcaaattcacctgaatgtgtatagcagtccgggcaatgcttccgctccggaaactggactttaggaaaccgtgggtccccagaggcgtctccagctagtttttcattcacctcgttatgggcttcccacaaccataggatctcctcgtcatgggttctaactttcgcaatattcatccgcttcgccagttttacaaagtacatggaaccatctttgcagtcgtaaaagaacttggcaagtccgtaaagtccaattgtcacggagctgggcggatataccttcatctgggccgccaagacggtgaagtaatgaaacagtgtccacaaggagcagctaaaccgtcgagtatggggtgtagaacccaagcaaccgacgtattgttgttccgcaaagatgggatccaacctggtttgcagatcatccactacgtcccggaactcctctcccgtaatttcagtaacctcaaataggtgattcactaggctgttcagcattcgcctcccgtctctgttaagaacattgaagcggcgaaacaagcgaattatatgacgaagagctttaaacttaaagccacttataaaagccgttttagggatctcaacatgcaggaattggtagatggc

SEQ ID NO: 26321 - DNA, 1690 bp, DROSOPHILA
ggctcatttgacttgtgagcacagtgtggaaatgattcggctactcaagacgcttctttattgcctgctcctcatctcccctgctgatgtgctgggccggcttaatgccagaaagtcggcgaacgaggcgagtctctatagcgatacagacaatgtgattatgttggacatcgaatcgctgaggccagctctaaacttgaagaacagcaagctggtccagttcctcaacagcttctgcggtgactgtcatcgcttcgcaccggtcttcaagaccctttcccgcgacctctacaagtggcgaagaattctccggatctatgccgtagattgtgcccaggagagaaatgctcaactctgcagggaattcaatatccgccagacgccatcattgcgattctttggtcccgacatgaggaagaacgatgatgttcttggagcggtaatcccaggccaagatcccgagttcattagctcaacactggccgaattggtatcccaaaatgactatggacccggccagccaaactttcgtcccctaaaagcaacagactatgaaattttccaagatcaagatggggaaactccgatacaatttgtggctcttgtccttcagccaaaaaattcaaagatcggcagggacacgctgctagaactgctgccattcaaagagctatcggtgaggataatcgaagattctcagatatttaacgaatttggactgggtcccgacgaccaaaaactggctatagttgatagaaatggaaccgcccagtatcttacaccatcttcggactccagtgaagcgtatgccagcactattggagacttccttaagaaccgcaatattcagccagatccaccactacccatcgctgtagccccaaactttactgagtttctggatcaccaaaatcaagcgatactaactaaagtgcttacgccaccactgcaggtctatcgtgccgacttggagcaggcaatcgataaactgctgcacattgagcttcgtaaatgggtccttttggagggtaatagcctgaatgctcttaaaaatattattaagattttccgatacctgaatccattgaacaaggacggaaagctattgctgactgacctggacaactcgttgagctcgaagcagagtataaagggagccgactttggtgatttggttgattcgcttgaaaatggtcgaagggtgtttaaggcaaggcgatacgttggctgcattggatcgcggccattactgcgaagctttacctgctctatgtggacactgtttcaccatttgaccgtggaggcagctaagccaccaaattactttgaggcgggctcaatactgaaaacctttcatggattcgccaagtacttcttcggctgcacggattgctctgaacactttcagcagatggccattcgtcgtaatctgacttcggtgaaaacccatgacgaggagatcctctggctgtgggcagcccacaacgaagtcaatgcacgcattgctggagactctacggaggatcccaagttcccgaagattcagttccccagcgcggagaattgccccacttgccggtcaaatgactcggagtggagaacagatgaagttcttaagtatctgaaacagctctacgatatcaataatgtaagcttttatggccttcccactccacagggatacgattag

SEQ ID NO: 26322 - protein, 552 aa, DROSOPHILA
MIRLLKTLLYCLLLISPADVLGRLNARKSANEASLYSDTDNVIMLDIESLRPALNLKNSKLVQFLNSFCGDCHRFAPVFKTLSRDLYKWRRILRIYAVDCAQERNAQLCREFNIRQTPSLRFFGPDMRKNDDVLGAVIPGQDPEFISSTLAELVSQNDYGPGQPNFRPLKATDYEIFQDQDGETPIQFVALVLQPKNSKIGRDTLLELLPFKELSVRIIEDSQIFNEFGLGPDDQKLAIVDRNGTAQYLTPSSDSSEAYASTIGDFLKNRNIQPDPPLPIAVAPNFTEFLDHQNQAILTKVLTPPLQVYRADLEQAIDKLLHIELRKWVLLEGNSLNALKNIIKIFRYLNPLNKDGKLLLTDLDNSLSSKQSIKGADFGDLVDSLENGRRVFKARRYVGCIGSRPLLRSFTCSMWTLFHHLTVEAAKPPNYFEAGSILKTFHGFAKYFFGCTDCSEHFQQMAIRRNLTSVKTHDEEILWLWAAHNEVNARIAGDSTEDPKFPKIQFPSAENCPTCRSNDSEWRTDEVLKYLKQLYDINNVSFYGLPTPQGYD

SEQ ID NO: 26323 - DNA, 3306 bp, DROSOPHILA
caaatgatgaagatctgccagagcatcaccagctgatagatacaggtcttgagcataaagatggcatcgccgtttgcaatggacatggtggacatgtcgtacaggttggacaccagcaccagaacagaacacatgagctgcacagatcctggcccctttatgaacagctccaccaggtccttgaaacgaacaatcctgttgtagtaggcggcacactcacgcagttccattgcgattttctcattatcctggggttcgatcacaggacccaacttttctaatcgcaggaccagcatttgtagctgaaccttcaagaaacagagcaacgagtaggccaccgagtcgtaggttatattcagcacacaagtgggcagcaggcaaatcgagtggaaaaggtactgcgaccaatagcagatccatccctcgatgctgcatacctccaacatggccagtggtagctcgccaaagttgtcgaaacagggaactataaggatcagggaagccgcgcccagggacatgatgccgtaggagttcctcatgcggacaaccgccactctatccaattccagcatctgcatttcctgttcacttttaacgccgaactctggggacaacatcgcatcaaccaagccagcgagtttgcggctcttcaacttcaaatgcaataatttggccatgcaggatatttccgtggcgaacatgaagaatacctttaggatctccctaacttgggaaatgttgttcaacatttcgaaggagaaaagcagcagcatgatgaacaggatgaccaggatgaagccaaacctcatggactgaaaacgacgctggtggtctgcggcccaagtggggagctgccaaacaccaaggatttggaagtaccacacctggtacttataaaagtcctccgtaaccatctgatgctgagacatgctgacaattttcacttttccatcatgaaccgcacgaggaaagccttttataggccacgaacttaaattcgctaatgagcctcattatggaaattggctacagtgcacaaaaaagtcaaaacacggaaagaactcaccgagctgaagagcattaagtcaaaaccaagacttggattaagtgtcctaatcctcaaggtcgagtgaaggcgttgcataaagaggagcgcaatccttcggctcctgtagtcccagtccacccaggaggtcttgtacagctcgtgcggaaggtccaggctgcgctgggttacctcactgacgatgaaattcattactggcctggggaggcatttcggatatggaatacccacccggcatagtagcacaatataaaaatctgaatcaacatgcacgcctgataggtcacatacttaaagagctccagcctctcgtcagataactacaattatgtatatagggaaaacaaattaagaccattgtttttctagaaagcatttatgatagtcttcttgttgcgaattcacagctcaccacagcaatggcatagaaattggcagtcagcaccaaaaccgagcagaagatctgcaccgaaatcggcttgcaaagtagacgctccacggttttcgacagttcaacgatggtcatgtgatagcggatattttccttaagttgctgttccacagtgccaccagaagtagtgattaaccgaccgatcttgtccagtcgcacggccagaatgtccagctggcacttgaggaagatgaacagtgaggagcagagtgagtcgaatcctatgttggtgatgcaggatacggacaaggccagacactgatagcagtagaggagccaataagcaggtgagccggtattctcgccaagcggattgtatgttttgagcggaaggtgggaccagtccaaggcgaactggggtatgagaatcatgctcaaggcggcaaacgaaagcgctccatagaagtcccgaagcttcctacttctttcacaggctgctgcaaagatcaactcttcgttggcgcctctaggacggaactcttcgttatccaatctcctaaagagctcctccatctgcacattgttcgcctttatggacagcagcttggtggtgtgccctgcactggtggccaggataaagatggctttcacaacctcggacatgtagctcaaattagccatcacatggagcaccaagaggagatcaaagagcagcacccaaaacacaattacgtggacatagttcacctggtggatgattctccaccggcgttctatctgaggccacaacgagaggatgttcaagaatgccttctggcccttgtaaaagatttctactcctttgctcatttcacgtccagatttttccagaacttaagattaattgattcgttcaagtgtttataaggcttctgaacggcatttaaaatgtcattagacgacctaatcgttggttaatcattaaattattaagacaaaaacataatatgactaataaaatcaagtaatgattttaaaataatacgattttttatttgaccgtctgatttgactctttctaattttcactccttataaagagatgtaaaatatatattcattgaaatttatatgatttttgtgcagtgtatgtcatttgttgatgcactttcgcaattttcagcttacatatgtgcgtatgttgagcaaaaatactgaattatttagccgacgattattacgtgggtttattttcgagcagtacctagataaaatatgcataaatgcttctccttctttaatatgggaaccgcttgggatcgcaacagaaggtgtagccatcgttcgggttattcgggaggtgaatgggacaattaactgggtaacaaatagccagacacgggggcttctccatttggaaggtactattgtaagtgaggaatacgtacagcccattgccggtggcatcccgtaccgctttgtaggtccactcgggaaccgggatcttggagccggcgaggaaagccgactgaaggaagcccctggtgtctggcaatgtcaagatgccaattccgccggacttgacccggaaataggacgacttcgggatctgactgcgcacccatctctcaattttctcccaattgccatcgttaattgacttgaattgcggcaccacattcagatagcggaaagtactgcccatctggtccgtgaacaggaagtccgcggaagccaccatatgtcctcgattaatcaccaagtagttggcattttgcaagtaggactggtcatcaccgtaaatgcatttgaacgcaaaatagatgttggacttcatgtaggcagcagcctcctgcggactgaacatctc

SEQ ID NO: 26324 - DNA, 1218 bp, DROSOPHILA
atgagcaaaggagtagaaatcttttacaagggccagaaggcattcttgaacatcctctcgttgtggcctcagatagaacgccggtggagaatcatccaccaggtgaactatgtccacgtaattgtgttttgggtgctgctctttgatctcctcttggtgctccatgtgatggctaatttgagctacatgtccgaggttgtgaaagccatctttatcctggccaccagtgcagggcacaccaccaagctgctgtccataaaggcgaacaatgtgcagatggaggagctctttaggagattggataacgaagagttccgtcctagaggcgccaacgaagagttgatctttgcagcagcctgtgaaagaagtaggaagcttcgggacttctatggagcgctttcgtttgccgccttgagcatgattctcataccccagttcgccttggactggtcccaccttccgctcaaaacatacaatccgcttggcgagaataccggctcacctgcttattggctcctctactgctatcagtgtctggccttgtccgtatcctgcatcaccaacataggattcgactcactctgctcctcactgttcatcttcctcaagtgccagctggacattctggccgtgcgactggacaagatcggtcggttaatcactacttctggtggcactgtggaacagcaacttaaggaaaatatccgctatcacatgaccatcgttgaactgtcgaaaaccgtggagcgtctactttgcaagccgatttcggtgcagatcttctgctcggttttggtgctgactgccaatttctatgccattgctgtggtgagctgtgaattcgcaacaagaagactatcattatgtgacctatcaggcgtgcatgttgattcagatttttatattgtgctactatgccgggtgggtattccatatccgaaatgcctccccaggccagtaatgaatttcatcgtcagtgaggtaacccagcgcagcctggaccttccgcacgagctgtacaagacctcctgggtggactgggactacaggagccgaaggattgcgctcctctttatgcaacgccttcactcgaccttgaggattaggacacttaatccaagtcttggttttgacttaatgctcttcagctcggtgagttctttccgtgttttgacttttttgtgcactgtagccaatttccataatgaggctcattag

SEQ ID NO: 26325 - protein, 405 aa, DROSOPHILA
MSKGVEIFYKGQKAFLNILSLWPQIERRWRIIHQVNYVHVIVFWVLLFDLLLVLHVMANLSYMSEVVKAIFILATSAGHTTKLLSIKANNVQMEELFRRLDNEEFRPRGANEELIFAAACERSRKLRDFYGALSFAALSMILIPQFALDWSHLPLKTYNPLGENTGSPAYWLLYCYQCLALSVSCITNIGFDSLCSSLFIFLKCQLDILAVRLDKIGRLITTSGGTVEQQLKENIRYHMTIVELSKTVERLLCKPISVQIFCSVLVLTANFYAIAVVSCEFATRRLSLCDLSGVHVDSDFYIVLLCRVGIPYPKCLPRPVMNFIVSEVTQRSLDLPHELYKTSWVDWDYRSRRIALLFMQRLHSTLRIRTLNPSLGFDLMLFSSVSSFRVLTFLCTVANFHNEAH

SEQ ID NO: 26326 - DNA, 3308 bp, DROSOPHILA
catccggattggtgtctgtcacagcctcgctgtttaggatgactatttggccaggggcttctgtttcctctgtgacctggacagcttcactggactcctctttcactgcggtctcatcctcaacaacagcttcctcttcgtccagaatattttgtataagcacactaaaatgttcctgatctgctactttagaaaccagttttggctcacttttggaaacagcatcttcggtggaaggcgtctctggtggctctggagatctagatgtatcaggcgttacattggaagcagcagccgctctattccttatccgggcactcggttcccgggtgggaataatgggcactggtcgcagaaccttagtcaggggccttgaaggcactgttttcttggctggtttcgcagctggtggagttgcctggacctcggtaataataatggggtcctcctctgccttggaatctttgccctgggccgcatccttcgcagcttcccgttctctttccagttcatcgatgtcaaagaggcgaatgagattggtgacacacacttcgcacaggagttgctgcttctgcggatcgggcgacacttcgagctggtaatgcctggacagcagggactgcagtcccagttcgattccaaactcatcgaagatctcctggtactggtatttcgtactgaatacgctgcaatgcaggcagctattgtttttcgcgttttccgacatcttaatctttgtccgtcagcaaattgtaggcgttatggcatttctggtttgttttttagtgttacctttccgtaccagcagctgtctggtattttccgcagtgtgactgtcttgcgcagatttctaaaaccgttaccacgatttgaaaatagtgtgaaaataaataggcataaaaagtaaataaaagatttaggaaaccccaaggaaagaagacacaattagtttttcgaactatataataagcaactgctaatttctacacaataatttcatttaatgtacgtgcataacgttttgagtgcttttaaaaatcggcttgaaaatctttaggtgctgcggtgtttcgaaatttaactgttgacgcgcttcagcagtgcgaagtagctgtaggagcagttgacgatctgaaaggagaagagcataaccagtaataaatgatatataaaggaatttctgctgccctacagaaccaaaggcctccaagctgaaagcaaaggtggggttaaaggtgctcaggagcatcggggaattaaagcgctgcatcatgagaaggacaatccggcggtttgccctgttccatcccgtccattgggagctgtagatgctgtgacacaacctagagctctggacagttacctcgttggaggcgtagcaaatgatgaagatctgccagagcatcaccagctgatagatacaggtcttgagcataaagatggcatcgccgtttgcaatggacatggtggacatgtcgtacaggttggacaccagcaccagaacagaacacatgagctgcacagatcctggcccctttatgaacagctccaccaggtccttgaaacgaacaatcctgttgtagtaggcggcacactcacgcagttccattgcgattttctcattatcctggggttcgatcacaggacccaacttttctaatcgcaggaccagcatttgtagctgaaccttcaagaaacagagcaacgagtaggccaccgagtcgtaggttatattcagcacacaagtgggcagcaggcaaatcgagtggaaaaggtactgcgaccaatagcagatccatccctcgatgctgcatacctccaacatggccagtggtagctcgccaaagttgtcgaaacagggaactataaggatcagggaagccgcgcccagggacatgatgccgtaggagttcctcatgcggacaaccgccactctatccaattccagcatctgcatttcctgttcacttttaacgccgaactctggggacaacatcgcatcaaccaagccagcgagtttgcggctcttcaacttcaaatgcaataatttggccatgcaggatatttccgtggcgaacatgaagaatacctttaggatctccctaacttgggaaatgttgttcaacatttcgaaggagaaaagcagcagcatgatgaacaggatgaccaggatgaagccaaacctcatggactgaaaacgacgctggtggtctgcggcccaagtggggagctgccaaacaccaaggatttggaagtaccacacctggtacttataaaagtcctccgtaaccatctgatgctgagacatgctgacaattttcacttttccatcatgaaccgcacgaggaaagccttttataggccacgaacttaaattcgctaatgagcctcattatggaaattggctacagtgcacaaaaaagtcaaaacacggaaagaactcaccgagctgaagagcattaagtcaaaaccaagacttggattaagtgtcctaatcctcaaggtcgagtgaaggcgttgcataaagaggagcgcaatccttcggctcctgtagtcccagtccacccaggaggtcttgtacagctcgtgcggaaggtccaggctgcgctgggttacctcactgacgatgaaattcattactggcctggggaggcatttcggatatggaatacccacccggcatagtagcacaatataaaaatctgaatcaacatgcacgcctgataggtcacatacttaaagagctccagcctctcgtcagataactacaattatgtatatagggaaaacaaattaagaccattgtttttctagaaagcatttatgatagtcttcttgttgcgaattcacagctcaccacagcaatggcatagaaattggcagtcagcaccaaaaccgagcagaagatctgcaccgaaatcggcttgcaaagtagacgctccacggttttcgacagttcaacgatggtcatgtgatagcggatattttccttaagttgctgttccacagtgccaccagaagtagtgattaaccgaccgatcttgtccagtcgcacggccagaatgtccagctggcacttgaggaagatgaacagtgaggagcagagtgagtcgaatcctatgttggtgatgcaggatacggacaaggccagacactgatagcagtagaggagccaataagcaggtgagccggtattctcgccaagcggattgtatgttttgagcggaaggtgggaccagtccaaggcgaactggggtatgagaatcatgctcaaggcggcaaacgaaagcgctccatagaagtcccga

SEQ ID NO: 26327 - DNA, 1308 bp, DROSOPHILA
atgtctcagcatcagatggttacggaggacttttataagtaccaggtgtggtacttccaaatccttggtgtttggcagctccccacttgggccgcagaccaccagcgtcgttttcagtccatgaggtttggcttcatcctggtcatcctgttcatcatgctgctgcttttctccttcgaaatgttgaacaacatttcccaagttagggagatcctaaaggtattcttcatgttcgccacggaaatatcctgcatggccaaattattgcatttgaagttgaagagccgcaaactcgctggcttggttgatgcgatgttgtccccagagttcggcgttaaaagtgaacaggaaatgcagatgctggaattggatagagtggcggttgtccgcatgaggaactcctacggcatcatgtccctgggcgcggcttccctgatccttatagttccctgtttcgacaactttggcgagctaccactggccatgttggaggtatgcagcatcgagggatggatctgctattggtcgcagtaccttttccactcgatttgcctgctgcccacttgtgtgctgaatataacctacgactcggtggcctactcgttgctctgtttcttgaaggttcagctacaaatgctggtcctgcgattagaaaagttgggtcctgtgatcgaaccccaggataatgagaaaatcgcaatggaactgcgtgagtgtgccgcctactacaacaggattgttcgtttcaaggacctggtggagctgttcataaaggggccaggatctgtgcagctcatgtgttctgttctggtgctggtgtccaacctgtacgacatgtccaccatgtccattgcaaacggcgatgccatctttatgctcaagacctgtatctatcagctggtgatgctctggcagatcttcatcatttgctacgcctccaacgaggtaactgtccagagctctaggttgtgtcacagcatctacagctcccaatggacgggatggaacagggcaaaccgccggattgtccttctcatgatgcagcgctttaattccccgatgctcctgagcacctttaaccccacctttgctttcagcttggaggcctttggttctgtagggcagcagaaattcctttatatatcatttattactggttatgctcttctcctttcagatcgtcaactgctcctacagctacttcgcactgctgaagcgcgtcaacagttaaatttcgaaacaccgcagcacctaaagattttcaagccgatttttaaaagcactcaaaacgttatgcacgtacattaa

SEQ ID NO: 26328 - protein, 435 aa, DROSOPHILA
MSQHQMVTEDFYKYQVWYFQILGVWQLPTWAADHQRRFQSMRFGFILVILFIMLLLFSFEMLNNISQVREILKVFFMFATEISCMAKLLHLKLKSRKLAGLVDAMLSPEFGVKSEQEMQMLELDRVAVVRMRNSYGIMSLGAASLILIVPCFDNFGELPLAMLEVCSIEGWICYWSQYLFHSICLLPTCVLNITYDSVAYSLLCFLKVQLQMLVLRLEKLGPVIEPQDNEKIAMELRECAAYYNRIVRFKDLVELFIKGPGSVQLMCSVLVLVSNLYDMSTMSIANGDAIFMLKTCIYQLVMLWQIFIICYASNEVTVQSSRLCHSIYSSQWTGWNRANRRIVLLMMQRFNSPMLLSTFNPTFAFSLEAFGSVGQQKFLYISFITGYALLLSDRQLLLQLLRTAEARQQLNFETPQHLKIFKPIFKSTQNVMHVH

SEQ ID NO: 26329 - DNA, 3738 bp, DROSOPHILA
atatgcgaaaaagatagtactcctgttcaaaattaactatgtgatgcatgccatgatttaaatgatttgtcataccatttaagtagctaataataaatatagtaattcttattaagaagtatttgatcgtattaggagaatataacaacgaaacacgtagaccacatcttgtgatcaaaagagccctatagttgtaatgtttacgttgttgattacattaatgccttgagatcttttgcgtttgttcgataagaaaatgatccaaacgctaaaattgacaaaatacaagaatctgcactgacattttttgacattcacatagattgccaataaataaatttttgccacacccattttaacgccgctaagccgttcattttgaaatattttttaattttttcttattttattccccaatatctatagatatcccagaaaaattacgaaatttcgtgttcgcattcacactagctgagtaacgggtatctgatagtcgaggaactcgaccatagcattctctcttgtttatgggttagtttcatactgtaaatatgtattgcaatagctaattatgttttgtatccattcattataaaatagaattaaaacatgtggttccaaattggtagggataagaacgatttgttggcaatgtgtagccgaattggtaaaaaaaatatgctgttcctccaagcgatctaattttcatttttagaattttaaagtaatacaaaggccatccaattccatactaaataattaaatatatgatatttttatattatgtatcttgattattaaaaaatacttattattacttatttatttaatttcatttaatttccatttatataccttgtatatataccttataccttaccagtactgcaataaatacttaaaatctttttaaaattttctttaaaaatgttgttcttcaaaatattattgtaacggaaaaacgataatttctttgtatattatacttcttgttatctggtcacactaggcaaaggagattcgtttcgcttgcttaatttttttgctgctccttcaatatgtccacgagatcttcattcgccgatgaagagcagaacaaagtgccccgtatcatgaccttccgtcccagctacgaggagtttcaaaatttttccgcctacattgagtacattgagtctcggggagcacacttagccggcttggccaaaatccaagtaagctggcccagcccccaactacatctttgcacataaatataattaaattggtatttttttatatgcagccacctgcggaatgggtgccccgaaagtcgggctacgacatagacaacatcaacatgaccattccagcgccgatttgccaagtagtcactgggtaagtgcttctcatttacgactcaatggacaaaaataagggaaaacttttgaatgttaatgcagggcgcacggggtgtaccagcaaatcaacatccagcagcgccggcagatgaccttgcgccaattcatggagaaggccaactcggagctgcaccagacaccgaggcacttcgactacgacgatctggagcgcaagtactggaagaacatcacctacatatcgccactgtatgcagccgatgtcaagggatcgctgagtgatgaagaccttgacgtttggaacattggacgcttggacaccatattaaacttggtcaacactgactacaacataatcatcgatggggtaaacacggcttacctctactttggcatgtggaagagctcttttgcctggcataccgaggacatggatctgtattctattaactatctgcattttggagcacccaaaacctggtacgccattccgccggcgtatggcagacgtctggagaagctggcgaacgaaaccttctctgagaactaccaggaatgcaatgcctatcttcgccataagatgaccatgatcagtccgaaggtgctgcgccagcacaacataccttacaacaagatcacgcaggaagcgggcgaaatcatgattacatttcccttcggctaccatgccgggttcaatcatggcttcaacggcgccgagtcgaccaactttgcgtcgaagcgttggatcgagtacggcaagcgggctagtatttgccgatgccgcagcgacatggttaagatctcgatggagaccttcgtacgccgtttccagccagagcgatacgataattggctgaaaggtcaggacatgggctgtcatcccgaggagccgggtaaaatatgcgctgcagcaccacccactttgaatgagtacgagaaacaggaaaagtattacattagctattgaagttgacttatattactaagacaacctaatatttcagcttacgtgcagccaaatccgaagaagaatctccgcagaagcgaggctgctcgctggccggcaatggatgtgaacgaaacgcggagtccgccgaggatgtcgacgataaggccagtgtgagcagctatagcagctgccgccagctgcagccagttgtcaaactacgcaaactcccaaccattgcgtctgtacctgaaccatcttccgcccccaagagatacgacttcaatactgaggctgtggtgcgcgtaaagcgcctatggaatgaactgccctgtccggatcgaggggccaacctgctcaccaacggtgtagtaaagaataccaaacgaatgcgcttccagacaaaagtactcacacttgacgacgaggattgaggattccagatgtggcactgcttgctggcagtttttgatctccttgttagattttcgcgccgcagcaatcaaagatctagtagtgatattctttggtaaatttttatacattttaagaggacatgacgacataactaagaagatatgtgtgtataatttagaagacaagcaaattcgtgcaaacaaatatgtaaatctttaagctgtagctgtagggcagactgaatttgtccgttcacattttaatttaacaagtgtctgttcccaccgaaagaagtattgcaacacaatttaaatctgaaaatgccaaaatcattttttaaagaacaccctaaaggccaatgtctataatcacacagatatatcgtttaataatttgatatgttatgacatgtgtaaaattctttgcaaccaaaagagaaacgcccactaaattggcaaccatttttaaggaactatcagaaaaaatcatttaaaaaaaaaacaccctaaaggccaatgtctataatcacacagaaatatggtttaataatttgatatgttatcacatgtgtaaaattctttgcaaccaaaagaggaacgcctactaaattggcaaacattaattaagaactacaaatcgcggactataaaagcattccgagctcctcctatcgccagttatattatagccttaaacattcgaaactttagatgttcggacactttaagctcgtctatccggctcctatatcggagcccatacagtctagggattcgaatgcatacatgatggagacgctgcgaaattcgggcttgaatttgaagaacgatttcggtataggccgcaagatttggagggtgttttcgttcacctacaatatggtgatacttcccgtaagtttcccaatcaactatgtgatacatctggcggagttcccgccggagctgctgctgcaatccctgcaactgtgcctcaacacttggtgcttcgctctgaagttcttcactctgatcgtct

SEQ ID NO: 26330 - DNA, 1546 bp, DROSOPHILA
tcacactaggcaaaggagattcgtttcgcttgcttaatttttttgctgctccttcaatatgtccacgagatcttcattcgccgatgaagagcagaacaaagtgccccgtatcatgaccttccgtcccagctacgaggagtttcaaaatttttccgcctacattgagtacattgagtctcggggagcacacttagccggcttggccaaaatccaaccacctgcggaatgggtgccccgaaagtcgggctacgacatagacaacatcaacatgaccattccagcgccgatttgccaagtagtcactggggcgcacggggtgtaccagcaaatcaacatccagcagcgccggcagatgaccttgcgccaattcatggagaaggccaactcggagctgcaccagacaccgaggcacttcgactacgacgatctggagcgcaagtactggaagaacatcacctacatatcgccactgtatgcagccgatgtcaagggatcgctgagtgatgaagaccttgacgtttggaacattggacgcttggacaccatattaaacttggtcaacactgactacaacataatcatcgatggggtaaacacggcttacctctactttggcatgtggaagagctcttttgcctggcataccgaggacatggatctgtattctattaactatctgcattttggagcacccaaaacctggtacgccattccgccggcgtatggcagacgtctggagaagctggcgaacgaaaccttctctgagaactaccaggaatgcaatgcctatcttcgccataagatgaccatgatcagtccgaaggtgctgcgccagcacaacataccttacaacaagatcacgcaggaagcgggcgaaatcatgattacatttcccttcggctaccatgccgggttcaatcatggcttcaacggcgccgagtcgaccaactttgcgtcgaagcgttggatcgagtacggcaagcgggctagtatttgccgatgccgcagcgacatggttaagatctcgatggagaccttcgtacgccgtttccagccagagcgatacgataattggctgaaaggtcaggacatgggctgtcatcccgaggagccgggtaaaatatgcgctgcagcaccacccactttgaatgagtacgagaaacaggaaaacttacgtgcagccaaatccgaagaagaatctccgcagaagcgaggctgctcgctggccggcaatggatgtgaacgaaacgcggagtccgccgaggatgtcgacgataaggccagtgtgagcagctatagcagctgccgccagctgcagccagttgtcaaactacgcaaactcccaaccattgcgtctgtacctgaaccatcttccgcccccaagagatacgacttcaatactgaggctgtggtgcgcgtaaagcgcctatggaatgaactgccctgtccggatcgaggggccaacctgctcaccaacggtgtagtaaagaataccaaacgaatgcgcttccagacaaaagtactcacacttgacgacgaggattga

SEQ ID NO: 26331 - protein, 495 aa, DROSOPHILA [sequence omitted]

SEQ ID NO: 26332 - DNA, 3570 bp, DROSOPHILA
tgaacgaaacgcggagtccgccgaggatgtcgacgataaggccagtgtgagcagctatagcagctgccgccagctgcagccagttgtcaaactacgcaaactcccaaccattgcgtctgtacctgaaccatcttccgcccccaagagatacgacttcaatactgaggctgtggtgcgcgtaaagcgcctatggaatgaactgccctgtccggatcgaggggccaacctgctcaccaacggtgtagtaaagaataccaaacgaatgcgcttccagacaaaagtactcacacttgacgacgaggattgaggattccagatgtggcactgcttgctggcagtttttgatctccttgttagattttcgcgccgcagcaatcaaagatctagtagtgatattctttggtaaatttttatacattttaagaggacatgacgacataactaagaagatatgtgtgtataatttagaagacaagcaaattcgtgcaaacaaatatgtaaatctttaagctgtagctgtagggcagactgaatttgtccgttcacattttaatttaacaagtgtctgttcccaccgaaagaagtattgcaacacaatttaaatctgaaaatgccaaaatcattttttaaagaacaccctaaaggccaatgtctataatcacacagatatatcgtttaataatttgatatgttatgacatgtgtaaaattctttgcaaccaaaagagaaacgcccactaaattggcaaccatttttaaggaactatcagaaaaaatcatttaaaaaaaaaacaccctaaaggccaatgtctataatcacacagaaatatggtttaataatttgatatgttatcacatgtgtaaaattctttgcaaccaaaagaggaacgcctactaaattggcaaacattaattaagaactacaaatcgcggactataaaagcattccgagctcctcctatcgccagttatattatagccttaaacattcgaaactttagatgttcggacactttaagctcgtctatccggctcctatatcggagcccatacagtctagggattcgaatgcatacatgatggagacgctgcgaaattcgggcttgaatttgaagaacgatttcggtataggccgcaagatttggagggtgttttcgttcacctacaatatggtgatacttcccgtaagtttcccaatcaactatgtgatacatctggcggagttcccgccggagctgctgctgcaatccctgcaactgtgcctcaacacttggtgcttcgctctgaagttcttcactctgatcgtctatacgcaccgcttggagctggccaacaagcactttgacgaattggataagtactgcgtgaagccggcggagaagcgcaaggttcgcgacatggtggccactattacaagactgtacctgaccttcgtcgtggtctacgtcctctacgccacctccacgctactggacggactactgcaccaccgtgttccctacaatacgtactatccgttcataaactggcgagtcgatcggacccagatgtacatccagagttttctggagtacttcaccgtgggttatgccatatatgtggccaccgccaccgattcctaccctgtgatttacgtggcagccctgcgaactcatattctcttgctcaaggaccgtatcatttacttgggcgatcccagcaacgagggtagcagcgacccgagctacatgtttaaatcgttggtggattgtatcaaggcacacagaaccatgctaaagtaagtcagtttcattatcctaccggaaatatcaacaaccgtgaattatgttttcactcaacggatctgaatttattcggaaaactgaataaaagtacaacttttataagaactcgctattgatatttctgaatatataagagtatatttttacattcaggataaaataaatggtatatcaaacgattcgacataaaactattttatttcaaataaattagcttacattttttaaaatatatgcattaatttaaattttcaatgttaaaaacccatcccactgtttcccatgcagtttttgtgatgccattcaaccaatcatctctggcacgatatttgcccaattcatcatatgcggatcgatcctgggcataattatgatcaacatggtattgttcgctgatcaatcgacccgattcggcatagtcatctacgttatggccgtccttctgcagacttttccgctttgcttctactgcaacgccatcgtggacgactgcaaagaactggcccacgcacttttccattccgcctggtgggtgcaggacaagcgataccagcggactgtcatccagttcctgcagaaactgcagcagcccatgaccttcaccgccatgaacatatttaacattaatttggccactaacatcaatgtaagtccactgctctcggttagaacggggaaggaagcaaagtccgaacttcaatccttgcaggtagccaagttcgccttcaccgtgtacgccatcgcgagcggtatgaacctggaccaaaagttaagcattaaggaatagaaaggaatactcaatacaattgaccgcaccagaggtaaacgtacatagttttatgaacttaacacttttttgcttcgtagaattataataattgtatatgcatacagcgaattatgaataaacataatctagttaaaacaaatattgatcgaacaatgggaagtaaagaaaatcgctacatatgtataccgtacagcccctgcagaagtctatttgtaggctgggaacctggaaccttgtcctcggcaattggaatatgttcctacagaggccggattcatcggctgtgatctggtcaataggttcacttgatccctgcgactggccttttctttgaatgaggtgctgggtgtcggaagatggagttagtgacgcgttggcgagaattgcacattttatgcgaagcatggagtatttttagctcgcttctagttcgaatgtttcggcggcagtttatttcgggctaggaggaagggtagcggagggtcgacacgaatctaagtttattgatgatatttttaatggctggcatagatgaaacagcgaaagttgttcatttaacaaaaacttaggcgagataactatatgtgtctttgtgtccctccattcgctctagatactccttctcgatcaggatgtctatgcacttcttgatcacgggcaccttaggcttaaagcgcgttgacagctgattaagcacctccgatatgagattggtgtggttgagtcgtttgcgcatcttcatgatgcggacgatcgccgcctggatcagtaattttcggtcctcctctatgtgcttatgtacagtctcctgctccactttaagttcagtcttcaaaggctggttgatgttaattcggcgcttcttgtttttgtaatcgaggaacagctccaccgtcgactctggcgtcagcgagttctcattgtcgctggaggtcagcaccttcgccttgagcagtatttgcaatacctgaagaaattcttacataagtctctatta

SEQ ID NO: 26333 - DNA, 1275 bp, DROSOPHILA
atgttcggacactttaagctcgtctatccggctcctatatcggagcccatacagtctagggattcgaatgcatacatgatggagacgctgcgaaattcgggcttgaatttgaagaacgatttcggtataggccgcaagatttggagggtgttttcgttcacctacaatatggtgatacttcccgtaagtttcccaatcaactatgtgatacatctggcggagttcccgccggagctgctgctgcaatccctgcaactgtgcctcaacacttggtgcttcgctctgaagttcttcactctgatcgtctatacgcaccgcttggagctggccaacaagcactttgacgaattggataagtactgcgtgaagccggcggagaagcgcaaggttcgcgacatggtggccactattacaagactgtacctgaccttcgtcgtggtctacgtcctctacgccacctccacgctactggacggactactgcaccaccgtgttccctacaatacgtactatccgttcataaactggcgagtcgatcggacccagatgtacatccagagttttctggagtacttcaccgtgggttatgccatatatgtggccaccgccaccgattcctaccctgtgatttacgtggcagccctgcgaactcatattctcttgctcaaggaccgtatcatttacttgggcgatcccagcaacgagggtagcagcgacccgagctacatgtttaaatcgttggtggattgtatcaaggcacacagaaccatgctaaatttttgtgatgccattcaaccaatcatctctggcacgatatttgcccaattcatcatatgcggatcgatcctgggcataattatgatcaacatggtattgttcgctgatcaatcgacccgattcggcatagtcatctacgttatggccgtccttctgcagacttttccgctttgcttctactgcaacgccatcgtggacgactgcaaagaactggcccacgcacttttccattccgcctggtgggtgcaggacaagcgataccagcggactgtcatccagttcctgcagaaactgcagcagcccatgaccttcaccgccatgaacatatttaacattaatttggccactaacatcaatgtaagtccactgctctcggttagaacggggaaggaagcaaagtccgaacttcaatccttgcaggtagccaagttcgccttcaccgtgtacgccatcgcgagcggtatgaacctggaccaaaagttaagcattaaggaatag

SEQ ID NO: 26334 - protein, 424 aa, DROSOPHILA
MFGHFKLVYPAPISEPIQSRDSNAYMMETLRNSGLNLKNDFGIGRKIWRVFSFTYNMVILPVSFPINYVIHLAEFPPELLLQSLQLCLNTWCFALKFFTLIVYTHRLELANKHFDELDKYCVKPAEKRKVRDMVATITRLYLTFVVVYVLYATSTLLDGLLHHRVPYNTYYPFINWRVDRTQMYIQSFLEYFTVGYAIYVATATDSYPVIYVAALRTHILLLKDRIIYLGDPSNEGSSDPSYMFKSLVDCIKAHRTMLNFCDAIQPIISGTIFAQFIICGSILGIIMINMVLFADQSTRFGIVIYVMAVLLQTFPLCFYCNAIVDDCKELAHALFHSAWWVQDKRYQRTVIQFLQKLQQPMTFTAMNIFNINLATNINVSPLLSVRTGKEAKSELQSLQVAKFAFTVYAIASGMNLDQKLSIKE

SEQ ID NO: 26335 - DNA, 2336 bp, DROSOPHILA
gtggttaaccgatgcaggcagatcaccattccaaaggtcgttgatgccacgcgggtgatcaaggtgcccaagctgatttgggtgtcgcagatggtgcgagaacccagagtaatctactacccctcgatgatccccgacccctatgtggtgtgctatcccaagcgcgtctgcgaaccacgtgaggtgtgtcagtcgatcctctgccagccgaagccccaaaccatcgacattccgccgccgagggagtactgctgctatccaaatggacccatcaactacaagcccagtgcagcgtgcccaccctgccccattggaccatgtgctcctggaggaccctgctgtccgctgccctgcttctccacaaaccaatacccagtggctgagggcagatgcggaccatgtggaccctgtggacccggatgcggaccttgcggaccctgcggaccttggggaccaggatgcggtccttgcggaccctgtggaccctgcggacccttcggaccaggctgtggtccatgcggaccgtgtggaccctgcggacctggcccttgtggcttcggtccttgcggaccatgctgatctgtaaaacagctggaaagatctacttgacgtctgccaaaaacattttgtgacaactccgcgttatggaagtccacatccgcgctcaattatatgacagtccaaattaactttgcaagttttgtaaattaaagaagtgcattgatacaatatttaaaccacattttttcttcgggcatttgtttcggaaatttcgttgtttcattgcatttaatatgctatgtatttttcagataacgaaagttgagattcgggatttttgtttcgaaaggcctgttggggaatttttattttattttattattattttaaaaactcatacttgttagttcaccagtgtagccctgagtcacctgtcagcttgtggacttactggtaatagttgtagtagtcatatccaaattattcttgatcttaaatcatgtcgaaatatgtggctagagtgggcccagcggttttctccaagttgggaaagtgggcctacaacatgtctggattcaaccaatacggcctgtatcgcgatgactgtctgtacgagaatgaggatgtggcagaagcagtgcgtcgtctgccccgcaaactgtacgatgaacgcaactatcgcattcttcgagcactgcacctttccatgaccaagacgatcctgcccaaggagcagtggaccaagtacgaggaggacatcaagtacttggagccctatcttaacgaagtgcaaaaggagcgcgaagagcgtgaggaatggagcaaaactcattgatccggatacttcggttacaaagaatgtcataaccaaaacataaaggttatttaaataaatcgttaatataaataggcatagaaaaaaaaacaactttaattatctggttttaatatcataacatctaatatcactttatcgccagctttttttaagcgcgtctctcaatatcgtcagccgtttaaaaatcccctgcgatccacagcaatgtcaacgcaaataattttcgcattaagtgcattcgcataaatacaatatatgaaattcattaacagcgaatacaatacaaattagtgctgctgggtggggcgtgagccgcccattgaacatgtgtatgccgccccacgatttaaaatgacagtggaggagtgggcgtggcagcgtcagcggcaaacaaaatgcgtgtgcatggcccgcacatcctgtcaatcctcgtatacttatgcgcatcctgtttaaaatgcagcaaacagcaacaatgcagttgcagttgcgattgccgttgcagatgcagatactttcgcagtcgtatatatctgcatctctgccgctgtctgattgttctggcgctgccattcgaccggaagaaattattgttattcgaattgatctgccatagtttcgatttcgatgttggccactgcgataggcaatgctcctgccatggagcgatatcgctgcgtctgcggccagtaactgccagagttctgataacgtcaacgcaggaggatgcagcaaacgtaatggttaccctgtaatgttaagggctgaaggtatgtaacgctgttcaaaatttaggtaaaagtatctcctcaatccttaaattacaaataataattcaagtaactgtcaatcaaatctctaccctacccacatcaatttcaaaatgatggcttttaactcgcaattatgtactgagtatttcttagtctaattcttcttgagcagcccttttttttcaagccgccatcgttgccgttatttatttgcgctcacatat

SEQ ID NO: 26336 - DNA, 336 bp, DROSOPHILA
atgtcgaaatatgtggctagagtgggcccagcggttttctccaagttgggaaagtgggcctacaacatgtctggattcaaccaatacggcctgtatcgcgatgactgtctgtacgagaatgaggatgtggcagaagcagtgcgtcgtctgccccgcaaactgtacgatgaacgcaactatcgcattcttcgagcactgcacctttccatgaccaagacgatcctgcccaaggagcagtggaccaagtacgaggaggacatcaagtacttggagccctatcttaacgaagtgcaaaaggagcgcgaagagcgtgaggaatggagcaaaactcattga

SEQ ID NO: 26337 - protein, 111 aa, DROSOPHILA
MSKYVARVGPAVFSKLGKWAYNMSGFNQYGLYRDDCLYENEDVAEAVRRLPRKLYDERNYRILRALHLSMTKTILPKEQWTKYEEDIKYLEPYLNEVQKEREEREEWSKTH

SEQ ID NO: 26338 - DNA, 3104 bp, DROSOPHILA
ttaattagtagcaactatttctatgtttacaccaaccagccacatacagtaggaaaggaggcagagaggagctcctcgagcactaaatagatacatccatataagaaatatatgtatacaattgtacgttaataagtacctacgcgtagctaataattcgtatcgggatatgtgtttgtacaacataacttatacattattgaagagcgattttaaaacggactacagaaagtgagtcttaggtgcaaaagatcatatatatatatatcatatatatgtttactcaaaaagtgtgttttaaggaatacatatttttacttagagaaatattgcaaataaactaataaggacatgtatgaaatgaaaacaatgagactcctaaaatgaaaaacaaaataaaccaaaactgcattaaacaagtcaatttgttttttcttaaaagacattatttttaacgaattttttagttatttgaaattttggcacagtggcgcccctacaagatggtactcgaattagggaactacataaatggtgtgaccatgatgtttgcaagtatcttatatccaagacacaaacctaacgtactttaaatatagataacatttttattaaaaatttttttataaatttggttcaccatataatatttaaattaacattgttatttaagcaacaagacgagcaagaaataattaatttttaacgagcctatcttttgattagcatttctgatgattaatacaaaaaactttttccatcaatttgggttccacataggtaaaaaaaataatagtgttaattaaattgttaagacttaaaatttgatcgattctatatgttcgtaagcaatcgaataacttaacaaagtaactctgccagcgatatccacgcaattcaactcgctgatagcttatctttactgttttcagcaacaaaagatttttcagtagctgagtaatttttaccactacgaattgaagtaatacaaatcgaacaaatggagaaacgtgctacatctaccatgcaggttctctatgcagaactggctgccggtgcgtatgagcaatgtcgttgcgtatacgccatgtattgaaactcctttgcagcaaagtccagaagtgcggagctggaggaggaaaacattttgctgcgccatcgactaaatcgcgcatctgccagccacagcaccaatgcggccataaatgtggaggccaagatcatggtcttccaattggaggaggaacgagatcgtctggtggaaacactgcagaagcacaagaagaagtacaacaaactgcatgacgcttatctggagaaagtgaaacgttgtcgtgctttggaggagatgtttaaacggcagaagacgcttacaggcttggtaatgaagtcctctttagatcaaagaaatgcaggtgtgttaggaaatggaatttttgcttaaaattagatcaatactctaaaaatctactagagcaacgaatggctatggagaaaaggcagtcggcccaaagcgatgtcaacgaattgaacgagctgaaggccaaagtagaaaaacttcaaagagcccttgatgagtcatacgacattattgacgaaatggattttgaacttgagagcgtaagacgctttagaacgtattagcaagcttaagtaaaaatgattcgtttaaaggtggaattactggaaatgcaaaaccaatccttgcgggacgaattagccgcttttaaggcaaaatcagaagaaggagcgaccagtctgccggcctcgctacccaacgatgacgacccaccgcccaaatatgaggaagactatcccggacagcatcataaagctatgcaggcccggcgctgctcctctagcagtgaatctgaccccaaggatgatgatgccgacgcagaaactatggaaagagctgctttaacccatagcgtaagctttaatcctaattctcattaattatatatgtctgattgttccttgtattcagctcatacaaactgtggaaacagagagcaatgccctaagacgggaattgttgagatcccgctgtcaaagaacaattcgcgccaagttggagaaagaaagcgagcctgttgattaggataagtggcgggattaatcttatcacatagctcccagccaaaaactaaacaaccaaccaatagatcataataacaagtagccatactaaagctgatgaaactgatcactaagtttacgcacagagagcaataactagacggctggactaacccagattccgaaccaactacgcctaaccagtgcacataccagaatttgcttttaaggttcgacaaacacgctcggcggctgcgttaaatcaaaacttttgcgatatagtaacccggtttcttggactgcgcgcagagaaacccctcgtctaatggcgattaattaaattatttgctaatgccatcaaacgagttgcggacagatcacctgccaaaaggatctggcctccgagctgtgaaggttccagcccccgacttctgccctcccatcccatttccaattcgacgtggtgcgctatccattaaaacatgacaattatttttatgacttaatgcagtcggaggccttgttgcccaatgcctaatgttgcaaattattgacaaagtaaattaatctccacatttgttggttggaccagacaaactagcgcgacacctctaagatcaccatcaagctctcccacttgcggcatattcatttggatgcttatcgaatgtgcgtcgcaaaagaaaaatcaaatgcgtcatgggtaaaaaaactacaagattttataaatttaagttttaataaaaatattttttaaatttctttattttggattcggtggatttagaaatttcttaaaaatattaagtgagttttacgtcgttttcattagaaaagaagaattaggagaatggaatggttactatttcgttcgacatgaagcctaacttggttcctaattttttgcagtgcatggctcaggctggtgcgaaccacattttgcatatttcttgtttaattataatttttcggggctcacttaatgagcgcgctccacttggtcggcgatcttgtttgggagg

SEQ ID NO: 26339 - DNA, 879 bp, DROSOPHILA
atggagaaacgtgctacatctaccatgcaggttctctatgcagaactggctgccgcaaagtccagaagtgcggagctggaggaggaaaacattttgctgcgccatcgactaaatcgcgcatctgccagccacagcaccaatgcggccataaatgtggaggccaagatcatggtcttccaattggaggaggaacgagatcgtctggtggaaacactgcagaagcacaagaagaagtacaacaaactgcatgacgcttatctggagaaagtgaaacgttgtcgtgctttggaggagatgtttaaacggcagaagacgcttacaggcttggtaatgaagtcctctttagatcaaagaaatgcagagcaacgaatggctatggagaaaaggcagtcggcccaaagcgatgtcaacgaattgaacgagctgaaggccaaagtagaaaaacttcaaagagcccttgatgagtcatacgacattattgacgaaatggattttgaacttgagagcgtggaattactggaaatgcaaaaccaatccttgcgggacgaattagccgcttttaaggcaaaatcagaagaaggagcgaccagtctgccggcctcgctacccaacgatgacgacccaccgcccaaatatgaggaagactatcccggacagcatcataaagctatgcaggcccggcgctgctcctctagcagtgaatctgaccccaaggatgatgatgccgacgcagaaactatggaaagagctgctttaacccatagcctcatacaaactgtggaaacagagagcaatgccctaagacgggaattgttgagatcccgctgtcaaagaacaattcgcgccaagttggagaaagaaagcgagcctgttgattag

SEQ ID NO: 26340 - protein, 292 aa, DROSOPHILA
MEKRATSTMQVLYAELAAAKSRSAELEEENILLRHRLNRASASHSTNAAINVEAKIMVFQLEEERDRLVETLQKHKKKYNKLHDAYLEKVKRCRALEEMFKRQKTLTGLVMKSSLDQRNAEQRMAMEKRQSAQSDVNELNELKAKVEKLQRALDESYDIIDEMDFELESVELLEMQNQSLRDELAAFKAKSEEGATSLPASLPNDDDPPPKYEEDYPGQHHKAMQARRCSSSSESDPKDDDADAETMERAALTHSLIQTVETESNALRRELLRSRCQRTIRAKLEKESEPVD

SEQ ID NO: 26341 - DNA, 3734 bp, DROSOPHILA
tataatagactgtattttaccaactgaaagcagggtccatgcacgtgggcatcacaagggtctctataagagatcatagctagtactggatgagccaggattctcctacgggtctcatataaaatttgcaattggtttcctctttttggtttcttggttcctaaatggaaagatcagcgcggtttcttctagattttgttcttgtggcattctttttttttttttttttgtggctgttttaggttgtctgtatttgctaagtttaattattgtttttgtatcgttagcagctttccttatttttggttttaggttcgtttttgtattccctttagttagctatgattttggtttttggttggttttttgcttggtttttggttgtttttttttgtcgtttaatatttattttgtgtctatttctatttgttcagcttcagctctgactcacttatttacaaaatagcagttttactttagtttatgtatatttaattatatatgtaaatgtatgtatatatttaatatatatttatttatatataatctttgtattactcattctttaaacttaacggcagttttgatgtttttagcattatcatgtgtgtctcatgtgtctatgtgtatggctgtgttggtagtgtcaacgaaatatcaaaacagcgctcgagttaaatggatgtcctctataggaaaaaataatcaatcattggacgatgcctaattgtcaatataagcataggtttctccattttataaactgcaataattaatctcatattttcaagtaaattattgataattaatgcgaggaatacgtttcgaaattaaatcggtatctaaaatattgaatgaaacatatcaaccgagcactgttttaacgacgataatccgtcgttccatattccttttctattttgccttgcctttagtttgcccttagtttttccgtttccgctacttgttgttgttgttgttgttttggtattttcttttggtttagtttgttttactaatattctgactaatatttaataatagagcataatttaaagatgaaaataaaattagcagatattgtatgtttgtttttgtctggttgttgttgttctttgtttttgttttgctagcttctaaagaaaggaagaaactccaattagattagtctactaagataattagattttggttttgtttgtttttttttttctctcgttttttggttttatatgttttgttttgttgttgttaacgattgttagttgttaattgctaaatttgaacataggtatcaagtagagtttttactttgagtgtgtgtggacgtgtgtgtgtaagtgttttcggtgtgtagattaccagaaggaaaatgaaaggagaaacaaggaaatccctatagaaggccagtccatatttgactctttttggtgtctacaaatactctaattcaagctgagtgaactggcactgtgtctgtgtgtgtgttgtgtctgtgtacatttgctgtttaatttacaactacgttgcttactaattattataattatattttaattgtatttattaataaaattctaaattagactgcttttgatgacgtttctggcatccaacgtagcatttcactgcgcaaatttcgtccattttccatttgtttgactgcgaaatagagtcaaaggagaacgataaagagtgtgaccgaaaaatgcaatgttgcctaattatatacatatatttgcaatacacatataaatgaaggacaagcgtgtgctactttgatatgtttaatacttttaatttagtgctacaattcgaaagaaattgcattatcataataaaagttataaaaacatgacaaaaatattccattgattgacagaattaactggtataaacgactatacttcggtttctaaattaaatgtattattttagcaaaagttgtactaatttatagaaattgtcaaatgtcaaaagttattggcgcccaacatgggaccgagctaatgtgactatagtatttggcgcccaacgttgaggcattgattatacttacgcaagccaatactcacctagtagtcagacgtcggtctcaatactgacggccatcgcgttattatgccttaactgtaaactatttgtgctccttaggccgttctggcccagctgctgctgctgcgtcatctgttggccgtgcggcgactgcgactgctgctgcagctgcagctgaagctggagctgctgcttctcgaatgactgctgtgtcctgagaaacggcaccatgtggcggcccgtgtgatcagtcagacctggcgtggttgcatcaatgccatcatccaaatccattatgtccgacgacgattcggagagtgaggatttcttcaaatgttgacctacatccggggtcgtggatcagatacaacgattagcaaggggatattatatgggttgcacagagtgggcgggaatcagggataggggatcattttttcattttttttttgggggattttcttaaccgctagtagtagtagtatgtacctagtgcaccaggtaaatatgaacaacttgtaacgtggttgaaattttggctctgcatctcctcctgatccgtttcgcggtgatagaagtaattgaaattactgacgataaccggtaccggcagtgcgattgtcagcacaccagcgatcacgcacaaagagccgacaattttgccccagaagccgacgggcctggatgcatttttgttgaatgcattcgtttgtttaatggcaatatttgtggattcgattcatgtttgtcaatggtcattgtcgttgggtgtgttcgagttcgaattggtttgtatatttaaatcgattcgtttcgattcggttcgatccgatccgatccgtgtttaaatatgcaaattcgtttcaaagtcaattgaatttggtgtgttttgttggtttttgatttggtattggtatgaagaagaacgtagaagaagaacgcagtatgtaaatcaggtggtaaaaaaacaaacaagtagaaatgagttataagttttgatatattcgatatactattctagatagtgggttagatttggggtccggagctcgtggctcccggcccaactaaagtgttaaaaacttgttaaaaacgcaaaaaagaaaaacgtgtcacaacagatacatatgggttacttaaataaagcgatacgagttgggtttacaaatggttggctggagacgttcgagtaagtatccgtgggtggggaggcaggtggaaaagcgataactcaacacaggggaaagcaaaagtcaaaactataagctcaactaggtattggtttatatataggtataggggtggtattgttattgttattgttctggttaatggtattcgtataggtatttgtatgcaaacatcgaaagcaattcgttggcggtaaccaaaatcggttacaacaaccaactggggtggtgggtaactatgaactcaaatcaaaaccaaagtcgaaaccgtaaattaatttcaaaaatcaagaagacgaaatcatggtggcatactattcgtacttatacatatagattgatgggtgaattgcgggttgatttggctaacaaaaaaccgaagcgtacttattgccaaatggaataaacaaaatgtgccggcgtttggcgtcgtcgctgttaaacttgacataaaatgaatatacatagatagagatgtgtggaaaaacc

SEQ ID NO: 26342 - DNA, 1087 bp, DROSOPHILA
cccgtcggcttctggggcaaaattgtcggctctttgtgcgtgatcgctggtgtgctgacaatcgcactgccggtaccggttatcgtcagtaatttcaattacttctatcaccgcgaaacggatcaggaggagatgcagagccaaaatttcaaccacgttacaagttgttcatatttacctggtgcactaggtcaacatttgaagaaatcctcactctccgaatcgtcgtcggacataatggatttggatgatggcattgatgcaaccacgccaggtctgactgatcacacgggccgccacatggtgccgtttctcaggacacagcagtcattcgagaagcagcagctccagcttcagctgcagctgcagcagcagtcgcagtcgccgcacggccaacagatgacgcagcagcagcagctgggccatcaaacaaatggaaaatggacgaaatttgcgcagtgaaatgctacgttggatgccagaaacgtcatcaaaagcagtctaatttagaattttattaataaatacaattaaaatataattataataattagtaagcaacgtagttgtaaattaaacagcaaatgtacacagacacaacacacacacagacacagtgccagttcactcagcttgaattagagtatttgtagacaccaaaaagagtcaaatatggactggccttctatagggatttccttgtttctcctttcattttccttctggtaatctacacaccgaaaacacttacacacacacgtccacacacactcaaagtaaaaactctacttgatacctatgttcaaatttagcaattaacaactaacaatcgttaacaacaacaaaacaaaacatataaaaccaaaaaacgagagaaaaaaaaaaacaaacaaaaccaaaatctaattatcttagtagactaatctaattggagtttcttcctttctttagaagctagcaaaacaaaaacaaagaacaacaacaaccagacaaaaacaaacatacaatatctgctaattttattttcatctttaaattatgctctattattaaatattagtcagaatattagtaaaacaaactaaac

SEQ ID NO: 26343 - protein, 109 aa, DROSOPHILA
MQSQNFNHVTSCSYLPGALGQHLKKSSLSESSSDIMDLDDGIDATTPGLTDHTGRHMVPFLRTQQSFEKQQLQLQLQLQQQSQSPHGQQMTQQQQLGHQTNGKWTKFAQ

SEQ ID NO: 26344 - DNA, 2402 bp, DROSOPHILA
gcaaataataaagagtcgaattccgtttaagggttgtcttcggtaagcactgcggatggacgaaaacaagaagtagtgggtcaaattagcatccctctacagttcaaaggaagggaagaaaatctcgacctgcatttgatttcttctcttcttctccatttttggctaattttccgtttttggcctgggaaaggtgtctattctatcccacttaattgatattggagatgctaagccggtaaagcttaaagtgtcattttccagggtccccagctgtggaaaagcttctatatgcggagattgatcgtatgcttaagcttggtgtaattgaagattctgatagcgcctggtcttcactagtagtcttagtgaaaaagcccgggaaagtacggctctgtttggatagcagaaaggtgaatgctgttaccagagaagatgcgtatcctctcccgcagatagatggtcgcctcccaaaaactatgtttatttctagcctcgatctgaaagatgcatattggcagatacccctcgacccagattctagggataagacggcgtttgcaatacccgaaaagccgcattatttatataaagttatgccttacgggctgacaaatgcttcgctaacgatgacacgcttgatgtacaaggtcataccagcggaaccatagaccacctattggtagtttcctatagcttcgaatcacatctgaaagttctgagataagttgcaggccatattaagacggcaggcctgacgctcaacgtagaaaaaagtaaattttcgttcggtgaaatatttagggcacattgtcggggagggcgtaataaaaacagatccggagaaaatatcagcgatgaccgattttccgctacaaaattcgttaaaaagtcttaggaggtttttaggaatgattggctggtatcgcaagtttattaataattttgcgtcagtagcagcgcctttgactgactattaaagccaagacagaagttcgtcatgactcctgaaggaaagctagcatttgagaagctgaaggagatgttttgttcagcgcctgttcttcgtagtccagatttcggaaagccattctttgtgcagtgtgacgctagcaaaactggagtcggaggagttttagttcaaaaaacaactgaaggagatgaatacccaatagcattcgtatctaagaagcacaaagccacggagcagaaatgtctagcagcgatcgtttgcatcaatcggtttacggcttacgtgaaaggccacgaattcacggtcataacggatcacgcttccttaaagtggttaatgacgcatacagacttacactctcgtttgggccgatgggccctaaagttacaaggatttcacttcaatattgagcccgcagcggcaagctgaatgttgtgccagacgctttatctcgggtaaatgaggagattgtagccgcgttagattccagtcaagggttgatttggattcgccagagttcaagtccgacaagtacaaggaattttttgagcggttgaaggcggacaacaacttgttgccagatattaaattagttgacggccttgtatatagtagaatggatcatgtcaccggtgattgtttgcatgatcagtttgtctgggagttgtggatccccgagggcttggtccagagtgttttaaagaatgcccaatgatccccgagggcttggtccagagtgttttaaagaatgcccaatgatcatggcttcacaccgaggaatacacaagaccttggaacgagttcgaagatattattattggccaggtttggtaaaagacgttaaatcctatgttctagcttgcgacacgtgtaaaatgacgaaggcgactaactcagtacagagaccgcctattggagtgccaccggagtcagaagattcttccaaagaatatacatagaatttttgggtccttatccgcgttcgaaaagcggcaacattggtatattttgtttaatggaccattattcgatgtttgtttttctcaaggcagtgaagaagcttacggcggatatagtcataaagtacttgcaagaggagtaacggttgtgtcggataacggttctctacaattacaaggtgcgtcacaacttaacggcggtatattcaccgcagtcaaatgcttccgaaagagtaggttggtcggtattagcgccgatccggtcgtacgtcaggccagatcagaaaaattgggacgaagagctgagctgagtagcatttgctgtgcgttgagatccgcggtgcattcaagtttgggaactactccatattatatggtgttcgggcagcactctgtgggctcaggatctacatataaattgttaagagctttagggcttattcaagatcgatcggtggtttttgctaggg

SEQ ID NO: 26345 - DNA, 402 bp, DROSOPHILA
atgactcctgaaggaaagctagcatttgagaagctgaaggagatgttttgttcagcgcctgttcttcgtagtccagatttcggaaagccattctttgtgcagtgtgacgctagcaaaactggagtcggaggagttttagttcaaaaaacaactgaaggagatgaatacccaatagcattcgtatctaagaagcacaaagccacggagcagaaatgtctagcagcgatcgtttgcatcaatcggtttacggcttacgtgaaaggccacgaattcacggtcataacggatcacgcttccttaaagtggttaatgacgcatacagacttacactctcgtttgggccgatgggccctaaagttacaaggatttcacttcaatattgagcccgcagcggcaagctga

SEQ ID NO: 26346 - protein, 133 aa, DROSOPHILA
MTPEGKLAFEKLKEMFCSAPVLRSPDFGKPFFVQCDASKTGVGGVLVQKTTEGDEYPIAFVSKKHKATEQKCLAAIVCINRFTAYVKGHEFTVITDHASLKWLMTHTDLHSRLGRWALKLQGFHFNIEPAAAS

SEQ ID NO: 26347 - DNA, 9058 bp, DROSOPHILA
cgaaggatgggcatcggtgttattcatctcatcggacgatgttaacgtctcatcctcgccgtcgtaatatcattgctaataccacgccaacgctcaactatactgtataattacttttccagcaaaatctattttctctatccataatctagtagtttccaagtaacataaaatcccaaatcgtaatttctcactcgaactatggcgccaaaaaacctaaaaatgtttttcttgtaacttgtaatctaaaatggtaatgtgccgtaaacaatttctatgttactttaaacataaattaaaaattgttactccaaactatgtcgcgtaaaactgccgacaacaaatccaaaattgtaatgtgacacaaattgtttctgtatatttttctaaacaaaaatcaaataacaataaaatgacagtgtcaataggcgctgaaaattattatacaaaataaaactcccttggccactgtccaatcatcctggatctaaaaatatcgacgattcaccctggaagaaagaagcttggattatttttttcccctttagattgtgtattgaattgcattcctggcaaaccggcgtgttcctgttgatgacgctggactgcgtcgcctgctcctctcccgccacagatgggatgcttgcatcaagtttgacgggccggactggctgacgcctgctacatgctggcatctccacggcggccgatgtcgtctcatcgctggacatctacgccgatgtccaacaaaacaccacaaattaatcttaaattacacatctactaaaaactgtcacctctatgttatactttaaacttaaatttaaaagtgctacttaaaactatggcgcgcaaaactgccgccaagaaatccaaatttgtaacgtgccataaattgtttctgtatatttttctaaacaaaaatcaaagaacaataaaatgacagaaaattattataaagaagaataaaagtttattatttaaagctgttactttattattagtttgctaaacttaataaaagtgcagtacctcgctttatccagtagtcagccttttcattaccagactttaagtccacggctattacaaatgatcctgacctaacgggataataatatgcgggacactggtaaacaccacgacatcgtttttttaggttttctactggcttaaagtgtattactggtaatggacaaattagttccatcggtagtggatcctgaaggcattggtttttcctcaaccatccgccaccctccaaaaacaaacttcgaatgtaaacgcctcctccttcccttattatacgagctgcggcagtatcttcttcaacaaaaacataaaaatcccaagagagttcatcaattggtgttttggtagctcgagctgaagtttgtagtactgctgtaacaaatccagttggaaacgtgtaagctgcaagccaaaataatattggagggcggagtgttttcgcccaactattaaaatgtcctacacgatgtattaagtctctagcccatgccgctaatggtttcaatgaattatatgctggagatatatgcacatataatgtatgacccaatttttttaatataatttttttaccttttaaccattgtaatggcacccttccttcagagacagctagataaatatcctctaagtccgaactcattacaacaagtccctgtattccacgtcttaagtcacgtaattgagtggacatgtcaacgagaagtttattatagcgctcaatttcttgaagtaagacaacttctaagggagttcgattgattccaataatttttgccgtctgttcatagtttatctcatccggtgtattcattaaaatttctttagcgagatcaaatacttttgtctcaccgttttcattactacttgtgctattagtctggacttgcatagaaagcagagcctcaaaaagcattcttgtttctcctattaatgacgctatatcggcatttgaatgttgtccaaaagcatcaggcttatcaaaattgggaaacatttgtatttggtctaaatatgattgcacatcgccgtcatcgggaataaaataatttggaagggttgataatctttatattataaaattaaaaattaattttgattacatttaagcagagaattttcttacctaaactttctagtctgcaatgcttggtcacagaaaaattggtttatataagttattaatagtcggcgatcccaatcgtcggtaatgtgtcctccgtaatttactcctgctatgagatactttaaagctccccagggagtgtcttcatattcattaagatacaataatagtagtatttcggaaacttcaaaatcagaatcgttaaagctgtaaataacattccagccaagttctaaaaatttttttcgttcgagtaggactgtatgaaagaagcacaaagcgaataataacttcttatacttgctgggttcactacaattttccatattagcctcatttatgttgttatatagacgtttcatatttgatttgattccacgaggaggttcagttgtcatcttaatactggtttgcaaaatagatattggaaagtccggatgagggcttgagcttagccacagtcgaaattttttatgtagtttcatggactgcatagtggctatcatcttgtcaagagtaggcatccaactaagagacaaatgacaatttgctaaaaatacccaattaccatccttgatgccatccattataagctttgttgcaataggtgcttgtccttgacccaagctaagtgagtacattcgttgtgccattttaactgattctgatagtgatatgagagattgggctggatcgacacctggtgataatacgaatatgaggggagtctgtgaaatcgattcatcaaaagttgccttgagatcaagaactggcggatcaacatatcgaggcccaagtttggtaataataaattgtgtcaaacaaaaagaaattctatccggtcgaagtgaacgtaaaacacaaattttttgaaaatctgtaagtttatcattccattctccaacgagatcttcttgttctgggaaggtcgtggcataccaacctaaataattatatatgttttaatgtaaaacatatttaatattactataataccattccaagccttgtaatgttgctcaaaagaatctattatcccatgaaatccagaaactttatctaattctgttatattatcccagttttgctcacttatccaccctgaaatggtacatgacacaaacaccacaatatactttttaaaactctttatttttacttacatggtgccggggttgggcgcttgtcccagtttatctaatactatacctcctttcagaataaaatcatactcttcttccaaaagctttccagcgtttgaaagaatctttgctgtcatatgaattgaaaatagtagcttatgtcgctcgaaaagcccacgacaggtatttcggtagaccgcataggaatgatattcattaatattttgaattctttcatggactagctgattacgaggacttcgctcaatagactgtgtgaataataatatatacgctgccagagaaaaaacatacattggatcaattttagacatatccattaaaacaaagaataaaatggatgcgcgttccgatgctggtttgtattcttgtcgggccgcatcaatttctacttcagttacctcggcaatgctaagcgactccttaactagcactgatgtctgacgggatttttgtaaagttgaaaataactcatcgtcatctaataaggaacctcgactttcattaagtagccgtagaatctcattatcgagatctattaatgtccgtttgtttcgagctattgtcattaccagttcgtctttttgttcttctagggcgggtttttcttttcgaacaataattcctagtagttgggcttcaagcccatcttgctttagtgcaaaatttacaatagtagtttttgatgagatttccggtgggtaatgtggatttgatatttttgtcgttatgtaaaatctgaacgaattattgtatgaaatatacttgtcattaaattttaataacctttctccactttgaatggtaaagctctgccgcaaaattggattaatagcttgatctaagtattcccccacgttttgcaacaatacaggcaaaccttcttttagagctcgttctagctgacgtaagtaatctgccataccgaaatctagtgtcattaattgattacgctcttccatattttttatccaattattagcttgcatttgagggtcaataataagaggccaacgactaccttgagtaactattactccgttttcagtacttaaatcatcagcaggtagaccttgaatattccattctcgaatcgaaacagcatcgactagaaaatacgtaaccttaagctccaaagttgctggtattaaaagatctttaattaataaagaccattttacaagtaattcttctcggtatttggtgtcaaaagcccctaagtacgacataaacgcaacagaaagcaagcagtcaccgggaagtttttcaaaggataagtccaactgattaaccgtttcaatccacctttctctctctccagaaagcgattctaccaaaataatggcacgctccagttgctttctaagtcgttcttccttggcacgcaattcattaagaaggttagttttttcttcaagctgccggtaaagttcttcaatgacaacctgaagctcttcgagttttttttttgccgcagctaaagcagcttgcttttcttcaagtgacttcattgcactatctaatttttcctgctttggagcgactattcggtaaacttttccgtaattttctatggccattatccattgcatcaatgatttgcacgcaagcgatacaacagccactttatcgggctctaactcaggattttttgtatagattgcaatacgtttaagagttttatcggaaatatgatctctatcaaagttttttaggtcgttcaaaaatgttgattcacttaaaacttttttagcattttcccatgttggttcttttccaagtaagatcaatacagcttccataaccttttcgattttcattggcggccgtccatatgatttaacttctgaaatgtctttcttattcaatgcatctaatgcttttacagcagcatctatcataggcattaccacctccaagtccgcacgagctgtagctgctaattcaagacaaattatttcatcccttctaataagcacggcttcggcatccactttttccttttgttccgttgcttcactcttttgaatttcaatcatggatataaaatcttcacattctctagcaagtattttaacttgttcagagctagctttaagctcttcggacattaaggatactttttcctgagtttcagaaatttttgaaagcccattgcgtaatctattggaagcagttgatacttctaatcttttcttttctaatagttttttaaaaccacttacaagctgcaaataatttggtgaggttacatagttataacgcttaacttctgcatacatattttccgacattttagcaacacttgagtgaattactgaaaatacataggcaatatcgcgttgaagaatggcttctgtgcttataaccaaactttctcgatgtttttcgtcctcttttccagaaaccactacgtttaatggaaatccgattagaaaatgcgaagctacttccaaaagggcttcttgtggccaaaatctaaaccagtttggagttgttgaacttaacaaagccggatattgtcttatataacttcgaaaattttctccgattgggctaaaacaaagcgcaacatgcaggaagtcgcgcacatttaaaataaaataggaatatagtgcttcagttgttagcagaaccccatttttttttgccgggcgttcaagttcaggctttagctcgtcgaattcatctgatttaaataagtttatttctccagtacttagcatattgtttgttatttcgagaaatgagacttctgctatttggtcgctgctaaatataaaaatcgttagtctctgtttaattccagttactttgtataagttttttaggtcttctcgaaagtctcctgttttgtattttttggtaacctcaatttggaaaactgccatttccaaaataaacgcagctaacttggttaatacttgtcggcctgatccacctatccccatatttaaaatgtgtccacgcggttgggaaataactctcaggattcgaacaatatgttcgatagcttctctaaaaaatactaggttcattctagtcattcctggaaagttgttatattcctcaagttgatttttcataaatgttcttaagaaatctacctgtagatcttcgtaaaacccttgagggtgagcaaagtcaccgaaaaatggtggaacctttgaaggacaaagactgtgaaaagtaacttcaaaatgtttaccaagtatatcattaatagtatttacaaaccaaaactgatctgagtcgtcaaccaatcggtcgctgaacactctaaaacactcatgaacccaaagccgtaaaaaaaaattttttttgttttgaagttctttttcacttcttaatagtccttgaaagactttggatatatctctaagattaaataagtaatgagatttatttggcgtcggtaacattttactaatcattgatacatataagttaatggtacaaagggttataggtagccacatctcacgaacttcatttgggtatgactctagtttttgacagagcatcgttccaaatatgcgaataattgtttcttgtgaaggaaaagttaagtttaataaaacaaaccgactttgagttcgactggaaattgtttgtctgccccctccaggcggtcccatcgcagccattaataatgtgttttgcacatatattttttgttgagtttttctattaaaccaatacttgtaatctatccattgccgaataagctccaaaggtggctgagatccatagatgtcttttgcaggcatattaaagtcgtccataaaacatatcatccgtttgccaccgataggtacaaattgcgtttttgtacgtttctcagtccgattttcgattgattcttgtaacccggctgctgttgtctgtgctgacatgttcacagctaaaatgcaaaatttatttttatcacaagcctccattacacttatagccgttgacgtttttccggtaccaacatttccaacaagcatcacaggatattcttcagcaagaagttttgaaacaacatattcatagcgaacagtgtctccagtaggaacaataatcttgtaaaaaggagatctaaaacatttgttgtaaaaatacaacattttgataaattcttaatattcacttactcgaaatcgcatttccaactgctcaacagcttgctatcccatggtaaaaaggttcgttcattgggatccacaaaataatcaaacacagtatcttttattggaaagcagctttctagttcccgtataaagctatctagtctttggcgactgtcttcatccacacttgaacaaattgaccatactaaacaaaacataaaccacaatctagtcatctcctcaagaagttctaaattaatgggatttatcccatttacctttgtgccaaatatttctagcaatttacaaagcgacacaactccatttaactcatttgtccttacaggctctttgcacctcattcgtttaaaatccagtatttttggcaccatgtaatcaaaatgtattcgtaaaaaatcagcgaactccttaattcttaggcgctgtaaccatgagtttacaaaaggtttccatccccaatcattgtaatcgttataaaccattccacatcgggaaacagttgctggtgaagcaacagccaggtctcctacttcaaacaatagcgatacttgaactggcatggttatacgttcgctatttacaagcgtaagaagtttattatcatccattactgagttcatgttttcaatccatactgcatccacaggtccatcaaacaacaaccatttctgagtcggctcttcatctccacagattattcgcataatagaacttaaaactccgtcaagccattcaccagtcgacaagttgtattccccataaagctctgctagattcaatgcttttggatttactgggtaaacggtgactgcttcccatccggaaaatctttgactattcattcgataaaaacagttttgtaatgttctccatgtaactgatttggctgttcccgtatcccctatgatcataactgagtgcctagagttttttgtttcaaaaagctcaattactttttttacggctatggtaattggttggagacccgcctccctaaattcttcatagatcgcaatattaaattcactgtagtctatagttggtaagctaacaccaggaaatatgtcagacataataccattaaaaaggggtaaatcattagctgttaatctcgcaacattcatatctttcattgccaaataaacaatttcttcttcagtagtatttggtaattgacgtctttttcgacccgcgtagcgaagcaaagccaccattgagcgaagaccaaaatcataatgatattgctttgaaagttgctgcttagccagctcatacaacgtatatacctttcgggccaagtttcttgtattagtaaaaccatccgaaaaaagtaaattttccgcaataattatattatcaggtaccatcattgatatgggtctaaacattgactttaaattatcaggaagttcagtccgtccggcatatccaggattcatagtaatgaatagaccaactgtgtgctttaactttatcatttgaccctcgaacataagctccaacgcctttgtagaaagcgctgccattatagacattatttgttgtgccacgactgagagcacttcaatatttattcgattaaactcatcgaaacatcccca

SEQ ID NO: 26348 - DNA, 6336 bp, DROSOPHILA
atggcagcgctttctacaaaggcgttggagcttatgttcgagggtcaaatgataaagttaaagcacacagttggtctattcattactatgaatcctggatatgccggacggactgaacttcctgataatttaaagtcaatgtttagacccatatcaatgatggtacctgataatataattattgcggaaaatttacttttttcggatggttttactaatacaagaaacttggcccgaaaggtatatacgttgtatgagctggctaagcagcaactttcaaagcaatatcattatgattttggtcttcgctcaatggtggctttgcttcgctacgcgggtcgaaaaagacgtcaattaccaaatactactgaagaagaaattgtttatttggcaatgaaagatatgaatgttgcgagattaacagctaatgatttacccctttttaatggtattatgtctgacatatttcctggtgttagcttaccaactatagactacagtgaatttaatattgcgatctatgaagaatttagggaggcgggtctccaaccaattaccatagccgtaaaaaaagtaattgagctttttgaaacaaaaaactctaggcactcagttatgatcataggggatacgggaacagccaaatcagttacatggagaacattacaaaactgtttttatcgaatgaatagtcaaagattttccggatgggaagcagtcaccgtttacccagtaaatccaaaagcattgaatctagcagagctttatggggaatacaacttgtcgactggtgaatggcttgacggagttttaagttctattatgcgaataatctgtggagatgaagagccgactcagaaatggttgttgtttgatggacctgtggatgcagtatggattgaaaacatgaactcagtaatggatgataataaacttcttacgcttgtaaatagcgaacgtataaccatgccagttcaagtatcgctattgtttgaagtaggagacctggctgttgcttcaccagcaactgtttcccgatgtggaatggtttataacgattacaatgattggggatggaaaccttttgtaaactcatggttacagcgcctaagaattaaggagttcgctgattttttacgaatacattttgattacatggtgccaaaaatactggattttaaacgaatgaggtgcaaagagcctgtaaggacaaatgagttaaatggagttgtgtcgctttgtaaattgctagaaatatttggcacaaaggtaaatgggataaatcccattaatttagaacttcttgaggagatgactagattgtggtttatgttttgtttagtatggtcaatttgttcaagtgtggatgaagacagtcgccaaagactagatagctttatacgggaactagaaagctgctttccaataaaagatactgtgtttgattattttgtggatcccaatgaacgaacctttttaccatgggatagcaagctgttgagcagttggaaatgcgatttcgaatctcctttttacaagattattgttcctactggagacactgttcgctatgaatatgttgtttcaaaacttcttgctgaagaatatcctgtgatgcttgttggaaatgttggtaccggaaaaacgtcaacggctataagtgtaatggaggcttgtgataaaaataaattttgcattttagctgtgaacatgtcagcacagacaacagcagccgggttacaagaatcaatcgaaaatcggactgagaaacgtacaaaaacgcaatttgtacctatcggtggcaaacggatgatatgttttatggacgactttaatatgcctgcaaaagacatctatggatctcagccacctttggagcttattcggcaatggatagattacaagtattggtttaatagaaaaactcaacaaaaaatatatgtgcaaaacacattattaatggctgcgatgggaccgcctggagggggcagacaaacaatttccagtcgaactcaaagtcggtttgttttattaaacttaacttttccttcacaagaaacaattattcgcatatttggaacgatgctctgtcaaaaactagagtcatacccaaatgaagttcgtgagatgtggctacctataaccctttgtaccattaacttatatgtatcaatgattagtaaaatgttaccgacgccaaataaatctcattacttatttaatcttagagatatatccaaagtctttcaaggactattaagaagtgaaaaagaacttcaaaacaaaaaaaatttttttttacggctttgggttcatgagtgttttagagtgttcagcgaccgattggttgacgactcagatcagttttggtttgtaaatactattaatgatatacttggtaaacattttgaagttacttttcacagtctttgtccttcaaaggttccaccatttttcggtgactttgctcaccctcaagggttttacgaagatctacaggtagatttcttaagaacatttatgaaaaatcaacttgaggaatataacaactttccaggaatgactagaatgaacctagtattttttagagaagctatcgaacatattgttcgaatcctgagagttatttcccaaccgcgtggacacattttaaatatggggataggtggatcaggccgacaagtattaaccaagttagctgcgtttattttggaaatggcagttttccaaattgaggttaccaaaaaatacaaaacaggagactttcgagaagacctaaaaaacttatacaaagtaactggaattaaacagagactaacgatttttatatttagcagcgaccaaatagcagaagtctcatttctcgaaataacaaacaatatgctaagtactggagaaataaacttatttaaatcagatgaattcgacgagctaaagcctgaacttgaacgcccggcaaaaaaaaatggggttctgctaacaactgaagcactatattcctattttattttaaatgtgcgcgacttcctgcatgttgcgctttgttttagcccaatcggagaaaattttcgaagttatataagacaatatccggctttgttaagttcaacaactccaaactggtttagattttggccacaagaagcccttttggaagtagcttcgcattttctaatcggatttccattaaacgtagtggtttctggaaaagaggacgaaaaacatcgagaaagtttggttataagcacagaagccattcttcaacgcgatattgcctatgtattttcagtaattcactcaagtgttgctaaaatgtcggaaaatatgtatgcagaagttaagcgttataactatgtaacctcaccaaattatttgcagcttgtaagtggttttaaaaaactattagaaaagaaaagattagaagtatcaactgcttccaatagattacgcaatgggctttcaaaaatttctgaaactcaggaaaaagtatccttaatgtccgaagagcttaaagctagctctgaacaagttaaaatacttgctagagaatgtgaagattttatatccatgattgaaattcaaaagagtgaagcaacggaacaaaaggaaaaagtggatgccgaagccgtgcttattagaagggatgaaataatttgtcttgaattagcagctacagctcgtgcggacttggaggtggtaatgcctatgatagatgctgctgtaaaagcattagatgcattgaataagaaagacatttcagaagttaaatcatatggacggccgccaatgaaaatcgaaaaggttatggaagctgtattgatcttacttggaaaagaaccaacatgggaaaatgctaaaaaagttttaagtgaatcaacatttttgaacgacctaaaaaactttgatagagatcatatttccgataaaactcttaaacgtattgcaatctatacaaaaaatcctgagttagagcccgataaagtggctgttgtatcgcttgcgtgcaaatcattgatgcaatggataatggccatagaaaattacggaaaagtttaccgaatagtcgctccaaagcaggaaaaattagatagtgcaatgaagtcacttgaagaaaagcaagctgctttagctgcggcaaaaaaaaaactcgaagagcttcaggttgtcattgaagaactttaccggcagcttgaagaaaaaactaaccttcttaatgaattgcgtgccaaggaagaacgacttagaaagcaactggagcgtgccattattttggtagaatcgctttctggagagagagaaaggtggattgaaacggttaatcagttggacttatcctttgaaaaacttcccggtgactgcttgctttctgttgcgtttatgtcgtacttaggggcttttgacaccaaataccgagaagaattacttgtaaaatggtctttattaattaaagatcttttaataccagcaactttggagcttaaggttacgtattttctagtcgatgctgtttcgattcgagaatggaatattcaaggtctacctgctgatgatttaagtactgaaaacggagtaatagttactcaaggtagtcgttggcctcttattattgaccctcaaatgcaagctaataattggataaaaaatatggaagagcgtaatcaattaatgacactagatttcggtatggcagattacttacgtcagctagaacgagctctaaaagaaggtttgcctgtattgttgcaaaacgtgggggaatacttagatcaagctattaatccaattttgcggcagagctttaccattcaaagtggagaaaggttattaaaatttaatgacaagtatatttcatacaataattcgttcagattttacataacgacaaaaatatcaaatccacattacccaccggaaatctcatcaaaaactactattgtaaattttgcactaaagcaagatgggcttgaagcccaactactaggaattattgttcgaaaagaaaaacccgccctagaagaacaaaaagacgaactggtaatgacaatagctcgaaacaaacggacattaatagatctcgataatgagattctacggctacttaatgaaagtcgaggttccttattagatgacgatgagttattttcaactttacaaaaatcccgtcagacatcagtgctagttaaggagtcgcttagcattgccgaggtaactgaagtagaaattgatgcggcccgacaagaatacaaaccagcatcggaacgcgcatccattttattctttgttttaatggatatgtctaaaattgatccaatgtatgttttttctctggcagcgtatatattattattcacacagtctattgagcgaagtcctcgtaatcagctagtccatgaaagaattcaaaatattaatgaatatcattcctatgcggtctaccgaaatacctgtcgtgggcttttcgagcgacataagctactattttcaattcatatgacagcaaagattctttcaaacgctggaaagcttttggaagaagagtatgattttattctgaaaggagaccaaatacaaatgtttcccaattttgataagcctgatgcttttggacaacattcaaatgccgatatagcgtcattaataggagaaacaagaatgctttttgaggctctgctttctatgcaagtccagactaatagcacaagtagtaatgaaaacggtgagacaaaagtatttgatctcgctaaagaaattttaatgaatacaccggatgagataaactatgaacagacggcaaaaattattggaatcaatcgaactcccttagaagttgtcttacttcaagaaattgagcgctataataaacttctcgttgacatgtccactcaattacgtgacttaagaccttacacgtttccaactggatttgttacagcagtactacaaacttcagctcgagctaccaaaacaccaattgatgaactctcttgggatttttatgtttttgttgaagaagatactgccgcagctcgtataataagggaaggaggaggcgtttacattcgaagtttgtttttggagggtggcggatggttgaggaaaaaccaatgccttcaggatccactaccgatggaactaatttgtccattaccagtaatacactttaagccagtagaaaacctaaaaaaacgatgtcgtggtgtttaccagtgtcccgcatattattatcccgttaggtcaggatcatttgtaatagccgtggacttaaagtctggtaatgaaaaggctgactactggataaagcgaggtactgcacttttattaagtttagcaaactaa

SEQ ID NO: 26349 - protein, 2111 aa, DROSOPHILA
MAALSTKALELMFEGQMIKLKHTVGLFITMNPGYAGRTELPDNLKSMFRPISMMVPDNIIIAENLLFSDGFTNTRNLARKVYTLYELAKQQLSKQYHYDFGLRSMVALLRYAGRKRRQLPNTTEEEIVYLAMKDMNVARLTANDLPLFNGIMSDIFPGVSLPTIDYSEFNIAIYEEFREAGLQPITIAVKKVIELFETKNSRHSVMIIGDTGTAKSVTWRTLQNCFYRMNSQRFSGWEAVTVYPVNPKALNLAELYGEYNLSTGEWLDGVLSSIMRIICGDEEPTQKWLLFDGPVDAVWIENMNSVMDDNKLLTLVNSERITMPVQVSLLFEVGDLAVASPATVSRCGMVYNDYNDWGWKPFVNSWLQRLRIKEFADFLRIHFDYMVPKILDFKRMRCKEPVRTNELNGVVSLCKLLEIFGTKVNGINPINLELLEEMTRLWFMFCLVWSICSSVDEDSRQRLDSFIRELESCFPIKDTVFDYFVDPNERTFLPWDSKLLSSWKCDFESPFYKIIVPTGDTVRYEYVVSKLLAEEYPVMLVGNVGTGKTSTAISVMEACDKNKFCILAVNMSAQTTAAGLQESIENRTEKRTKTQFVPIGGKRMICFMDDFNMPAKDIYGSQPPLELIRQWIDYKYWFNRKTQQKIYVQNTLLMAAMGPPGGGRQTISSRTQSRFVLLNLTFPSQETIIRIFGTMLCQKLESYPNEVREMWLPITLCTINLYVSMISKMLPTPNKSHYLFNLRDISKVFQGLLRSEKELQNKKNFFLRLWVHECFRVFSDRLVDDSDQFWFVNTINDILGKHFEVTFHSLCPSKVPPFFGDFAHPQGFYEDLQVDFLRTFMKNQLEEYNNFPGMTRMNLVFFREAIEHIVRILRVISQPRGHILNMGIGGSGRQVLTKLAAFILEMAVFQIEVTKKYKTGDFREDLKNLYKVTGIKQRLTIFIFSSDQIAEVSFLEITNNMLSTGEINLFKSDEFDELKPELERPAKKNGVLLTTEALYSYFILNVRDFLHVALCFSPIGENFRSYIRQYPALLSSTTPNWFRFWPQEALLEVASHFLIGFPLNVVVSGKEDEKHRESLVISTEAILQRDIAYVFSVIHSSVAKMSENMYAEVKRYNYVTSPNYLQLVSGFKKLLEKKRLEVSTASNRLRNGLSKISETQEKVSLMSEELKASSEQVKILARECEDFISMIEIQKSEATEQKEKVDAEAVLIRRDEIICLELAATARADLEVVMPMIDAAVKALDALNKKDISEVKSYGRPPMKIEKVMEAVLILLGKEPTWENAKKVLSESTFLNDLKNFDRDHISDKTLKRIAIYTKNPELEPDKVAVVSLACKSLMQWIMAIENYGKVYRIVAPKQEKLDSAMKSLEEKQAALAAAKKKLEELQVVIEELYRQLEEKTNLLNELRAKEERLRKQLERAIILVESLSGERERWIETVNQLDLSFEKLPGDCLLSVAFMSYLGAFDTKYREELLVKWSLLIKDLLIPATLELKVTYFLVDAVSIREWNIQGLPADDLSTENGVIVTQGSRWPLIIDPQMQANNWIKNMEERNQLMTLDFGMADYLRQLERALKEGLPVLLQNVGEYLDQAINPILRQSFTIQSGERLLKFNDKYISYNNSFRFYITTKISNPHYPPEISSKTTIVNFALKQDGLEAQLLGIIVRKEKPALEEQKDELVMTIARNKRTLIDLDNEILRLLNESRGSLLDDDELFSTLQKSRQTSVLVKESLSIAEVTEVEIDAARQEYKPASERASILFFVLMDMSKIDPMYVFSLAAYILLFTQSIERSPRNQLVHERIQNINEYHSYAVYRNTCRGLFERHKLLFSIHMTAKILSNAGKLLEEEYDFILKGDQIQMFPNFDKPDAFGQHSNADIASLIGETRMLFEALLSMQVQTNSTSSNENGETKVFDLAKEILMNTPDEINYEQTAKIIGINRTPLEVVLLQEIERYNKLLVDMSTQLRDLRPYTFPTGFVTAVLQTSARATKTPIDELSWDFYVFVEEDTAAARIIREGGGVYIRSLFLEGGGWLRKNQCLQDPLPMELICPLPVIHFKPVENLKKRCRGVYQCPAYYYPVRSGSFVIAVDLKSGNEKADYWIKRGTALLLSLAN

SEQ ID NO: 26350 - DNA, 3515 bp, DROSOPHILA
gcttcgcacagttattcaaagctggacttgaactttcgacacatgatctagaaaactattatcctcgtctagtgcaactgggatcttccggggtattatctataatgttattccaaaaccagaatcccaaatatatcattgctcgcacttaaatcacgtgatacaagcaaaacaggaacgtgttttatatccaatccaacctgcttggcacctgatttctgctttcgataagccccaatattacggagatatttaacccccttatcaatgtgactcatcaaggtcatcctctccgtttccaactgattagtatgaggcaaggtcgcgaatatgtttaactcgatgataaaaacatgtacattacatatgcatataagatgcaagcagagagcaaacaaaagtggagctacaagaaaatagataagatgatagactgcaatcattggaaattccaagcggatgacttagctataatatttgaaccgcatttgatgtaagcaaactacatacacgttttgttgataacttccaatagctggtatccagagctaagccaaccgaatccgctcctgaaacctcatgctgtgcgtgagtggactagagattagttaaaaacgcacgaattcgtcgagtccgatgtccgagtgtcttaatcttgatttgtttgtattttgattactgaaattagcggcaagcgctaattgatgcattagctttgattgcgactcgttcccggctacttgtgcctgtcgtccaacccgatccatgtataacaagtgaagctcacaagtccaaggaatcgagaaggtgacccccacttagcggggccaccgaattgcaaaagttactgttctaactttggccaaactttcaccgaataacaagtcaattagcttgggccaactcggatgtcagacttgttatgaaagtgggttttgcaactattggctatataaagagtattccttgccaggatgtcgttcacatagttatatccatcatgtccgagtggttacgctttctgaaacgcgatcaacagctggatgtgtacttttttgcagtgccccgcttgagtttagacataatgggctattggccgggcaaaactggtgatacatggccctggagatccctgattcacttcgcaatcctggccattggcgtggccaccgaactgcatgctggcatgtgttttctagaccgacagcagattaccttggcactggagaccctctgtccagctggcacatcggcggtcacgctgctcaagatgttcctaatgctgcgctttcgtcaggatctctccattatgtggaaccgcctgaggggcctgctcttcgatcccaactgggagcgacccgagcagcgggacatccggctaaagcactcggccatggcggctcgcatcaatttctggcccctgtcagccggattcttcacatgcaccacctacaacctaaagccgatactgatcgcaatgatattgtatctccagaatcgttacgaggacttcgtttggtttacacccttcaatatgacgtaagatatgatctcaagtgcatctattatgagttactatatcctttacaattatatatttatttaatatcaatagtatgcccaaagttctgctaaactatccattttttcccctgacctacatatttattgcctatacgggctatgtgaccatctttatgttcggcggctgtgatggtttttatttcgagttctgtgcccacctatcagctcttttcgaagtgctccaggcggagatagaatcaatgtttagaccctacactggtgagtgagtatgcaaaagttcgaagaaatgatttaaataaatctatttattcttgaagatcacttggaactgtcgccagtgcagctttacattttagagcaaaagatgcgatcagtaatcattaggcacaatgccatcatcgatttgaccagattttttcgtgatcgctataccattattaccctggcccattttgtgtccgccgccatggtgattggattcagcatggttaatctcctgacattgggcaataatggtctgggcgcaatgctctatgtggcctacacggttgccgctttgagccaactgctggtttattgctatggcggaactctggtggccgaaagtgtgagttcggcgatagattctatagatccttatgagtttcaaaatcctttgtccatagagcactggtctgtgccgagccatgttctcctgtccgtggcagctttttaagcctaaacaacgtcgactcgttcagcttttgattctcagatcgcagcgtcctgtttccatggcagtgccattcttttcgccatcgttggctacctttgctgcggtaagttttgttagaaaatttaggtaaaataaaaacaaataagacccagaagaagaatttattaagtttatatttctcaatttgaacccactctattgcagattcttcaaacttcgggttccataattgcgctggttaagtcctttcagtaaattggtaataaatataaagtgctagtattttcaagttatgtttcgggcactatttgttaaaaaccaccttaattttaaggacatagcacggattctttttgttactttataaccatatttcctatgcaatagaaacttagcaggagattatcaatcctttttcgagcctaccatatcggccatctccaataatcaggcgctgactgcaccactttcatgtccactatacccactttctagccactttctaactactttataccacacatcacgcaactaaaaaggagttgctcagtttgctgggtaaagcggacccggaatgacatcgccggatgagcgtaagagtttctgggagcgacatgagttcaaattctatcggtatggacatgtgtacgccctgatctatggacaagtggtgatcgattatgtgccccaaagggcgctgaaacgtggcgttaaggtcctcctgattgcatatggtcacctattcagcatgcttttgattgtggtattgcccggatatttctgctaccactttcgcaccttaactgataccctggatcggcgtttgcaattgctattctatgtgagtttcaccaatacggccattaaatatgccaccgtaattgtgacctatgttgctaataccgtgcactttgaggccatcaatcagaggtgcaccatgcagaggacgcatctggagttcgagttcaagaacgctccacaggagcccaaacgaccatttgagttcttcatgtacttcaagttctgcctgatcaatctaatgatgatgatccaggtgtgtggcatatttgcacagtacggtgaagttggtaagggttcagttagccaggtgcgagtccactttgcgatctacgcctttgtgctgtggaactacacggagaacatggcggactactgctactttatcaatggatcggtgctcaagtactacaggcagttcaatcttcagttgggatcgctcagggatgagatggat

SEQ ID NO: 26351 - DNA, 1221 bp, DROSOPHILA
atgtccgagtggttacgctttctgaaacgcgatcaacagctggatgtgtacttttttgcagtgccccgcttgagtttagacataatgggctattggccgggcaaaactggtgatacatggccctggagatccctgattcacttcgcaatcctggccattggcgtggccaccgaactgcatgctggcatgtgttttctagaccgacagcagattaccttggcactggagaccctctgtccagctggcacatcggcggtcacgctgctcaagatgttcctaatgctgcgctttcgtcaggatctctccattatgtggaaccgcctgaggggcctgctcttcgatcccaactgggagcgacccgagcagcgggacatccggctaaagcactcggccatggcggctcgcatcaatttctggcccctgtcagccggattcttcacatgcaccacctacaacctaaagccgatactgatcgcaatgatattgtatctccagaatcgttacgaggacttcgtttggtttacacccttcaatatgactatgcccaaagttctgctaaactatccattttttcccctgacctacatatttattgcctatacgggctatgtgaccatctttatgttcggcggctgtgatggtttttatttcgagttctgtgcccacctatcagctcttttcgaagtgctccaggcggagatagaatcaatgtttagaccctacactgatcacttggaactgtcgccagtgcagctttacattttagagcaaaagatgcgatcagtaatcattaggcacaatgccatcatcgatttgaccagattttttcgtgatcgctataccattattaccctggcccattttgtgtccgccgccatggtgattggattcagcatggttaatctcctgacattgggcaataatggtctgggcgcaatgctctatgtggcctacacggttgccgctttgagccaactgctggtttattgctatggcggaactctggtggccgaaagtagcactggtctgtgccgagccatgttctcctgtccgtggcagctttttaagcctaaacaacgtcgactcgttcagcttttgattctcagatcgcagcgtcctgtttccatggcagtgccattcttttcgccatcgttggctacctttgctgcgattcttcaaacttcgggttccataattgcgctggttaagtcctttcagtaa

SEQ ID NO: 26352 - protein, 406 aa, DROSOPHILA
MSEWLRFLKRDQQLDVYFFAVPRLSLDIMGYWPGKTGDTWPWRSLIHFAILAIGVATELHAGMCFLDRQQITLALETLCPAGTSAVTLLKMFLMLRFRQDLSIMWNRLRGLLFDPNWERPEQRDIRLKHSAMAARINFWPLSAGFFTCTTYNLKPILIAMILYLQNRYEDFVWFTPFNMTMPKVLLNYPFFPLTYIFIAYTGYVTIFMFGGCDGFYFEFCAHLSALFEVLQAEIESMFRPYTDHLELSPVQLYILEQKMRSVIIRHNAIIDLTRFFRDRYTIITLAHFVSAAMVIGFSMVNLLTLGNNGLGAMLYVAYTVAALSQLLVYCYGGTLVAESSTGLCRAMFSCPWQLFKPKQRRLVQLLILRSQRPVSMAVPFFSPSLATFAAILQTSGSIIALVKSFQ

SEQ ID NO: 26353 - DNA, 10207 bp, DROSOPHILA
cagtaaaaaaaaatgttagtggacttccgcgaggggatattagatttcatttcgttcgaaaaattcatttgacagacgacagttggttatatgtatgtattatatgagttatgcttttcacaattgtttataccaagaaaaaacaacaaagaaattgcaattgtagatttaacccttttgttttatgtaagacatgtataaaaaatagcaatgaacaattatatattttctgtatttttccgttctcgccacattcctctaacagatatggttcctgattcatgggatttgaaccgatttccgcacgtgcattataaatgcagccctgtctgtgtgtgactgtgtgtatctgtgtgtgcttctgtttgtgtgtgtggggggcaggttgaaaaacgaaaagtgaaccaatttcgaaatgaaataaacgtaaaatgggaaactaggttttttggttttatttgtttagaaaaagaattacaaataatacataagtttgtttttatttttgttttctcatttggttcgcttggttgttgttgttgttgctgtatcttttgcagttgtttctgttgccatacgaaaattaaatattaatttggactgttgcaaaaaacgtataataaccgattatctcatttcatttcttgtgtatacagttaggaatattatttagttgttttttttttgttgttttgtaaggaggaaatccacacgaggcaccgccagggcgaacaaattcggagcatctagagtttggccgtttcgatcgggaaaaacacacacaataacgaattatctgctagattaatttgattcaaaatccggaaaaatcatgccaaactcccaaatagtccgcattcgtttgaccctcacagcgatgctgtatttttctgtatttcttaagcagttgcagatcttaagctacatttgagtcggattggccggcatctgtccaagcatttgaccatctgtatactggattcgcttgcaaccggaacccggctaaaaactacccgtgacaatcgggaaaacggcctcaaatgccggcccatcggccccaaatgaactgtgaagcattctgccctcaattcgtatgttaatgtctcaaatgttcgcgctttttgcctgcctgtctgctgctctcgcctggattatcgtttcatttcaaattgttttgctttgctggttgcgttttataatatttgtttctctttgttgtttctggtttttgtttgtttgtattactgaataatatttgcatagtcaaaaaggaaacatttgcttagttgtttggttagttgtcgccgccctcctgtggctcagcttcgtcgccttgggtgtcggacgtccagagagtcaggttgtccctcaacagctgcatgatgagtgtcgagtccttgtaggagtcctcgttcagtgtgtccagctcggctatcgcatcatcgaacgcctggtggtggtgggtcaaaaaaggtactttttagtataaattctctaaggattcgaatcaaaggaaatgtttggcaaggcgaatgcaagttggtagaacaaaagcattttcaaagtggcgttaggttcattcatatttggcttcactaaacaactttatcaaactgaaatctaaggcaaatcgtgtaaatcaaaataaaagtaacaaaagagttttgttgaccttaacaaaataaaaacgaaaagtgtccaccagcaaaggccgcatgtaaattatttcacaggcaaagtttttggtatttctcatgcaattgaaatgggaaaataagtgggtggggatcgatatacattgcgcttcaaaaagtttgaaatttcagtaaaaagaaaaatagttgcaaaattttttttcataggtttacatttttaaaggcactacaaggaatttgagctcaagaaattagtttatgttttcttctcaaacttttaaaacgccttggtagtaaagtatatctcttcgtcgggttaaagctcatttagttggttaattagtcgctgggtatcttactcagtttagtcacagaacaacaagaatttctatcattgggtaattagtattcgtaagcaaattattaagtttacacaaaagaaacatgtataagttgaactgaacctgtttagctaagtgacaagccctcgctggtgaattgataatttcgtaatagaagacggaaaagttgagagcaagacctaatctgattggatgtgtgggctgcattttggtttttgcaatatcgaacgcctcctgataggcttttttcgagtcctcaacgacggcttaatgatttacacatgattcagtaatggaaaaaagtaagaaacaaaaccaaatgttaggaaaaccatttgaaagtaaacaaaaaaattcttaaatgtcgatggatagtgattttgtgtgccttttgctcgcttgccatacatttcgattaatcgagccaagtctcagtgcgttattaacctgtttagccaattggcaagctttgtctggtgagttcaaaatctcatagtagaagactgagaagttaagggccagacccaaacggatgggatgtgttggctgcattttggtttttgcaatatcgaacgcctcctgataggcatttttcgagtcatcaacgacggcttaacgatttacacatgatttagttatgtaaaaaagtaagaaataaaaaccaaaagttaggaaaaccatttgagagtaaacaaaaaagttctttaatatcgacggattgggattttgtgtgcctttcttgctcgcttgccatacatttcgattaatcgagccaagtctcagtgtgttattaacctgtttagccaattggcaagctttgtctggtgagttcaaaatctcatagtagaagactgagaagttaagggccagacccaaacggatgggatgtgttggctgcattttacccttgctaatgtcaaatgcatcctggtaagcggtttgcgagtcatcgacaacggctgtgttttgcaagagtatttgtagtttggtttgtaaagattttattattgtacaattcgggcgtacaattcggggatagggtgtttttgttggtgtgcttgacaagatacttactgttgcgtgcatctcctgtggcaacctcggctaaatacctgtagtaatcacccttcatcttcaggtaaaacaccttgctctcgggattgctggcttttggaataaggtatttgtccagaagtccctgtaagcaaaggaaacaagtactccaattaatttcatatcaatttcgaaaaccaaacgcaacaattaaccaagtaagccgccaggcttattgtaaaccttgttctaaatcattttccattttaaaatccatcaagcaccagttaagtttaatccaatataaaagccccaatcaaagaaaagcgaatggggaaacccccgagttcaaccctggccatggtcattttctgatccgtgaacggcaatataaatttcatatacacacaagcgaaaacctctgtgtgtgggggaaaatggaacatgttcattttaaaaatagatttattgattgtaacaaatttttatatttcactagagcaagaaggaagaccagaaaacaggcccaccctctggaaaacccactgaaccatccaaccaacaccctcggacagctgagcttgccaagggcggaggtctttatacatatatatatatatatatatatttaggcggttgacaggtttgccatcttcatcaccgtcaatgcagatgaacaaccaagtgagttgtgggcatgaaaataattaaatggaccaagtacaaccccataaatccttcagaaagagacttgcgcagacttgcggaccaccacttaccaaaacttcgtagcagatttccctcagctccttctccacacgctctctgtactcacgggcgagctgctgttttctagcggatgcttcggttttctgctcaatggaggagatgacacgccacgatgacctggtttggacatgttaaacacacccggagaaggggcagaaacatacagcttagcacttgaactccaatctatagtgcgacattaatcaatctgtgattgattgactcacctgcgggcaccgaccacatttttgtaggcaacggagagcagatttctttcctcatttgagagctcaacgccagtctctgtgacggacttcatggcctgggccatatcatcgtaactgcatagaaaatgttccattagtgattgaaaatatttagtcatgtagatcacagaaatatatgcattctttaaattttgaagaacaacttaaatgatacatatattgttcattagaagatgattttaaatggatttaataaaacagaaaacaatgttaaatcttagagttcttataacttccaagaatgtcttttttacgtattaataaatattatgtgcaactataacttttgccaaatgagtttgtagggttcttttgaagttctgtgaggttgatgaactttattataagatgaaccacttaccgttctgactgctcggccagtttagccttctggaccagctcttccttatcgactgtcgacattttgtttgatttttttttcggttacttcacaaaactaataaaatacgccacacagttcgatatgcccctcaaaagttgctaacaatggctttctgcaataaattagaacgtaaacaggagcattagtgtgtttttcagtggaggagaaatgtaggtgaggccactttaacccgttatctcgttctcgcctaacggttctcggctgtgagctcttaacaaacacctgactgactaacagagttctgttgcggattacttgtctgttatatttagctaaaattccacagcaaccagcagttgcacaacactgcgaatttttgtgtggcactgtatgttctgtggagtgaactcaactgccatatacgatcaccccttataggggataatagacattataagatattccatgtttttggttcgatagatgcttatgcttttaaattaattgaaggccgcgattctatattttatattcgttagctctaaaagtaatttaaaagatgttttgcttgactacaaagttataaaatgatttttccttataaattaaagaacttgagtgactaataatattatctgagtcactcagacaagtccaatatacccgcaatgcacttgcgcgagtattcctaggaaggtcgtacgaatttagtttgttgtcatgcttccgctggacgaaagtgttggattcaaagctgcgatgactcatgcattcgcagcaggtctttattgactaatcgctgacggaatggctaatttaaatgggaaaaagccagcgacaaaaacaatgtggcactggacatggccgcacgtgtggcaactatgcaactattcgaagcccagtttatgggtttgtggaaggccgaaggtggaaagagagtatctggcagatagatgtgaaaaaatacaagttcgacaacagcgataaaaataaaccatgaataaaaagagagagggagaaatggagcacaagtcggcccgccttaatgcgtttttatatatttttgtgtgtgtgccaaagatagatatttatgtacgtgcatagagaccgtctgtttgtgttctccgcacagtgacgcactcaattacttgcccactcgctgaacttctatcgattaaacgtgcagtaattattagaaaacaaacagaaaaaaaaaatccaaataaaaacacgggaaagcaggcgacaatcattaatccgctcacacgtaatccaattataattccttgcgataggatcatccaaactttcaatgtaggaccaatttccggcttgaattttcaaagggacgtgggaaaggaaaatcgattaatttccgctcgacctggagaaagcttggaaacaagaactgcgtaggacgaggggtgaaaatcggtctgtggaaatgcatatgtatgggcgttgctggtatttttagacaactggcggctctggacaaaaaaaaaaaaaattgttttgtttgcccgcgcaacggaaacctcgaaaaccaagcaagaatgccagctaatgcagccagccgatgattgaaatggaaaatctcaacacatcggcatcataaaagcaccagcaacaatcccacaaataccgcgttcaattggatttacagtccagcttggctagcagcgaccgctgaatagttgctacattgaaatggttaggtgaaaaatagtctccaaaatgtttgaaaccccatacaaatgttctttactgaagctaacaactagtttcaaagacccagtaacattggcagaagcaattataaatgctgatttctgcgcagttgcctaaaaaccaaccaattgaagtttaaaccatatgaaaacagctattatttgtgttgcgaccgaccgccaaattgaaaaagcattgaccctttgtcaaaacaaaaagggcggcggggcgtggcgtagcaaaaatatggaagggggagggtgcggtgcggtctcccgacgcgtttttaggtcaattggcatgttttctgcctgtgctcggtaaatgccaaaacattaagccaggcgtaacgtaaattaacgtaacactcccctaaatggtcacaaatatgtttgtagtttttatcggataaatcaaaggaggaaaaacttgtttcaaccacgcagattgctcatctgcctgaatgaataaattggtaaatagggggaaaaacaggtgggaggtgggtatctcgaagttatagatacgtagaccttagaggacggtttaacacccatatggtcaggctaatttcggggctagaaaatcctgcgaaatccgtgtcggatggatacttggtactttaaaccttatctgcgccggccgacagcatgcgcagtagctcaagaacccccccccccccccccaaaccccccgagaccgagccgagcaagaacccaatccccgatgatgtagaaattcctctacactgtagataccgctactgcggctctacatggggcgaaaaagttactaacttttattggggctgtgtgcgtgcgactctgcgtgtgtcggtgcgttctgggtggtggtggtaatggtggtgcggatgggtgagatggtgttggtggggccgccaatcgtgtttccaagtgcggcgctacaaaattataaaaataatcgggagaaaggaggagcgaggtgggagggagggagagagcggagaacgccgcagagagaggccgaaatgtatctaccacaggcggccgccaagtgtgttgagtttggcgaggaaacccacctaaccgcgtgtccccatccaagtatcaacttggatatatatatatatatatctatcttggcgtactgtgtgtacatatagctggctatataagcgtaaatatagaagtcggctatgtccgccgcctacaacttaaccgatgaactgctgatgatgatgagaaatacgaagctacaagcgaatctcaccgcatcacatacatgcaccaatactcgggcaactcgggaatgttcttttctttcattttcttttcttttccttattttgcacaaatttacactttattcttttgcgtagattttttttttttggcttcggatcgatgtctgatttatgtatttcgatttttctgcgggacgaagtatagatgcatgtaagtgattgctcataggcggcattacacgtgttttttcttcggatattttagcaattttacgttttataattccatacacacactggcaggcgcacacacataggtacaaggcactctgggccagcaaaaatgttacttacattctcgattaactgaaactgaaacgacaacgaacactaccaacgaacgaatgagaatgacggacggcaaaggttgcacacattcgccgcgccgctgtatctgtgtttctgcgctctctccccacgcacactctagcaggggcacatgcgccgccgcagaatgagagggagcatatggggctggctcaggcgagagcgagaaagtgcgacaagtgagagagtttcagggttgccaacctgctgtataaattaatgttgccaggtgtgcaggtaaaacttggaaaccaaactttcagataaaatatactaattaataggcgtctcagaacttgtagatagagagctttaaaatgagccagcttttattgtcaagtctttgtgttatcatcgttttatgaagtaatagtttatagttcgtttccaacctgttgaaactttcgagcgcttatctcgctgccagattacgcttttatcttgactttatggcctccgcaaggaggaaactaatcgggagatgtatgccattgataagggggtggcggtaaattgccttaattctaatttggatttcattgaattggtgcactcacacataaaaacgagatatccacgtacttatgattttcgtgaggtgaggcagggcctacgattgtgggccggaagttaaggcgaggatttaacaatcaatttctagttctaattatacttagtcctgtcaatatgggataattcgacaaaattagagtatattcttttgagtcttcttctattgttaattatacaataagaaaatatatttaatattctatgatgtttttgtattacattaagcataatgttcaagtcattaaaaaaaaaaaacggtaattaggtgtacgaggaattttctaaataatcgtgtaagtgtattgcaattcaactcgtgcgtggcgaagacatgctcacgcgctcatctctacattttactacagctcacaaagaacaagacggaaaaaattacgtcatcggcgtcctatttggttgcggtaatgaaaaattgctacgtccatttccaattgtaatgggattttcgcaaggccagtaccgcacgcaatcaaatgcggagagcccaaggggcaggtggcatccaattaggaggccaacggaatcgataaagtgcgtgggcgcacttattcggggaaaattttatccgccgacaatatggcggtcgcaagccgacacacgacgcactaggtgaaactacttactgcgcctgggttttcaagcgaatatcgaatatatgcgtaatccttgggctctcagcacacgacttttaacttagttttaaacgagcaagcacttattaattagttaattcacctcttacggctcggacgtgaaggttcttcttcttctctacgcgcagatgtgttggaaaacgaggaaagctgaagtagggattggcccgcaggaattttccaacccgcacggtgcgaaattccgatacacgatagagctatcgattgttggttaggaacatttaccatctctagaaggccgcacgtgtttacgttcggtgggaaatattcttggtttctgttaagaaaacgttgctatttaaaggctacagatatgccgcgctccaaacgtgataagaaaggtgagagtttcggctttaatatatacgatttgtacttataacgtgcgatactcttcttcccttagtttccctgaccaaaaccgaccgcaagggtctggcttggaaacagcgcattgtggacgacattcggttctgcgtgggcaaatacccaaatatattcgttttccaagttcagaacatgaggaatagcttgctgaaggatctgcgacaggagttgaaaaagaattctcgttttatctttggcaagaatcgtgttatgcagattggcttgggtcgcacgaagagcgaggaagtggagccggaattgcacaaggtaattaagtttaagtggattaacatatatcagacactaatcacaggctatgtctattagctatccaagcgattaactggccaggtgggactgcttttcacggacaaatccaaggaggaagtcctggagtgggcagaaaactactgggccgtggaatacgcacgcagtggctttgtggccacggaaacggttaccctgccagcaggtcccctagaggacttcgcccactctatggaaccgcatctgcgttccctgggcctgcccaccaaattggagaagggaatcgttacgctgtacagtgactacacggtttgtgaggagggcaaagttctaacacccgaacaggcgagaatcctcaagctggtgggcaagcccatggccaaatttcggctgaccatgaagtgctcgtggacaaaaagcgaaggcttccagctg

SEQ ID NO: 26354 - DNA, 1273 bp, DROSOPHILA
aagaaccttcacgtccgagccgtaagaggtgaattaactaattaataagtgcttgctcgtttaaaactaagttaaaagtcgtgtgctgagagcccaaggattacgcatatattcgatattcgcttgaaaacccaggcgcaaaagccattgttagcaacttttgaggggcatatcgaactgtgtggcgtattttattagttttgtgaagtaaccgaaaaaaaaatcaaacaaaatgtcgacagtcgataaggaagagctggtccagaaggctaaactggccgagcagtcagaacgttacgatgatatggcccaggccatgaagtccgtcacagagactggcgttgagctctcaaatgaggaaagaaatctgctctccgttgcctacaaaaatgtggtcggtgcccgcaggtcatcgtggcgtgtcatctcctccattgagcagaaaaccgaagcatccgctagaaaacagcagctcgcccgtgagtacagagagcgtgtggagaaggagctgagggaaatctgctacgaagttttgggacttctggacaaataccttattccaaaagccagcaatcccgagagcaaggtgttttacctgaagatgaagggtgattactacaggtatttagccgaggttgccacaggagatgcacgcaacaccgttgtcgatgactcgcaaaccgcttaccaggatgcatttgacattagcaagggtaaaatgcagccaacacatcccatccgtttgggtctggcccttaacttctcagtcttctactatgagattttgaactcaccagacaaagcttgccaattggctaaacaggcgttcgatgatgcgatagccgagctggacacactgaacgaggactcctacaaggactcgacactcatcatgcagctgttgagggacaacctgactctctggacgtccgacacccaaggcgacgaagctgagccacaggagggcggcgacaactaaccaaacaactaagcaaatgtttcctttttgactatgcaaatattattcagtaatacaaacaaacaaaaaccagaaacaacaaagagaaacaaatattataaaacgcaaccagcaaagcaaaacaatttgaaatgaaacgataatccaggcgagagcagcagacaggcaggcaaaaagcgcgaacatttgagacattaacatacgaattgagggcagaatgcttcacagttcatttggggccgatgggccggcatttgaggccgttttcccgattgtcacgggtagtttttagcc

SEQ ID NO: 26355 - protein, 248 aa, DROSOPHILA
MSTVDKEELVQKAKLAEQSERYDDMAQAMKSVTETGVELSNEERNLLSVAYKNVVGARRSSWRVISSIEQKTEASARKQQLAREYRERVEKELREICYEVLGLLDKYLIPKASNPESKVFYLKMKGDYYRYLAEVATGDARNTVVDDSQTAYQDAFDISKGKMQPTHPIRLGLALNFSVFYYEILNSPDKACQLAKQAFDDAIAELDTLNEDSYKDSTLIMQLLRDNLTLWTSDTQGDEAEPQEGGDN

SEQ ID NO: 26356 - DNA, 5895 bp, DROSOPHILA
gtattggcgatgatcattttcagactgagaatgagacgattttcagtcgatttaaggttagactgccatgcaaccctcaactcaattaaatgtactttttataaaatgttatcacaggccaacgcgattactacgctctcaagtcataatgccctgggaattttcagctttttattttgagaaaatattgctggcataataaagagaatttaatgggttaaggcggccactaggacgcctggccatcaacttttcgccaagagcagtaaaaaagtcagcaggctggagctcggctttcttttcgctttcttttcccgggctctttgtattgtgcttaacccctcgctcttcttgcgatcgttctaattttatgacattctattttcatgcatagcaaacgagacgcatgtgtgggtggtttgggggtagtgggtggttttgggtggttttgtgggcgggcgagtgcagccatagccatttcatagtcagacatgaatgctgcgctttgttgccctgctacgcctttgtttgtattgccctcaggggtaaagtttttaggataataacttcctgcgactttacgagccaaggcaaaagccaaaaacccaccagcagcagcggcaactaaagggaaatgagaatacttaagcagagtacactgcaataaaggttactggtacttagtgacagcatttaagcatacagctttacttaaactattttatagatatattttggacagcctttgagtaacataattgttggtaaaatactaccattctgtgtaaaacagtgccatattaagaaatcaatttataattagcttatttaattaattttaatattattaagtagtatttcagctattttaaattaccagaaaatctaacttaaatgaaaaactctgttgaaactcacaattttttaggagtgcagcagaggaactgcatatgaacaacgtggcgaaggcaagccctgaaaaatatctcaagacctccacttaaagcagccagcgagtaaaagcaaaagcaaatgccaacacatcagcggtgctaagggtggatgagctggcagaccgcagaaacttttgacgctgacgacaggcggaaagcctgcggaaaggtcctgacaagctaacgtttttcaagctaaatttaaatattttagtatgagaaaatctggaaaatattaggctttttcaaacaactaaaaataattttttctttagttgtgtatgggctcttgaaatttaagtacttactataattacaaaatatcattctattcaccttgcttataaaaaaaaggtatgcttttttccactttatgggaatatccagttcatgataatcatggtgggcaacactgctgagaaataaggcggcgtgtaaactggtgggagttggcgttgcggtggcatattaaagacagacagctgtagtaggagcagcaccgtcgtggctgtgggcataatctcagacataattacacacacaactcacaggacctgggcaaaggaatgcgaatgccaggactcggagccttattctgattctggttccaggactgacaaatgcagtcacacatgaatggacttttctttggacttctttcttattctaggttgtttttacttttaacggggccaggggaaagttgacttaaaggtgaaaatacctcaccgccacctattttcccaagaggactcctcacgagaggtcaaacttttaaagtgcatttaaaattaattaagcatacgacgtgttgccagttcagaaagtattgcatgacaggtactggaattaagaagactccatgctgctttatatagcaattaacaagtttttttcgcttgcagctgtaattgatttaaggccttggaatcaatgtttaatctctcgatgtgccagaattcctgacttacattattcgcatgctgttgctccatgcgcggcttgaaaagtttagacacaatatcgctaatgataattacaagctaaaaactttttcagcatttacttaagccccactatgcatttgagcatttggccttagctgcagttggcaacgcaacacaagcacaaatataaaatttccagtggttagcacaaaagttcagcaaagccagagggaatgataaggggttgggagtccataactggaatattttagctccccccaaattctcgtctacccccggactgtctgttctaattaaacgttattatttcgacttgcagtcaatgcatagtacggtccagtagttgagtggcgactgtgaataaatgcggtgtatttgtggtcttcattgagcatttagttatttcaaacacgaatagttgttataatttgacaactgtgtctttttttcattcattaggctatttaaattgtccaattaaaattttttattatacattttattgaacagtaggcgacagtgttttttattacttttgaggcagaaccaaatgtaccaaatttattgaattatttaaagctagtgaactgaagaattgtattcctggatagtgagtactttgagcgtcgtaaaacaaacccatttcccatctatattcaggataaataaaactcattagtcgtcaagataggcagctagttagagtgccagcacccagcccagtcgaacaacacggtgctaatgaagtacaaattggctaatggggcgggtcgaagccctaaatcgacgaccatggagacgtcgacagggtctaattatcaatgagcgcggcgcctgtcgaagttcgacttcctcttatgagggagttatgggcggaagatagagacagcctaagctcggcaacagcggtgcgagcgggatgcatggcctttttatgtgaaaacttttgtgcattttcatggcgaaactttaatggattaatttaccaaaatgttcgtgccagaggaaattgaaacatagtgggtgcaggagcagggcagcgcgggaagaggctccactgaagttgaagatttatggcttacgccagagacgccatccaagcccggcttaatggccgctgatcatttccagagatggcaaaacatggaaagctgaaaatttatatttttttctggctctttgcgttttggaatgcttgcgatattctaatttcattacccaccagcagtggcaaaagttttattaactttctgcaagtttttgctgcacagaaatcatgaatattttattgcatatttccaggcgcctccaacacccacatacacacattctcacatgctcacgcattcccacacacacacacacactgacacggaaaaagagcaaaggaaaagtcaatgatgcgtgtaagccagctccttttatcaatttaatttaattaaaattaattcaccaataattgacttttaatatgcaatcatttgtatcagcggactagagtcgcagaaggaggcagtgtgccattaaaaaaaatgtgaattatttaattgctcatttgtcgtcgctgcatcgaagtgaggaatgtgaagtacgagaaggatgcctgcagaatctgtgaaagagctgacagtgaaatggttttgcactcgtttttcacttacttttaagccagcctgcagactaacgcgaaaatattttagccctgtcacatagaagggcttgctgttcatctcaatggccaagttaatgagctttagtaatcgcagattttcgctgggatttgtagagtactgcaggatttgctcccaatgggtaaggtagtacattgtgctgagggaatccgtctgtatgaaaaaaataataataatatataccagaaatatatagtttggcatacagtaaaggccaagtcggaaccaatctgtcctaaagaaagcagctcaactgtcttagcaccaaaccaaatcgcatagatgtaattagccataggattctgttggaaatattaaaaatgtcattaaaacctatagttgtttttattttttacataactttcagagttgaaataatatttctattgttttttgcttaccgtataagccttaaaagaaagagcacataaaaggcccgcagcgaatgcaaacataataaaaacccgcacagtatactgagcctccagctgctggccaaactgatttagagccacattctttcggagagtttttgtaattaaaacctttagctgtttggccatatgcggacggtcccttgcaactaatatcttttcaatggccaactgcaagtccctcttgagcaacatataactaccatttaggtggacaattagttcacacaacaaattcgtctccccgaacatcatggtatctattacaatgccaacccatacgtttgtcaaaagcagtggcacaaatatgtacaagggatccgaatcgaacggaaagatcatagagtatagaaaatctttgctttggttaatgatggaaaaaacgggtgcgattagatacagagagataactgcaccgtacatggccgaaactaatctgttaattatcatctttccatccacttttcgaaacatttcgggttccttacggggatcaatataaatatttgcgtagaatatttctaaaaacttctgaagcttctcgaagtgcagtagaatgtgaagacttctaaattgagcctccacgaggattaaatacgttggcattcctgtgagaaaggcatccaaattccgattacttgcctcgaagcgcaagtacctcagctctgcatcgttgtgttgcataaaaaccaaggacatcgcaacagctagaaccttgtccagatatcggccccatttccctgtgctcggatccaatggccagaatatgtgatttaaccgaaaaaccgccaagggccaagccaactttactttctgaccatcagcgaaccggggcacgtaacgaaccattatggagtgaagactgttgaataatggctgctctcctccgacttatatatgcaccagggattagacgggagcacagacgatgacagtttctcaacttttaaatgaagtctcccatgcgtgcaatggctcaattaagttattatcctccagtttcaagccaaacggaaacatttgaaagtctcacattaatattgcctcatttacgatgtaatggcttgtcctcgtataattgagccaactttcaggaccaccactggggaattggagcttattgggagggttattaagcgcaggtaatgatgtaagcaacggtaaacaatccaattaaatgcataaacttatttaaaattattgttattcaaaactttttatgtacatatctgatttttgggtgcacttaataatgaaggtttcatttggggcatgcgatattcgcaggctatgcacgttaattctgtctttaacattacaacattactatgtaactaaattaatattttatgttatccattcaccgcagtaaagcaaattatattagtgttatatttacacatttacaaacataaacatgccaagtttgattcattattccacatttaatgagcaccaaaccatcattaaaagtgattgtttttattatttaaaaaagcattcagctgcatacagcacatagcaaaaattgggaaactgcaaaaacaagaataaatttccgtatcaattactaaccgttcacgaatttctgtcatttaaagcattgttaattcgtgacacatttttgcacgttttatacagccaacatttccgcagactcccttctgacaactgctggatgaaaaactcacttaacaaattcataaaaatcaattaattcaaacgcgcaactttcgcacgcttttccagctttcgcagctttcccggattactcccagcgatgccatttgtgccggtccgcctgcatccgctgcggaccgcactggagatagtggcaacagtttgtgtt

SEQ ID NO: 26357 - DNA, 1158 bp, DROSOPHILA
atggttcgttacgtgccccggttcgctgatggtcagaaagtaaagttggcttggcccttggcggtttttcggttaaatcacatattctggccattggatccgagcacagggaaatggggccgatatctggacaaggttctagctgttgcgatgtccttggtttttatgcaacacaacgatgcagagctgaggtacttgcgcttcgaggcaagtaatcggaatttggatgcctttctcacaggaatgccaacgtatttaatcctcgtggaggctcaatttagaagtcttcacattctactgcacttcgagaagcttcagaagtttttagaaatattctacgcaaatatttatattgatccccgtaaggaacccgaaatgtttcgaaaagtggatggaaagatgataattaacagattagtttcggccatgtacggtgcagttatctctctgtatctaatcgcacccgttttttccatcattaaccaaagcaaagattttctatactctatgatctttccgttcgattcggatcccttgtacatatttgtgccactgcttttgacaaacgtatgggttggcattgtaatagataccatgatgttcggggagacgaatttgttgtgtgaactaattgtccacctaaatggtagttatatgttgctcaagagggacttgcagttggccattgaaaagatattagttgcaagggaccgtccgcatatggccaaacagctaaaggttttaattacaaaaactctccgaaagaatgtggctctaaatcagtttggccagcagctggaggctcagtatactgtgcgggtttttattatgtttgcattcgctgcgggccttttatgtgctctttcttttaaggcttatacgacggattccctcagcacaatgtactaccttacccattgggagcaaatcctgcagtactctacaaatcccagcgaaaatctgcgattactaaagctcattaacttggccattgagatgaacagcaagcccttctatgtgacagggctaaaatattttcgcgttagtctgcaggctggcttaaaacgtcaaaagtttctgcggtctgccagctcatccacccttagcaccgctgatgtgttggcatttgcttttgcttttactcgctggctgctttaa

SEQ ID NO: 26358 - protein, 385 aa, DROSOPHILA
MVRYVPRFADGQKVKLAWPLAVFRLNHIFWPLDPSTGKWGRYLDKVLAVAMSLVFMQHNDAELRYLRFEASNRNLDAFLTGMPTYLILVEAQFRSLHILLHFEKLQKFLEIFYANIYIDPRKEPEMFRKVDGKMIINRLVSAMYGAVISLYLIAPVFSIINQSKDFLYSMIFPFDSDPLYIFVPLLLTNVWVGIVIDTMMFGETNLLCELIVHLNGSYMLLKRDLQLAIEKILVARDRPHMAKQLKVLITKTLRKNVALNQFGQQLEAQYTVRVFIMFAFAAGLLCALSFKAYTTDSLSTMYYLTHWEQILQYSTNPSENLRLLKLINLAIEMNSKPFYVTGLKYFRVSLQAGLKRQKFLRSASSSTLSTADVLAFAFAFTRWLL

SEQ ID NO: 26359 - DNA, 5661 bp, DROSOPHILA
cagtaaaaaaaaatgttagtggacttccgcgaggggatattagatttcatttcgttcgaaaaattcatttgacagacgacagttggttatatgtatgtattatatgagttatgcttttcacaattgtttataccaagaaaaaacaacaaagaaattgcaattgtagatttaacccttttgttttatgtaagacatgtataaaaaatagcaatgaacaattatatattttctgtatttttccgttctcgccacattcctctaacagatatggttcctgattcatgggatttgaaccgatttccgcacgtgcattataaatgcagccctgtctgtgtgtgactgtgtgtatctgtgtgtgcttctgtttgtgtgtgtggggggcaggttgaaaaacgaaaagtgaaccaatttcgaaatgaaataaacgtaaaatgggaaactaggttttttggttttatttgtttagaaaaagaattacaaataatacataagtttgtttttatttttgttttctcatttggttcgcttggttgttgttgttgttgctgtatcttttgcagttgtttctgttgccatacgaaaattaaatattaatttggactgttgcaaaaaacgtataataaccgattatctcatttcatttcttgtgtatacagttaggaatattatttagttgttttttttttgttgttttgtaaggaggaaatccacacgaggcaccgccagggcgaacaaattcggagcatctagagtttggccgtttcgatcgggaaaaacacacacaataacgaattatctgctagattaatttgattcaaaatccggaaaaatcatgccaaactcccaaatagtccgcattcgtttgaccctcacagcgatgctgtatttttctgtatttcttaagcagttgcagatcttaagctacatttgagtcggattggccggcatctgtccaagcatttgaccatctgtatactggattcgcttgcaaccggaacccggctaaaaactacccgtgacaatcgggaaaacggcctcaaatgccggcccatcggccccaaatgaactgtgaagcattctgccctcaattcgtatgttaatgtctcaaatgttcgcgctttttgcctgcctgtctgctgctctcgcctggattatcgtttcatttcaaattgttttgctttgctggttgcgttttataatatttgtttctctttgttgtttctggtttttgtttgtttgtattactgaataatatttgcatagtcaaaaaggaaacatttgcttagttgtttggttagttgtcgccgccctcctgtggctcagcttcgtcgccttgggtgtcggacgtccagagagtcaggttgtccctcaacagctgcatgatgagtgtcgagtccttgtaggagtcctcgttcagtgtgtccagctcggctatcgcatcatcgaacgcctggtggtggtgggtcaaaaaaggtactttttagtataaattctctaaggattcgaatcaaaggaaatgtttggcaaggcgaatgcaagttggtagaacaaaagcattttcaaagtggcgttaggttcattcatatttggcttcactaaacaactttatcaaactgaaatctaaggcaaatcgtgtaaatcaaaataaaagtaacaaaagagttttgttgaccttaacaaaataaaaacgaaaagtgtccaccagcaaaggccgcatgtaaattatttcacaggcaaagtttttggtatttctcatgcaattgaaatgggaaaataagtgggtggggatcgatatacattgcgcttcaaaaagtttgaaatttcagtaaaaagaaaaatagttgcaaaattttttttcataggtttacatttttaaaggcactacaaggaatttgagctcaagaaattagtttatgttttcttctcaaacttttaaaacgccttggtagtaaagtatatctcttcgtcgggttaaagctcatttagttggttaattagtcgctgggtatcttactcagtttagtcacagaacaacaagaatttctatcattgggtaattagtattcgtaagcaaattattaagtttacacaaaagaaacatgtataagttgaactgaacctgtttagctaagtgacaagccctcgctggtgaattgataatttcgtaatagaagacggaaaagttgagagcaagacctaatctgattggatgtgtgggctgcattttggtttttgcaatatcgaacgcctcctgataggcttttttcgagtcctcaacgacggcttaatgatttacacatgattcagtaatggaaaaaagtaagaaacaaaaccaaatgttaggaaaaccatttgaaagtaaacaaaaaaattcttaaatgtcgatggatagtgattttgtgtgccttttgctcgcttgccatacatttcgattaatcgagccaagtctcagtgcgttattaacctgtttagccaattggcaagctttgtctggtgagttcaaaatctcatagtagaagactgagaagttaagggccagacccaaacggatgggatgtgttggctgcattttggtttttgcaatatcgaacgcctcctgataggcatttttcgagtcatcaacgacggcttaacgatttacacatgatttagttatgtaaaaaagtaagaaataaaaaccaaaagttaggaaaaccatttgagagtaaacaaaaaagttctttaatatcgacggattgggattttgtgtgcctttcttgctcgcttgccatacatttcgattaatcgagccaagtctcagtgtgttattaacctgtttagccaattggcaagctttgtctggtgagttcaaaatctcatagtagaagactgagaagttaagggccagacccaaacggatgggatgtgttggctgcattttacccttgctaatgtcaaatgcatcctggtaagcggtttgcgagtcatcgacaacggctgtgttttgcaagagtatttgtagtttggtttgtaaagattttattattgtacaattcgggcgtacaattcggggatagggtgtttttgttggtgtgcttgacaagatacttactgttgcgtgcatctcctgtggcaacctcggctaaatacctgtagtaatcacccttcatcttcaggtaaaacaccttgctctcgggattgctggcttttggaataaggtatttgtccagaagtccctgtaagcaaaggaaacaagtactccaattaatttcatatcaatttcgaaaaccaaacgcaacaattaaccaagtaagccgccaggcttattgtaaaccttgttctaaatcattttccattttaaaatccatcaagcaccagttaagtttaatccaatataaaagccccaatcaaagaaaagcgaatggggaaacccccgagttcaaccctggccatggtcattttctgatccgtgaacggcaatataaatttcatatacacacaagcgaaaacctctgtgtgtgggggaaaatggaacatgttcattttaaaaatagatttattgattgtaacaaatttttatatttcactagagcaagaaggaagaccagaaaacaggcccaccctctggaaaacccactgaaccatccaaccaacaccctcggacagctgagcttgccaagggcggaggtctttatacatatatatatatatatatatatttaggcggttgacaggtttgccatcttcatcaccgtcaatgcagatgaacaaccaagtgagttgtgggcatgaaaataattaaatggaccaagtacaaccccataaatccttcagaaagagacttgcgcagacttgcggaccaccacttaccaaaacttcgtagcagatttccctcagctccttctccacacgctctctgtactcacgggcgagctgctgttttctagcggatgcttcggttttctgctcaatggaggagatgacacgccacgatgacctggtttggacatgttaaacacacccggagaaggggcagaaacatacagcttagcacttgaactccaatctatagtgcgacattaatcaatctgtgattgattgactcacctgcgggcaccgaccacatttttgtaggcaacggagagcagatttctttcctcatttgagagctcaacgccagtctctgtgacggacttcatggcctgggccatatcatcgtaactgcatagaaaatgttccattagtgattgaaaatatttagtcatgtagatcacagaaatatatgcattctttaaattttgaagaacaacttaaatgatacatatattgttcattagaagatgattttaaatggatttaataaaacagaaaacaatgttaaatcttagagttcttataacttccaagaatgtcttttttacgtattaataaatattatgtgcaactataacttttgccaaatgagtttgtagggttcttttgaagttctgtgaggttgatgaactttattataagatgaaccacttaccgttctgactgctcggccagtttagccttctggaccagctcttccttatcgactgtcgacattttgtttgatttttttttcggttacttcacaaaactaataaaatacgccacacagttcgatatgcccctcaaaagttgctaacaatggctttctgcaataaattagaacgtaaacaggagcattagtgtgtttttcagtggaggagaaatgtaggtgaggccactttaacccgttatctcgttctcgcctaacggttctcggctgtgagctcttaacaaacacctgactgactaacagagttctgttgcggattacttgtctgttatatttagctaaaattccacagcaaccagcagttgcacaacactgcgaatttttgtgtggcactgtatgttctgtggagtgaactcaactgccatatacgatcaccccttataggggataatagacattataagatattccatgtttttggttcgatagatgcttatgcttttaaattaattgaaggccgcgattctatattttatattcgttagctctaaaagtaatttaaaagatgttttgcttgactacaaagttataaaatgatttttccttataaattaaagaacttgagtgactaataatattatctgagtcactcagacaagtccaatatacccgcaatgcacttgcgcgagtattcctaggaaggtcgtacgaatttagtttgttgtcatgcttccgctggacgaaagtgttggattcaaagctgcgatgactcatgcattcgcagcaggtctttattgactaatcgctgacggaatggctaatttaaatgggaaaaagccagcgacaaaaacaatgtggcactggacatggccgcacgtgtggcaactatgcaactattcgaagcccagtttatgggtttgtggaaggccgaaggtggaaagagagtatctggcagatagatgtgaaaaaatacaagttcgacaacagcgataaaaataaaccatgaataaaaagagagagggagaaatggagcacaagtcggcccgccttaatgcgtttttatatatttttgtgtgtgtgccaaagatagatatttatgtacgtgcatagagaccgtctgtttgtgttctccgcacagtgacgcactcaattacttg

SEQ ID NO: 26360 - DNA, 1172 bp, DROSOPHILA
aaagccattgttagcaacttttgaggggcatatcgaactgtgtggcgtattttattagttttgtgaagtaaccgaaaaaaaaatcaaacaaaatgtcgacagtcgataaggaagagctggtccagaaggctaaactggccgagcagtcagaacgttacgatgatatggcccaggccatgaagtccgtcacagagactggcgttgagctctcaaatgaggaaagaaatctgctctccgttgcctacaaaaatgtggtcggtgcccgcaggtcatcgtggcgtgtcatctcctccattgagcagaaaaccgaagcatccgctagaaaacagcagctcgcccgtgagtacagagagcgtgtggagaaggagctgagggaaatctgctacgaagttttgggacttctggacaaataccttattccaaaagccagcaatcccgagagcaaggtgttttacctgaagatgaagggtgattactacaggtatttagccgaggttgccacaggagatgcacgcaacaccgtcgttgatgactcgaaaaatgcctatcaggaggcgttcgatattgcaaaaaccaaaatgcagccaacacatcccatccgtttgggtctggcccttaacttctcagtcttctactatgagattttgaactcaccagacaaagcttgccaattggctaaacaggttaataacgcactgagacttggctcgattaatcgaaatgcgttcgatgatgcgatagccgagctggacacactgaacgaggactcctacaaggactcgacactcatcatgcagctgttgagggacaacctgactctctggacgtccgacacccaaggcgacgaagctgagccacaggagggcggcgacaactaaccaaacaactaagcaaatgtttcctttttgactatgcaaatattattcagtaatacaaacaaacaaaaaccagaaacaacaaagagaaacaaatattataaaacgcaaccagcaaagcaaaacaatttgaaatgaaacgataatccaggcgagagcagcagacaggcaggcaaaaagcgcgaacatttgagacattaacatacgaattgagggcagaatgcttcacagttcatttggggccgatgggccggcatttgaggccgttttcccgattgtcacgggtagtttttagcc

SEQ ID NO: 26361 - protein, 261 aa, DROSOPHILA
MSTVDKEELVQKAKLAEQSERYDDMAQAMKSVTETGVELSNEERNLLSVAYKNVVGARRSSWRVISSIEQKTEASARKQQLAREYRERVEKELREICYEVLGLLDKYLIPKASNPESKVFYLKMKGDYYRYLAEVATGDARNTVVDDSKNAYQEAFDIAKTKMQPTHPIRLGLALNFSVFYYEILNSPDKACQLAKQVNNALRLGSINRNAFDDAIAELDTLNEDSYKDSTLIMQLLRDNLTLWTSDTQGDEAEPQEGGDN

SEQ ID NO: 26362 - DNA, 3198 bp, DROSOPHILA
ttcagtcttctccgttacttcaatgcgtgcgtacgtctacatacgatacttcattcatacaaataaaatacaaacggtttgtgagagaggaaaagaattctagctatagattctacaaatcttcgcgtgcttcaagtggttcttgtgaaaagtttaatatgcaaatcattgccaaaaagcggaaaataattgtacatacaaacaactaatttacgtggtgtttttgtgcccattaattggactttttgttgtgtgtgtgtagattcgaatctaacggttcttgtgttcaaaaatatttggaaaccaaaaggaatactgcggatctgaaaaagcaaactacagatctaaaaaaaaggaaatttaaaagtaagcaaatcaatttgactaaacaaactaaatttgttaagagtccatcactcaaaagtctaccaaaaaaacgcagactaaataaacaaacagtctgcactttgtcaaagatgtgtctttctccaaaattacttgaggagtcgttggcctttctccccaaaaataaaggaaattaaaaccgaagaattcccatttccagtcgcaatcggtccatgaggagtttatttttgttccaggcgcaaaattttcggtttctcttggaatctttatttaggttatatttagtcactttcccggggctttggacaggctataaagaacgacttttggatcttctttaacaaatcaattaatatataaacaatattttgattctttcccttctaaaagcaaaaatagttgagaaaccatcagcaaattatcttttaaattggcaaaggaaatatggtgaatatgatttaacgtcaagattcatgtaaaatcagccaactggcttggctaattgaattttaattgaaacgtcaaggttccaggaacgcccctaaaattaagcaatcaaggaaatcaattagggcagccctatataaagtagctccaaaatcggactttaataatccgagcttggacttgtgcaatggactacgatcgaattcgaccggtgcgatttttgacgggagtgctgaaatggtggcgtctctggccgaggaaggaatcggtgtccacaccggactggactaactggcaggcatatgccttgcacgttccatttacattcttgtttgtgttgcttttgtggttggaggcaatcaagagcagggatatacagcataccgccgatgtccttttgatttgcctaaccaccactgccttgggaggtaaagttatcaatatctggaagtatgcccatgtggcccaaggcattttgtccgagtggagcacgtgggatcttttcgagctgaggagcaaacaggaagtggatatgtggcgattcgagcatcgacgtttcaatcgtgtttttatgttttactgtttgtgcagtgctggtgtaatcccatttattgtgattcaaccgttgtttgatatcccaaatcgattgcccttctggatgtggacaccattcgattggcagcagcctgttctcttttggtatgcattcatctatcaggccacaaccattcctattgcctgtgcttgcaacgtaaccatggacgctgttaattggtacttgatgctgcatctgtccttgtgtttgcgtatgttgggccagcgattgagtaagcttcagcatgatgacaaggatctgagggagaagttcctggaactgatccatctgcaccagcgactcaagcaacaggccttgagcattgaaatctttatttcgaagagcacgttcacccaaattctggtcagttcccttatcatttgcttcaccatttacagcatgcagatggtgagagtgtgaagttaatggtttccaatcggctattactctgttaattcctatttagagtcccgtcttgcaggacttgccaggatttgccgccatgatgcagtacctagtggccatgatcatgcaggtcatgctgcccaccatatatggtaacgccgtcatcgattctgcaaatatgttgaccgattccatgtacaattcggattggccggatatgaattgccgaatgcgtcgcctagttttaatgtttatggtgtacttaaatcgaccggtgaccttaaaagccggtggcttttttcatattggtttacctctgtttaccaaggttgtattttctactctggaaaatccttgtataagttatctttatttcagaccatgaatcaagcatacagtttgctggccttgctgctcaacatgaaccaatagaaacgaagttgtgtcctataaaatacgttgctttctattttggattagctcaaagatttcgcagctcgtttggagatttattgccgcgcgtcttgttatgcaaagatctaaaaatatattgtagcattgcacgaaatacacgctttcctatatatactatatgttgagtgcacatgaaatgtagaattgcaagtgacgaaaataaaattcgaatttggacgaagacaaaaattttgcgggaaaaagctttagctctggcaatatgtaattttccaaataaacaaagggaaatcaagaaaattacctacagtcccttctattggtataggaacgatttatctttatgctaagagtttagatacaaaaataatattaaaataaaattaatattaaaatgtaaagaatttaaattttataagcactttgctttggaataatggaattcttataatatgtatgcatttcagttcacttatctacttaaatcgtgtttatataagtctgtagcgcatcgttttgtttgtcgacgtaaaagtctgaagtaaatattgaaaatgattgaaaacaaagaaaattcacaatctgccgggatcatgaccctctagtggggaattgagaagcgaatgggagataagagacaacctagtgatgataattcattgaattactttcaaatcatcaactctgagctatatttaattgtatttaatgtggttaaatatgctttaatcatgagcgagggtgtgcagttcgatccaaaaataagctcaaactccatacacactcccctttctctttcttttttttttacgttttgggtggggaagattcttattaagatttatgtatctggctctgtttccgtttgtgccaccctcaagggatcgacacactcgacttgggatgagccagaataaagatcaaaaatgtaaaaaaaaaaagaaaaacgcaca

SEQ ID NO: 26363 - DNA, 1125 bp, DROSOPHILA
atggactacgatcgaattcgaccggtgcgatttttgacgggagtgctgaaatggtggcgtctctggccgaggaaggaatcggtgtccacaccggactggactaactggcaggcatatgccttgcacgttccatttacattcttgtttgtgttgcttttgtggttggaggcaatcaagagcagggatatacagcataccgccgatgtccttttgatttgcctaaccaccactgccttgggaggtaaagttatcaatatctggaagtatgcccatgtggcccaaggcattttgtccgagtggagcacgtgggatcttttcgagctgaggagcaaacaggaagtggatatgtggcgattcgagcatcgacgtttcaatcgtgtttttatgttttactgtttgtgcagtgctggtgtaatcccatttattgtgattcaaccgttgtttgatatcccaaatcgattgcccttctggatgtggacaccattcgattggcagcagcctgttctcttttggtatgcattcatctatcaggccacaaccattcctattgcctgtgcttgcaacgtaaccatggacgctgttaattggtacttgatgctgcatctgtccttgtgtttgcgtatgttgggccagcgattgagtaagcttcagcatgatgacaaggatctgagggagaagttcctggaactgatccatctgcaccagcgactcaagcaacaggccttgagcattgaaatctttatttcgaagagcacgttcacccaaattctggtcagttcccttatcatttgcttcaccatttacagcatgcagatggacttgccaggatttgccgccatgatgcagtacctagtggccatgatcatgcaggtcatgctgcccaccatatatggtaacgccgtcatcgattctgcaaatatgttgaccgattccatgtacaattcggattggccggatatgaattgccgaatgcgtcgcctagttttaatgtttatggtgtacttaaatcgaccggtgaccttaaaagccggtggcttttttcatattggtttacctctgtttaccaaggttgtattttctactctggaaaatccttgtataagttatctttatttcagaccatga

SEQ ID NO: 26364 - protein, 374 aa, DROSOPHILA
MDYDRIRPVRFLTGVLKWWRLWPRKESVSTPDWTNWQAYALHVPFTFLFVLLLWLEAIKSRDIQHTADVLLICLTTTALGGKVINIWKYAHVAQGILSEWSTWDLFELRSKQEVDMWRFEHRRFNRVFMFYCLCSAGVIPFIVIQPLFDIPNRLPFWMWTPFDWQQPVLFWYAFIYQATTIPIACACNVTMDAVNWYLMLHLSLCLRMLGQRLSKLQHDDKDLREKFLELIHLHQRLKQQALSIEIFISKSTFTQILVSSLIICFTIYSMQMDLPGFAAMMQYLVAMIMQVMLPTIYGNAVIDSANMLTDSMYNSDWPDMNCRMRRLVLMFMVYLNRPVTLKAGGFFHIGLPLFTKVVFSTLENPCISYLYFRP

SEQ ID NO: 26365 - DNA, 4485 bp, DROSOPHILA
tgttttccaaggaaccaccattgttacaaataacgtaatatttttcacttttcacttttatcttgcattcttttaaaattttcactcacaaattgggtggatctgcactcacctgatcctttttccaggactcaaatcgtgcttccattttctcaccccgcttggttctaaccaggaagtatatacgtttcacatccgtcgcccttaatagcttttctacgaccactgtaatatttagggcaaaacaaaaatattttataaatgttcttctattggataataatcgaccgcgcacctttgccgagtaatcctgtgcctccggttataaacaccgttttgtccttataaaaacttataatttcactcgtcattttgcactgcggtagtaaaattcacttggcgggttcacttcatcaaatggacattttttcttcatctatatttatttataccaatttaaaccaacaccaatcacaagaaaatgcaacgatatgcaagcctaactagaataatttgcactttgtgaataacttaaaaatcgtaatacagaaaacctcaataattgcaaccaagaaaatcaagaatatagctaagtaggacatgcaagaatgtttgtaggaatacattattttataaaaaaaaaaaccgaataattatttggatggggtaaaactaggaatagattttatttaaaaacagtgtgctattaagacctagtgactcctgtacatgaaaataatactattcatcattccatacatgtcacatttttgtacatttacatagggctctacgtttgcattctatcaaatcaattgaaaggtacgaaagtagcgtaaatgcagacaatttcggaaaatgcagtttgaaagcatctattttatatagaatacaatattcaaaattaacttatcacactatttacagtgaacaaaagtatatgatatctttatatcatttctggtatacattaaaaacaaatcctgcacaaaaaggaagatattaccataaattgattaaatttaataatgtcaacttcttaaatgcataacattcaacaaaacagattattatttcgatcgtttataagattagttcctttgaacaagtttaatccaaaagccgcctttgggtgacaactgaaatccggaactaatgagctctagtggaatgcaggatttcttggcaggggcaaagcggtagtccttcaaaagatagtagataacagcctttgcttccttgttgcattcccgatcgaaggcaattgccggcggccactttcgcagaacctcgctgacgacctgatccagatacttcagttccttgccctccaggtcttggtccacttgctgtacctcctcgtatagcctctgctgcacatcctggttctccattagctcgtgagcggtgaagcacatcagcaccgccgaagtctcgaagccagcaaagaagaacacgaaacactgggcgacaatgtcgcgatcgctccactcgcgaacggcagatgccttggtcttctccgtctggatgataccacgagcctccatcagcatgtttatcatgtcgggacgtacaatattgtgctcctgtcggtatttcatagcatcgagcaccagacgcacgaaatactgagtgcttttcctatcgaaaatctcgaccttaaggatcttcaaggattattaacattaagtttaaaagaatatattcttttgatatgtgtgtacgctgtgccaaccttattaagactcttcaatgcgaataacaagatgaacttcatgttctgcaggaatgtaaatgtggtcaacttttttcccatctgatagaaggtattttcgcgatccttgaacgagttcacttgcagtccaaaggctgtcgaggcgatcacatcgttggtgaatcgtgtgcagtagtccttcatgtccagttcattctcctgaacccttgaatcatcctgcttaagacagtccaccggcctccttggccacctggttcatcagctggaacatctgacgcattttgctgcctgtaaatgccggactcagagtgcttcgcatatccttccaccgagcatctcgcatggagaacagcgagctgctgaaaagattactcatgtcgtgtggatcatcatcgctgctggtgtcaaactcattgcgatgattgataaagtgatcgaagtcctttatggttatctgcttgataagatctgggtcgcggaccattaaaagtggttgtcgctgcgcgaagataccaaaaaatctaaaaaaaaaattaatgttaatgaccgataagctttttgtgagtcacacactgataaataaaatcagaaattattaatcgtgctctcaacaattttagaaaacgataacagaaatttgagtttatggatggctagcgttgttcattacctatccgacgaattttcaattaacccatctcgatttctttttgaaaaactataaatttatagtggggtaaatttttttttggtatattaataaattatatgcacacgaaatccaattgaaaattctgagtacacaaagagtgcatctttataaaggaacaaaaaggaaacagtcacaaatagggttgccccaatatgaaattaattaataatttagataaccttatcgttattacgctttatcgtctatttttcctatctaaatatggacacagtgccgtccgcgacaaacaacatttaaagctgtcgtataatcgataagattaaactaatagaaccaaccaaacatttccccaattatcttggcagttacacattgctttatataaaagactttacaaaatataatagagtatttctgaatttctataattgttcattgtttgttattcaaaacgtagtcgaacgcagcagcacccactaaatgtgtgtatggatagatcactgattgcctgaccttgacatacgattttatataggcttgtacgcaatgctggaggccagtagatacacacttcttccaatcgagtttcaagtgcaagtgcaagtaacccggatgcttattaggtaattaacttattaaatccggatcaataaatttaactaacttgccacttccgcctttggtgtagagatcacagactatgtccagcatggctctcttccgtaggaacatgccggccatgttgcccaagtagagcactggcttttcataggcgatgcccctatccttgaagaaatcattgttggcggacgcccagcggtagaacaaggcggtagcgatcgcaaatagggccaagaactcccacagcatgttgaacgagcgcctagtctgacgatccaagcgtccaaaatataactaacaaacaatcggaagcatttcgttgtcgcaacgcagagctttctatcaaagcttcttgctctgcttttagcatttgataaaatacttgttgtcaataatacacacatatgtatgtgtgttcggtttaatcaagcatgtacaaatttctgagtgcaaacgatttagaataccactcatcatttcatcatcacggcgtgtaggggaaaaggttgacgactctgagtatcgagacagctttggagccagcttacattcaagtgccggcagctacgacgatagagcgttctaaaaaaaaggaagccagtgaattaagtttacttttagattaagtgatcatctagacattacctaagcttctctaggtccaatgcctcgttcgtattcgcataaaagaccagatcagctttttgtggttctgttgtacagcatcctccatgctgtgaaaactgctgcatcagtttacttgaatccttctccatggcaaagtgtgccaccaatccttcgaacaactggggtttcgagctagtggattcaatattgccttcatcctcctttggttcctttttcacaactgatttaaactccttgctgggcttaaaaaaatcctttaatcccttttgcgaaggggacaagcttcgaatcgctttggactccttgcgtttgctgagcacaggagctccgtcttcgtcatcagaaccagtattggaccttttcaatttcttactaccatttgattgattgccattcagttttttctccttttcaggagttgttttgttattcattgctgtctcatctttactacaattggccagaagtaaatcaacatttacattcgattttgaggcctcgaaaagatcttctagatgggccagatcattggcctctttggctgatttatcactgcgacgacgagtaatcctgggaaatcgtactgagattccagacgcggtatgggcatcggacttggtgaactctgcgccagtaatctcccatactggcattttcatcggatccttggccagtacatctggtacaagggacttactgcataacagccaactgggaattgcgttggcatcagcacgttcggttagtttgattagtgatttatgtacctctgcgttggtagcatcatccaagccagagtgcactttgg

SEQ ID NO: 26366 - DNA, 1549 bp, DROSOPHILA
cgtttgcactcagaaatttgtacatgcttgattaaaccgaacacacatacatatgtgtgtattattgacaacaagtattttatcaaatgctaaaagcagagcaagaagctttgatagaaagctctgcgttgcgacaacgaaatgcttccgattgtttgttagttatattttggacgcttggatcgtcagactaggcgctcgttcaacatgctgtgggagttcttggccctatttgcgatcgctaccgccttgttctaccgctgggcgtccgccaacaatgatttcttcaaggataggggcatcgcctatgaaaagccagtgctctacttgggcaacatggccggcatgttcctacggaagagagccatgctggacatagtctgtgatctctacaccaaaggcggaagtggcaaattttttggtatcttcgcgcagcgacaaccacttttaatggtccgcgacccagatcttatcaagcagataaccataaaggacttcgatcactttatcaatcatcgcaatgagtttgacaccagcagcgatgatgatccacacgacatgagtaatcttttcagcagctcgctgttctccatgcgagatgctcggtggaaggatatgcgaagcactctgagtccggcatttacaggcagcaaaatgcgtcagatgttccagctgatgaaccaggagaatgaactggacatgaaggactactgcacacgattcaccaacgatgtgatcgcctcgacagcctttggactgcaagtgaactcgttcaaggatcgcgaaaataccttctatcagatgggaaaaaagttgaccacatttacattcctgcagaacatgaagttcatcttgttattcgcattgaagagtcttaataagatccttaaggtcgagattttcgataggaaaagcactcagtatttcgtgcgtctggtgctcgatgctatgaaataccgacaggagcacaatattgtacgtcccgacatgataaacatgctgatggaggctcgtggtatcatccagacggagaagaccaaggcatctgccgttcgcgagtggagcgatcgcgacattgtcgcccagtgtttcgtgttcttctttgctggcttcgagacttcggcggtgctgatgtgcttcaccgctcacgagctaatggagaaccaggatgtgcagcagaggctatacgaggaggtacagcaagtggaccaagacctggagggcaaggaactgaagtatctggatcaggtcgtcagcgaggttctgcgaaagtggccgccggcaattgccttcgatcgggaatgcaacaaggaagcaaaggctgttatctactatcttttgaaggactaccgctttgcccctgccaagaaatcctgcattccactagagctcattagttccggatttcagttgtcacccaaaggcggcttttggattaaacttgttcaaaggaactaatcttataaacgatcgaaataataatctgttttgttgaatgttatgcatttaagaagttgacattattaaatttaatcaatttatggtaata

SEQ ID NO: 26367 - protein, 416 aa, DROSOPHILA
MLWEFLALFAIATALFYRWASANNDFFKDRGIAYEKPVLYLGNMAGMFLRKRAMLDIVCDLYTKGGSGKFFGIFAQRQPLLMVRDPDLIKQITIKDFDHFINHRNEFDTSSDDDPHDMSNLFSSSLFSMRDARWKDMRSTLSPAFTGSKMRQMFQLMNQENELDMKDYCTRFTNDVIASTAFGLQVNSFKDRENTFYQMGKKLTTFTFLQNMKFILLFALKSLNKILKVEIFDRKSTQYFVRLVLDAMKYRQEHNIVRPDMINMLMEARGIIQTEKTKASAVREWSDRDIVAQCFVFFFAGFETSAVLMCFTAHELMENQDVQQRLYEEVQQVDQDLEGKELKYLDQVVSEVLRKWPPAIAFDRECNKEAKAVIYYLLKDYRFAPAKKSCIPLELISSGFQLSPKGGFWIKLVQRN

SEQ ID NO: 26368 - DNA, 3482 bp, DROSOPHILA
tttatcctaagaaaatggtgtagattagtttaatctaggaagcggaaataagaattcctccaagtctccttttaaatatttctagtagagcatttcaattttggaaaggggctttttccaagcctacgcagatcttaagtcttacgaaagcctccatcatcatcgcatccatctgttattgctttgatgggactatgcaaatctcggcttgcgagatagcctggcatttcatttcaaataattttagggggaggccagcagaatcccaggcaaagcaaacaattttccaaaagaaataggcaaaattcaaaattaccggaggatggcgcaaagggaacgcaaggcaggagttgtaaagagggacaaggcagataagtggaaccatgtagagacggctcgatactttagggatttgcaggaaaatgaggtgcgaacgatgcattatttggggctggcctacgtggttttgtctcgtcgcccaaatttgcaattgaaagttccactgtccactcaaaactatgaagatggagccattgtgggagcaggggagcgaggaggctatgccctccagttgctcttcacctgtgctgcgaactatccactcgcaaggccgctggtggagatcgtggagaagcgcaatgtgagcgacgcctttgagcaggttctccgcaaagagattgacctgattttggaggaacatcttggcctccagatgattgtgccggtggtgacccggctacaaatcacgctgaataccgagatgaaaaggcagcgcttttaaataaggtcacgcataagttgttttttgccatattatgcgtaacagttatttgtggtcaattttaagtacaataaaattaagcattttccataaatatgtactatgattactgcccatcttcctttttctgtgttataatcgcataatatatattttaaaaatgaataatctcaagtaattgctcggcttttcggccttggtctttgccccagttgtttacaacttggcgttgacgtgaatggccagcactccgtcgtcctcggagctgccaatgtagatggaagcccgtccgtcggatccgacggtgacggtcttgcccgtgcaggaggagccgctcttggagccggaaatgacgtcgcagtaggtgccggcgggcaggcccgtctgcagggagctgttcaggtcgtagttgtcgttgttgaaggccacgaagccgcggctacctcggctgaaggagatctgattgctgccgctgtcccaccagttctggatctcgtccaagcccacggcgttccggaaggccaccatgttgtagatctggcgccagcggtgctcgcacacccagccgccgctgcaggagttgtcgctattgaagatgggcgaggcgatgttgtggccgtcggtggtgggcgggccctgatcggtgtccgtgaaggagaaggaggacatcacgcggggagtgccgaatgggtgcgccagcatgaaggcggaggccatcttgtactgcttgggcaccttgtaggtcagcacgtcggcgcctcctgctccatgtccgcgctggttgtcgtggttgtcgacgaataccagggagcggtcggaggcagcgaagccccaggcggtgccccagttggtcaggtactgcagctggtccttgccgcggaagaccttgccgatggagtcggagtggcggaactcggtgatggcgcccagtccggtgtactcggacttgctgatggcctcgccgcccatgtcgatgacctcctggacgatgtacgccttggatcccgaggcgaagccgtggtcggtgttcaggttcttgaggcggccatagatgacggccaggtcggcgggccacatgtgcttggcggcgtccacgcggaatccggccacgccgagatcaatcagatggtccaggaactcgaccaccttgtcctgcacgtaggagttgccctggttaaggtcgcgcagaccgaccagctcgcagttgcgcacctcgttggcgtcgttgtagttgctgatggcgcaggtcgggttgaagtccagcgaggagtagggcactccgggatagctcttgctgctggggctggcggtgctgccgccagtgccgtaggtgcctccgtcggcggccatgtggttgaagaccacgtccacgtaggtgcgcactccgacggcgttgcagcgcttgaccatgctggcgaactgctcctcgtttccggagcgggtctccagcttgtaggagatgggttggtaacgttcccaccaggggcggctgtccttgacggcgttctcgttcacaggggagacctgaacaccggcgtagccattgggtcccaggaagttctcgcactcggcagcgatgtcgtcccacttccactcgaagaggtggaccattccactacgaccggatgcgtagttggtgtcgaattgggcattggccaccgccaggagggagaggcacactatgctcttggccagaaacatgatgattttaggtggaagctaaatttcactctgattaaaagtgtgtcgatgcagctgcttatataggatgaccaaacctattcggctttgccgggagtgatttgcggattgatcttatcgcccctaagtcgctacgttctcttgtatgtattgagttgattaaatcgcgattaaggcgtgttatcttagctcggcgcagacctattgactggtggctaattataattagttcgacataagtaaacatcaagacaatgcattcctcagatattggttgatattggagatttattggccacttgacttgcacgccactagaagcgtgatcaatctgaactttggcctacaaggagtaatttatattgttctaattttcacaatactgcaagttaatgtggtgtttataaagtatgtaaaaattaattcaatatatcgatattaccatcagtaattggctcatgtatcacctctagaattgcaatttttacgcaaagagttttcaattacacgcttgaaattgtgggcatcttagcttaacaaattaacagtagtattaagtaatattataaataatgtacgtgctactgctaatccttttaggaatctcacgctacagggctcagaaaaattcacaattgccagatgaactttacgcagccatcgtgaacagcttttcgaacaggaacattatgttctcgacggagatgatacgatccagcatgctgttcatctatgtgggcgtggaggaagatgaatccgagcaaattcgaaaggctatgcactatcgaggaacccatctatctgaatacaagccgaaaacacagaaaatctttgccatgagtgtgaagaaggcacctgtggccaagagtcttacccgattctatgtacgtcagaatatgaaaatgtccacggaatatagagtttttatgcggcatacagagggaagagctcgtaatatcgcctttgctcgtgaacagctagacgaggttaatacatttta

SEQ ID NO: 26369 - DNA, 1482 bp, DROSOPHILA
atgtttctggccaagagcatagtgtgcctctccctcctggcggtggccaatgcccaattcgacaccaactacgcatccggtcgtagtggaatggtccacctcttcgagtggaagtgggacgacatcgctgccgagtgcgagaacttcctgggacccaatggctacgccggtgttcaggtctcccctgtgaacgagaacgccgtcaaggacagccgcccctggtgggaacgttaccaacccatctcctacaagctggagacccgctccggaaacgaggagcagttcgccagcatggtcaagcgctgcaacgccgtcggagtgcgcacctacgtggacgtggtcttcaaccacatggccgccgacggaggcacctacggcactggcggcagcaccgccagccccagcagcaagagctatcccggagtgccctactcctcgctggacttcaacccgacctgcgccatcagcaactacaacgacgccaacgaggtgcgcaactgcgagctggtcggtctgcgcgaccttaaccagggcaactcctacgtgcaggacaaggtggtcgagttcctggaccatctgattgatctcggcgtggccggattccgcgtggacgccgccaagcacatgtggcccgccgacctggccgtcatctatggccgcctcaagaacctgaacaccgaccacggcttcgcctcgggatccaaggcgtacatcgtccaggaggtcatcgacatgggcggcgaggccatcagcaagtccgagtacaccggactgggcgccatcaccgagttccgccactccgactccatcggcaaggtcttccgcggcaaggaccagctgcagtacctgaccaactggggcaccgcctggggcttcgctgcctccgaccgctccctggtattcgtcgacaaccacgacaaccagcgcggacatggagcaggaggcgccgacgtgctgacctacaaggtgcccaagcagtacaagatggcctccgccttcatgctggcgcacccattcggcactccccgcgtgatgtcctccttctccttcacggacaccgatcagggcccgcccaccaccgacggccacaacatcgcctcgcccatcttcaatagcgacaactcctgcagcggcggctgggtgtgcgagcaccgctggcgccagatctacaacatggtggccttccggaacgccgtgggcttggacgagatccagaactggtgggacagcggcagcaatcagatctccttcagccgaggtagccgcggcttcgtggccttcaacaacgacaactacgacctgaacagctccctgcagacgggcctgcccgccggcacctactgcgacgtcatttccggctccaagagcggctcctcctgcacgggcaagaccgtcaccgtcggatccgacggacgggcttccatctacattggcagctccgaggacgacggagtgctggccattcacgtcaacgccaagttg

SEQ ID NO: 26370 - protein, 494 aa, DROSOPHILA
MFLAKSIVCLSLLAVANAQFDTNYASGRSGMVHLFEWKWDDIAAECENFLGPNGYAGVQVSPVNENAVKDSRPWWERYQPISYKLETRSGNEEQFASMVKRCNAVGVRTYVDVVFNHMAADGGTYGTGGSTASPSSKSYPGVPYSSLDFNPTCAISNYNDANEVRNCELVGLRDLNQGNSYVQDKVVEFLDHLIDLGVAGFRVDAAKHMWPADLAVIYGRLKNLNTDHGFASGSKAYIVQEVIDMGGEAISKSEYTGLGAITEFRHSDSIGKVFRGKDQLQYLTNWGTAWGFAASDRSLVFVDNHDNQRGHGAGGADVLTYKVPKQYKMASAFMLAHPFGTPRVMSSFSFTDTDQGPPTTDGHNIASPIFNSDNSCSGGWVCEHRWRQIYNMVAFRNAVGLDEIQNWWDSGSNQISFSRGSRGFVAFNNDNYDLNSSLQTGLPAGTYCDVISGSKSGSSCTGKTVTVGSDGRASIYIGSSEDDGVLAIHVNAKL

SEQ ID NO: 26371 - DNA, 2369 bp, DROSOPHILA
ctttaagaccatccccacgtaaataaaaatgaaacccaatcccattagattaaacgtgtatattattacgtgaatattaatattaattaattagaacaaataacgaacaaaactacaacttttcttttgacctattaaacctattctcaaaccaatctacaagttatgaaatggtccacaccgattaatctgacaatttaagctatgttaaaaatacagaaaccccattaaacagatcctgttctgctacaacgagtactaaaagagtcggaaaagggatcgcgaaccacaaaaatattgtacacaacagaaattaatgatatgatgatgtgaaattgtatctaatattccaaaagtgttggcgagaccggcttggtggctttattgcgttagaatgggcgttacaaaaaattgttatagaaatttaaatgattaattaaattttgaaaaaaatatgcaacactttttcaaaaatgtgggcgtggcagctttgggcggctctatggcgttagagtgggcgtgtcaaaaagtttgttggcacatcgatagaaaatttagaaaactgataaaattataaaaaaatattcgaaaaattattcaaaagtgtggacgtgacagttttgtgcggtttgtgggctttaaagtattgatcctgatcaaaaatatatatgctttatatagtcgggaacacttccttctgtctgttacatacttttcaacgaatctggttatactagattagacactttacaagtaacggatatataaatggtttggtttaaagcctaaaaaatatttttttgcagttaatacattattgtttaaccttaagagattatatcgtttttctaattttgtatgaatatattaaattaaatgtatgtaaattataagtatattaaattaagttatatttccctgccatcaccctaatagccaaccatatgtttaatttaacttcgttttcgtacgcaggcgccacgataccgtgacactttaaatgccaaagccatggccaatctcaacagttgccgagatggggtcttctcaactgctggtgcttatctgctgcattccctggctgtgcgatagtaactcaatgggaaaggacgcttggctgcgtcctgggtgccacaaagttggaaatactcgaaaaattactatccctgattgtgtcgagtttaccataacaactaatgcgtgtcgcggattctgtgagtccttctcggtgccttcaattcccatgatgggttcatcgctttctgttttattcaaaccacccaaaccagtggtgagcgttggccaatgctgcaacatgatgaaatcggaggaggtgggttctgctttgagatgcttattgcttttataaagaatttctaaaatcgtttcagatacaacgacgtgttctatgtattgaaggaatacgaaatgtgacttttaatagtgcattgtcgtgtagttgttatcactgcaaaaaggattagacgagagcagaatgatattcctgagccatttcgtaataatctttttatttacatttttaattttaacataatagcaaatataaataaaaaaaggataatgaaaaatctttgatttgcttcagactgtttaatatagctttaaaaccagcaattgtgcgatagtgccattttatctttggttttctctcaatctgtgaataaatctgaattttgttaaaaaatagtttctaaagggtgaagagtgcttacttcattcccaaaaataataaaaaataattttttaagaaaatgcggatgtattcacaaggtctaaaaaacgaaattatcgttcgtatgataattatttttaagtcctatttttcaatatttccggtgaacgataagtaaagttcaatatcagataattttttcttttcttgagccttaaaagtttaatttttatttcataatttgtcgcttattatatacgttttttgttttcagagatttcaaatggttttgttttatcgaaaattcatggtttacgaaagcgactgatgagcgacttaaccatagagcgaacagcagatcgctaaactaaatgtgcatgcgcgagtggacaagagagagagagagtgtaagagggcaaaagaggctattttagatggtcccgcagcttctctttataaataacgaaaaattatcgcacagctcagctgccgcagtgtttaattctggctccaaagttgccatgcttacccttaaaaaatttaagaacagttggcggctgcgggccccgacataaagcttgactttcaacaaaatccttaacagatagcagttttagctttacttttcacattcactttccgcttcgtcgatcctgctgctgtacgattcttcggt

SEQ ID NO: 26372 - DNA, 369 bp, DROSOPHILA
atgccaaagccatggccaatctcaacagttgccgagatggggtcttctcaactgctggtgcttatctgctgcattccctggctgtgcgatagtaactcaatgggaaaggacgcttggctgcgtcctgggtgccacaaagttggaaatactcgaaaaattactatccctgattgtgtcgagtttaccataacaactaatgcgtgtcgcggattctgtgagtccttctcggtgccttcaattcccatgatgggttcatcgctttctgttttattcaaaccacccaaaccagtggtgagcgttggccaatgctgcaacatgatgaaatcggaggaggtgggttctgctttgagatgcttattgcttttataa

SEQ ID NO: 26373 - protein, 122 aa, DROSOPHILA
MPKPWPISTVAEMGSSQLLVLICCIPWLCDSNSMGKDAWLRPGCHKVGNTRKITIPDCVEFTITTNACRGFCESFSVPSIPMMGSSLSVLFKPPKPVVSVGQCCNMMKSEEVGSALRCLLLL

SEQ ID NO: 26374 - DNA, 2321 bp, DROSOPHILA
atattttggcgacgaaaggtcactaaattcagaaactattaaatcagacccactcaacaattttaacatttcaatcgcaaacgcaccaataaataaagtaggacggataaagattaccaagtaggcgataaagttttcttaaagtcaaacaaacgcttgggaaacaaactctcgccgctctgctctgaacaaacccttgaagcagacctggggaccacggtgcttataaaggggatggggggccataaagacaatcttccttaatcagcccttacttatttttatattccgttaaggtaaggagcatattttctacctctagtaatagcggctgtgacgacggacgcggtgacagaagccggtaactacacgaactcggactacatccctataacggacggagacgtagtaatatgggacagctacggatactttcaacattcaacgaacattacgtcatacgaagactacgcagaccagacgcagaagctaacggtgggctttacagatgaccacaggacaccagtggtaaaggcggaccttcagcatactcgcaatttagttgctacccttaaaatacaccataggggaacgaggagcattaatatactaggaacaacgtttaaggttattgcaggaactcccgactttgatgactgggagaaaatcaggagcagttaagtagaacggaagaaagtcaaaacgagttaaatataaaatttcaggatagactaaacaagctaaccagctcgttaaataaataaaaaaaaaactcgttaaatcattagcgaagaatagaataatcatcacagatttggaaaatagagtaaggtcctaaccctggcaaaactaaatattgtaaaccctgctatcctggatagcaccgacataagcgaactcaaagacaaacagcaaacacatattagtttgctagaaatatttgaagtatccagtgtaagcgtttttcaaaattatgaattaattcattccctcattaaagtaccagacgctatgttatggttacccggttcaacaccacaaccggatcctagatttcgatgacggaaatctagtcgctgaatgcgccgctcggattataagcatcagggattgcacgacaacagtcggagtaactttctgcaaggaactccaaagcagcacatgcgcacgtcaaattgttgcggggactattgcacattgtaatacgcttccgggacacctgaactcagtcaccattgtaaaccatgccaacatcatcgtcattgatggcaacatgaccatcatagaccataacggtctcgtccagacggtagctggttaattactcgaacaaagtttccctaaatggaacctggtatgtcaaccagctaggaagctcaaggaaaaaaaccttaatggcggccatgaccttggtgaatgtcacttcacaccaggacggactaatcctccctctattacatgagcagagcctgagaaacctccatcacatcggaactataaaggaaaggttcctattgggatccctcgtcagctactccctaatagtgtgtcatctggcttagccgtctgatttggatagctaatcgacgcaccaactcaaagagcggtgacgacatagaaggaggaggtcgtccgggacggcgaccatttaaaggagggaagagttatcacgcgcaacgaagatattgcgtaactgctaagttgcagactggacgaaaaggcacgctcgcgaaagtcagaaactgctgaatacgcagtccgtggtgcagtgctagatactctgccggatcaagtcgcttacaccacacttaatcgaccgcgcagtcgagagtccgaaactctgccgaagaacagcgaaacatttaggtttagttttagagaataactcaatcgattaaaatcgatgcaaatatggtaatctaatatatttgaataaataaagaataaaaggcaattaaataatttggacaaagaaagggtttacccgggagtaaatgcagcttctaaatgggcggcagctgaatgcacaatctacgcttattcgggtttctccctttctggttaataatggaatcattcgaatcgggggacgaatcgaacagcctgcaaccagttacagcgccaagctttcgatttttattccattttccatctgtcctcccggacagatcttaaataaataaacgcacgctacaacaaaaaaaaaaaaaaaccaatgaaaacccaagcacgtgtaatgaaccgagcatcgggaaaattgtgaaattagttttcaccgcaaaaacccatagcgaagtccagaactctggcacaaacagcaa

SEQ ID NO: 26375 - DNA, 321 bp, DROSOPHILA
taccagacgctatgttatggttacccggttcaacaccacaaccggatcctagatttcgatgacggaaatctagtcgctgaatgcgccgctcggattataagcatcagggattgcacgacaacagtcggagtaactttctgcaaggaactccaaagcagcacatgcgcacgtcaaattgttgcggggactattgcacattgtaatacgcttccgggacacctgaactcagtcaccattgtaaaccatgccaacatcatcgtcattgatggcaacatgaccatcatagaccataacggtctcgtccagacggtagctggttaa

SEQ ID NO: 26376 - protein, 40 aa, DROSOPHILA
MRRSDYKHQGLHDNSRSNFLQGTPKQHMRTSNCCGDYCTL

SEQ ID NO: 26377 - DNA, 36267 bp, DROSOPHILA
gatacattttgcggactcgattttcaaaaatttcaccaccagacaaatcaaatatttttagacaaaattccattttagtgggcgatacagttgagaaactaaataagcttgacttgttaaaacatttatttatatgatatttataatgaatggccttggctttttattttacttaatgcttcctcaaagtttctgtatttttcacacatatatctttttcacaattttaaacaatctcatggtgcgcatcgtcattacgtagactgccgatcacatagctccctgctgtcagacaacttgttcgtcagagcgtccaagtacgaacaccacccccagctgcagtgcaaaatcgtggcaatatttttacacctgtagtgacacccgtgtgcattaaaatccgcacataattacaaactctgcgcggactggattggagaacgttagcaaaaagagggcgaaaaagcggccaaaaggcaaaaagcaatgccaccaagattgacaggagaagaggcgcccaaaacaaaaagagcgatgagcgaagcaaaatgtcaaaaatacccatagccgaaagccaaaaaagccggagagcgagaaactcgctactgtggctttttcttttcattttttagcagatgcgaaatgtgtaaataagaaaaaccaaataaattccgtcacaagcaacacgttcgcgttggaagtggaaaaaagtgaatgaggcaagaaaacgccgcggaaatgatggcccaagatacaggggttcccgagctacacgaccgcaaagatacaaaacaaactgccgagccggccaatcagagggccggagacttgtgcgccggtgtgtgtgaactccaccccctggtctctgcgcgtaatggctatagtaaccagtttccagatggcaccgcgcatgtgccgaccaggaaaaagcgtgatggatgcggtggctgtcgcttaggccactccttgatactgggtcccaaaatcccagttcagtgcgttcggtgctattggatggaatggttgttggctgctatctagctctcgggaaccgcacgaagctccccaaaagccctctgtctcgctctcgctacgaatcggttcggtatctaaaaaataatatttattaaaatgacagctacaaaaatagttcaaaaattttgaaaactaaaaagtgatattattaaaacgagttgaaaccaaaagttttactatacggttgagaagcactttaggaacccctggaaacccggttctgcgcacctcttgaaggccagagagggacagctagtgcccacatgtgtatgagtgcgagtggagaaaactatctcagacgaattgcaacgactgagtgtgtgtctgtgtgtggccattgcagcgatcgcagcgactctacaaaactctacaaaatcaacacattccgcatacgcaccgttgtacagcgcgtacttgcactattgtcgttatcgccgttgtttcgtcggttgtgttggcctttcgcgtcgccatggctgccaaaaggtgtgtgtctatgtcaacctgaaagcgaaaaaccaactccaaacaccacttgacggttgagcaaacacaacggtggccatatttacattcggatctgggttccctcgctctcgtcgcggttgtcgcctcttttcgcggcccacagataagccctgacacactgaagttttacgcaaaacccgcatcgcaaaagttgtgccggttgaaactaaaaaaaaaaaacaaacaaaaagttaagccagttactatgagcgagtgcagacaatagtgaaaacggtgacccaagtgataccggtgaaatttccacaaagaacgcatatgtcaacgtaagaggagaaatatggaatactgtggtctgtaaatgatcaacttaatatggtacgaaattatcttacacatatttcttacctacatttaaaaataagtgtatccttttaaagcacgagaaaatcaaagcgtgtcgttatttcgtttttgatacaacatgttagtctaaaatacgagccttttaagtcggcaaaatgtttactgcaagaaatatttcaaatctttaattggcggaatcggaaaatatattcgaattttcttattcatttatacttcctaggaaattagctatgcggcatttcttagatgaggatatgtaacagctttataactttttctgtttaaaatatgttaatttatttactgactattaatccttaaaaaaataatgtaaaataatgtatgcgaaccaagccaatttaggtaacattgtaggacaggttgtatgtattgtacatacatacaatacatattgtcaaatctcaatcgaaattaggtggccataaatttaaagtgaaggcctaacaatttctataagagcaatagtaaaaatgcagactacaaatgaatttctggcacagaaaactgagagactaatgaaatataaattggaatatgtaatttaaaaatagtcaagtttttgacagttgcaatgtgaaaaattggatcggtaataataaaataaacattgattagcatagtaaagtgacgatgtttttgtttcttaaaatgttaatgaagataatgacatatcttaatgaagtatatacgtacattatattgaaattatatatattcaaaatatataaataaaaattcaaaaattataaatataataataaaataaacattgaatagcatagtaaagtgacgatgtctttgtttcttaaaaggttaatgaagataatgataacatatcttaatgaagtatatacatacattattcaatttcacattcgataagaacagtgaaacctctaacttcctgggaactgaatcgtgataacattattatgagattacaaaaatggctttcctttccaggttcccaagctgaggaacatctaatacgctcaggaattgaaatagaaagaatctaaaaaaaattatacccaagctatgcaagaagtctgcagctccttggacacgacctcaatgggcacccaaatcaaatcggaatctccactcaacccgctgcaggtgcaaactggacagacgtccctgccagtgggtggttgcggtggtgcgggcgtcgtgggtggtgtgggtggcgtgggagtgagtgttggtcagcctggtatcggacagcagggggtgccacctgtgccgtcggtgctcatggtcaacaagatgaccccgaactgtgataaacggagcgcggacacggcctattggatgacagcatccgagggcgggttcatcaattcgcagccgtcgatggctgaattcctcaaccacttgagtccggagagtcccaaaatcggaacacctgttggatccggcgccattggcggagtaggcgtcaacgttaatgtcaatgtcggcgtcggagtcggatatccggttggcgttgtccctcaaacgccggatggaatggactcggtgccggagtatccctggatgaaggagaagaagacatcccgcaagagcagcaacaacaacaatcagggtaagtccacatgcacattacactgggggaagcataaggtttttaatttagcgatcgaccatgtcaatttgaacaccattctctgaagaataggcgataatctcatcagtccatctcaaactattgaatcaatcaaataaaaagtaagatatttttatagacacttttccatatcagtttagaccggaatcaattgggttctcttgtcccggccattttttcttgccgtgtactggctggtgaaatgcgaaactctcattaatcacgagctcacagaaacctaaagactccaatagcgccaattatgccactacgaagtccctctggcacctggtttcgaagtgatgaagaaagagccagtgctttcgctgaccatttacaaaatgtattccgaccaaatccctctaccaacacatttattctccctcctttaatagcagccaatctagatcctcaagaaccctttgaattccgaccatgtgaactagcaaaggttatcaaagagcaactgaacccaagaaaatcgcctggctacgacctaatagttccaagaatgctcattgaactcccaaagtgtgctattcttcacatctgcctgttgttcaacgcaatcgccaagcttggatacttccctcaaaaatggaaaaagtcgaccatagtaatgattccaaagccaggaaaagataaaacgcagccatcatcatatagaccgataagcttactaacatgtctttcaaagctgtttgaaaaaatgctactccttcggattagccctcatcttagaataaacaacacacttccaacacatcaatttggctttagagaaaaacatggaaccatcgaacaggtcaaccgaatcacgtcagaaattcgtactgcttttgaacatcgagaatactgcacagccatttttctagacgtcgcgcaggcatttgacagagtgtggctcgatggacttttgtttaaaataatcaagctgttgccccaaaacacacataagctactgaagtcatacctatataacagagtgtttgcaataagatgcgatacaagcacttcacgcgattgcgcaatcgaagctggagtgccgcaaggcagtgtactgggtccaatcttatacaccctgtatacggcggatttccccatagactacaatctaacaacctccacgttcgctgatgataccgcgatactcagtcgctcgaaatgcccaataaaagccacggcactcctatcccgacacttaacatctgtagaacgatggcttgccgactggagaatttcaataaatgttcaaaaatgcaagcaggttacctttaccttaaacaaacaaacatgcccaccactggtcttgaataacatatgcattccacaagccgacgaggtaacatatctgggagttcatctggacaggcggctcacttggcgcaaacatatagaagccaaatcgaaacatcttaaacttaaagcaaggaacctccactggctcataaatgctcgctctccacttagtctggagttcaaagctcttctatacaactccgtcttaaaacctatctggacttatggctccgagctgtggggcaacgcatccagaagaacatagacattattcagcgagcacagtcaagaattctgagaattatcactggagcgccgtggtaccttcggaacgaaaacatacacagagacctaaaaatcaaattagtaatcgaagtaatagctgagaaaaaagcgaagtataacgaaaagctgaccacccatacaaatcccctcgcaagaaaactaatccgagtatgcagtcaaagccggctgcaccgcaacgacctcccagcccagcaataaacttattagggcattaatgaaaaaaaaaaactatcactaagtgaaagttaattaagttagattaagatttgaacacttattgttagtctcttaacacaaagggaagattcaataaataataaaaaaattaaaaaaaaaaaaaaaaaaaaatcacgaaatcaatgcaatttaccttgcattaaatgaggcacagcatggcggcgccttcgccacttcccgtccagaaaaacagggccagaactcgatgtccgtactgcccgatcccgatcccactcccaatcctccctgcacctttaccacgccactcgatcacgcaccgagagggttcggctcctttgatggacagctcggtctgtgccggcaaagatctgttatttgagatcatttgtaacaattttcgagagtagagcggaccaagctggaaatgtttcatttatttcccttcgcttcgactcgagtcgaatgtgtcgatttcatttgcgcaagaaatacgaaaagcgacgagcagagtacaaaatataaaaaaaaaaaatacagaaaaatacggctggactagggatcgaggcagccgcatttaaaataaatgaggtatcaaggttgtccgaccatacgttttcctgtccgacttgcccaaaacccgagtccctttcctcagagcgattgcaacctgttatttgggttcatttgtcaaaatattttttcctgtcccccttttttgctttcgatcgaaggggactgcggatgtcgagggaatgccgcgttgcacgttgcaattgcaagcctgtgcgccgctggcgatgttgtagcacagaaaatacgaatttcatgtctgctgctgcaccattttaaaccagtaccttcaattcgccatctctgcgctctctggccgagaatctgaatctgcaaaggggagaaaatagtttcaatttatcattttattctgacacaagtcgagcaaaggcttagatactgcaataaaaataacactttttaagcgagtcgtacatttagctaaatatttactaagatatttactgcatgataagaactaattattgtactaaaaacgtacattgaattgttacaaatttgtcgcgtttttgacaaattgatccattagtttcaaaaacaaatttaatatgagaatgatgaagctaaatgttatataccaataataatatgtaatgaataacattggtactatactttactttacagtcgtatgaataagacgccaatatttttatctgttgctttgttaaatctgcagtaaatagttcttggccaatagctggaattcttgttgttaacataaaatcaagaaaacaagtccgttataattaacctgaccaaaccaaaccgaatgtttgtgggagcggagagtgttcaccgacttaaactaatacattgccaattaatattgaccgcactcagcaaccacacatcctgttgacaaatgagcaggactaatcccctggatagtgtgtgtaagagtgtgtttaaccgccaaatcccaacacgtggccagtgcggagtggcaaatggaaccgtcaaggaactccccagaggggagaaaatctttctccgggtccgggtctccgcttgcctctggtttcccggagtgaaagtgagccaataaatagcgtgaagcattccgaagcgccgctgaagggtcaatacatctttcacccactcccgagcacactatacgagtataactggatgtgtatgcacgccgggtcgaaaggcgaagggacgacatgctgagcgatatggattacaaatgatgttgtaaatgtccgtccgtcgaccatttgtttatctcagtgtgcgagcggactagtgtgtttgtgttggtttaacagtttaatttgttaacgttgtcaaattaattccttgtcaagtggtaatcgatctaaatgattctcaggtgggcggatctgtgaatgggaaacggttaattcgttgccaaaagatcgcgattgtaactattggaaaaggcgattggaagaagtaaaatctcctctatccattactagggttatggttcctttttatttttcttcctgtttagcatgcaataacttcaagatactccaaacaaaaagggcctgttgagccatatcattaaatgcagcattttgtaaattccgtttcctggctgaaataacaatttgaatccgcgtaccccaccccctttgcaatctcacattgtttaccgcaaattgttcgcaacgcatcctgaattttaatgtgtgcggcgtattgcggctgaagtcacatcgcagaatgggttgcaagagttgaaagatgggtatttcgcctcagaaattgttttgttagcctgtttacatgaacatgaaggggaagcaataaaacttccgttcagtatcaagtgttaattaggcgtaatgaactgctagaaaagttcgtaactgtcgagcaacatgtcgcgtcctcccaagtatctgcgagatacgcgaacggatctccccaggacaatgcgatactttcacttaaaggagcggcgttgggggtaaaccaataaaaaacaatttgacttcgttggccctggctattgagaagcggcaatccattcgaagcgccatctgtattatccaccctgcgaccatatgttgctccattgagaggagaagcagttcatcctcgtcctggatggtttcgtgggtggaagggcggaagagcataaaaaatgcgtgcggcacgactcaaaacttaccccccgaggattaagattataacaaaccatttatcataatatttatgttgatgcgatgtactttttctcaatgaaggtctcaaagtccgccagggtcagaaaaaagcagaggacagggccaggttcgcggtgccttttattaattttatttatgatgagtcattcgcacatttataattttaaccttaacctttaaccttaacctttacagttgaattcattcaaaacgaattcggcgcgaatgctaaaaaagctggggagcgataaatattcagcgatattccttcattcagaatgctctaagaaaatcaaagagatttttgaaaaatctcatattgagagggatgaaatgttttcatggcactctgatactgatatcccacgattatgtggttgacattaacaagctcatattcacaggaaaaagatgtgataaaaaattattaaattccacaaagagtaaatatatgttttgcaacaaaaattggtgattttaatggagcctatcaacaatccgatgcttaattaagaattaaagtccatttaacgagagaacttaagctgccgtggataaccgtctctaaaaggtaaaatcatgtcgccgagcattaaattaattggcggtcgtcaaataatttttgagcactaattacgcgtcaaacgatgaaaaactttcagggccaacgaaaaggctccaggaaggctcaaggactgcaatcttttgggtaaggaggcccgttttcggctcgctcaattaattgttacgactttattatggagataagtgcacggcgtcttggccagaacaaacaaagggttctaattggcccaccgcagccaggataatgccggccagacgtttacgccccagagggtttttccatatttttctttcgcttttcttggcctttccctttccaacatgactcagaaaaaaatctgttacaattagttaagcctgagccggcggctggcccaagtaaattttatgattattattttctgccacatttttgggtagcttttttttgcggttttatctgcaaactgatttgtcattatttttaaagggaaaagggcccgagaaattatcgtacaacgtttaaccaaaatcctttgagtttgtctcgaatttcggtgtttaaaaagtatgagctttatgttcttaagctttatctttactggcaacgttataacaaatatcttaaataacaattgggaaataaattagtcttatattacatgaataaaaccctgtgagttaccaaagaaaagttttgtaacttaataatggattatagaccacataatcatttaggcaaatcaacttcgtgcattaggacactatccaactcactgccgttgtcttttaattttcccccaatttggtcatttgaggtttcccctagaaactttgacgttaaccaatatcgatttaattttatttccactcatttagctaaaagcgtttcagtaagaatggaaatatttgcccgcgattaaattaaaaaaaaaaaaaacaaactggaaaagaaaaaagttgaaaatggggaaaagtggaggagagaagcattttatgaaatgaatgcactgacactctggcctcgccttggaaaaatttgaatacattacagagggtttagaactccctgcaaataaagagccgccccctcctcaagcccaggccaccccgcccctttttggccaggacgacggcatgacaatgacacaaaagccgcgcacttaatcgccgcggatcacattccgtaaaaccgcgacgataaaaattttttacgctccattcttgtgtacttagtgaaatggaaggacaccaccaaccactctacttcaccacccgttgtggctgacccgcctgtccgcaatttcttcgctggagacgtctctgtccagtttcccgcgcaccagaaaatcagatctgaaattatttcaatttgtacgcgatttatttttatgtctttttttagagagcccttccttctcatcaacagagacccgagtttaaacgatttgtaaacatttgaattggattttcggccataaaaatggcttgtttgcgaccttatcgcaaagactgggctaagttgtcggcattagtgctatcataagtagttgaagtacacctatatatttccgtaactcaactccacgctaatcgcactgccttccgcttcactgaagtcgctggggggtcgattggttgcggtcactgaggtgggggatgtccctaacaactataataaattaataaattaccaagtttttgcataaaacacagttttacttatcaatgggccaggccaactgcagtaattactagccaggttcagtcgagggtgttgccaaagacaaatgactgtaaaaatgtaaaatgcagcccaggcagtaaatgtcataaattatcatcacgcaccaagtgaatgccgactacagattctgacttctggcttttgagttgcgctccggtgagttgcgtaaacaaagcaagcctagtatatttaatagcttttacatattaaaaagtcttaaatgaaggcattataccgttgcggggagttcaaattttataccatttgatccaggaattagatattaaccatttctatttacaatctataaaaacaacaaatgaaagaagtaatgggaatgtgtttaaatcaagtaaaagcctatataaaaataccttatgttcttcacgtaccaacataatttcctgttgcttctctttatctttgctgtcagaactcgaaacaagtgtgaaaatgttaaatttatttaaaaaaaaaccacccacatgtttaagttttgattaatgctaccgaatctttcgacaaggccaccgcatgtaacggcatttaaaagagcgtgaaaagtcaactgggacgagcgaaatcctatccacacacgtggtggcccaactccaggataacccctgtatccgtaacccctcgatgtgagtgtgtgatttaaataaaactaatgtttgtgtgaaaatggattttctgtttgtcatcgactgttgacttctcccctgtgttttgtatgcaaggggcgaaccgcagggccaaaggatttcttccgctcctgttcctggccatattcaaattcggcgccagcagcaaacagatttaaattcgcatacgcttagcacgtgaatgtgaatccttaaggacgacgggcaggaagagcgacaacgacgccgctttccgccgagtcatgcatcatatctacagctgcggaaacccctaagttgggaggggttcgtcctcgggacagaactcgattggattgggttgggttggcttcggcttgggttttcaacgtggctagctgggacttggagtgggggtgcgatgaaactgaaattgaagcagagaacgcgcgtggttgccacgtgattccggtgctcgtaaattttcaagaacatcccatactttttagtggttcttgtagtttttaatttgtggctcgttgggccccgttaacagttattatttatgcgatgtgcggagagatagaaaagttatgggatattttcagagcgcatattgagttagctacctgtgataaggattgcaagtatcaccgaacccaggctcatttgcaaccccgaaaaacaaaccatgaagttttaaatggggcgcagagagcgatagatgtcacttggggatgcttcccttaaaatactcgtatatgtgggcttgagattctgcgattctgcgagagtgagtgagtgagtgtcacagcatcatccatcattttggacttgaccttttttgggccgggctgagcttacgtttaacgcagactaaaggcgaatctttaattttgtatttgctatctggctgcacatgttacatccgatggatgaaaagattgtcagagagggcggcaacagtccaatgtcagacagaccgcataaacggctctctgggaaatctgccttgcaatgtcccattgtgagctttcctgtgcacacatctctctctctctataatataaaagcatattttcccactcggttttcacttttgtgtcgtgttaaaaatgaatttgtcatctgtaaacggtctgacatgtttgccaaaaaataaatctcattcactctccacctttgtgatcatctcgtgtctggcaagtccgttgggcaatacatcaattgttgctcggtggttgacttaactcctgaacgcagctaaaccaaagtccagagatccctgattgatttgcattgaaaatcgtgattttaattgacatgtgatgagctcagcaatacaaagcaccaataattatgtcaatctgatcagctcgttgatcgatggattctacttaaaggggttggggtcggatttttagagtaatttgctatccggcttgttacattagtgataaatttatataaaagaagttcatttggtaaaaatcaatctaaacaggtcttagatattcaaaagaatccaaaagaggttgttgaacaaataaacttaaaaatacaattgaaactatttattcaccttttttgttgctgactcgatgagccgtacaaactgaaatcattgagctagcactcgaaacataaatgtaaacacatgcccaacgttgggacaaacacatttatttttggtggttacaactctttgggagttattaattgaaattcatacacagctcacacaaatggaacagatcggaccgaacgtgctggatgggatgaaatacgccataaaagtagcaataagtgggacaattatgaaccaatagaggcaagcacataggtaaggtgggtaagggcttgggccaacatggttccccgggctttataatagccttgaatcgcttagcttgaattcgaaatgggtggccacccaggtgggccaaaaatggaggccagttagcggcaggtgagcggtgggtggtgattattataaacgcatcgttcagatcattggccaaatggttttcgaacaatttgttgcttcgctgctgattgaatgacggctatgtggagtggtgggctctggctctaaagagcgtgaaatttatatgcaattaaaacaatatttttccagccgagcgaaaacgctcatgattattaccgagcgcatataaaataattattgatatctctatatcacgtatagatttttacagccaccagctgtcaacaaaatgtgcgcgaaataataatttccattgattcgaaccaatttcaaaaaatgtgtatgcatcgcattaaagccgagttcaaggattttgcgccagctccattttcttcgcttgttttttaaattcttagaaagtgcagaggggatagcaggctgagtgactgctgcggttaatggcttttgaatgcaaattcaattttatcgcactctgttcactttttaataagatttccacccagctcctccgttcccatcctcatccccatacccatcgccgactgccggcgaaaggtgcactctgttggaaatgaaaattggttgcaagagcccaaaaacaaaaaagaaagactggcactgaaatgaaatgaaagcccagagacacgcgacttgtgacctgcgagaaatgctctttggcgccacaagcaaacctgcctctttctttttttcctatttaaaagtggtggtacttgtacactcttacaaaacaatgaaatgttcactttttaatcatatatttgaatagtttgacaaccagaacgcttgtttagtaattattgaaaatataaaggttccttttagcataatcttaagtctctgtttgtattaatttctccatctattacttaatataaaaacagatgaatttcggatttttaaaatctattcaaataatttttaattcacaatattaatgaaaattaagtatttatatatgtatagtgccaagaacattaaaacgtacttcagttcgttctcagcctcttggggatgccattcgtattttgaacttcatgtgaaagttttacatatatatttttccgagtgttttctgctcgaggcgcactgcccacaatccaacaaattgcgtttcgtgtgcgagagtgggtgggaaaactgtcagaatgaatgagtagcccggtcacacctactccctgtcagtcaggcccgaattcgcccctaagcagccaccaaatggaaatggcaatggcaatgccaagttgtccaagccgttgccttgaatcgggctcgggatcgaaaatggagaaaataagcaactttagagtgcaaaacgtttacgggcagatacaatactagcagatggatatatatctcgctacattattttcaattaggtaaatggtctttgggtgtgataagaaagtaactttaaggtgggactcaggggaaaagtttatagtggaaacagaaaagtacgcatggctcaaagaaaaacgttgtctatttaatccattattccaatatgtaattctccaccacttaacagaacattcttttcattcttagaaaagtatagtactatagatatttttcaaatataggcaactttttgctgtccataaatcaatagaaaatccccatgagcttgaaccggacgtaactgcagctccacccaataaagccagttccatctttaactgaaatagccaatccggcccctcaaagtgccagtcatattcatgagcttctcatcagctgcatatagaaatgggaatgctcactgattatcaaacgaaaatatttgctaatcacgcagctgctgccgctgcacgaaaatatcaaatatatgaaactgcataaacttggcagcagtttgatggaaaaggatggggacggcagactagatgccaacccagtaggaattaagttccaggctagacgctattatttccgacagcatgattttatttgcccagcccatcatcatcatcatcatcatcgagatccaaccccttgcttgggagctccacccttcgccgaattatatacttctgagagaagttttgcgtttccttgagactttcccggctgggacttcctcctggtttttcgccatcgaaacttctcaataaggaagttgggtctcagaactgaattgagtagcagtgggtttaaggaagtaccgccacttgaccgctcgttacgtgctgcatgtgttgaccacgtcaaaccggctggcaaacttccgctttccgaactttgaggttaattattttccactctcgatacaagccaacttgaggaaagaaagtttcttagccgatattatgtagttatgtgtagttggtatcttggagcaactttgtcaccgaaaaagatgaacaaaaagcatatcttcacattttaatatcggtgcttctacgttgaagcagtcaagtaagcacctttgcaggtgaatgaagtcttaaaatattttcacacctcaataagcattaaacgatttctttatgcatctaaatgtgttcctttatgctaatctctcttgttaaaatatccattaaattccaagtcaaagtcaatactataaaaattgcaatgactggaagaatataaaaatttgcagttgtaacagtccatcaaagtgtttaaagaagtaatttaatctccagttgacaaaaaatgttatcttaaatatctgaccaaaagatccgaaattagtgacgatggaaactttgtaatcgtacgaattaatctatgatctttcctaataaacatatccctaattaagcgctttcctttctcgtttcaggtgataactccattagtaagtacttacccagctaaacaaacaatttctcactcattgcgcattatttctaaccacaaaccatacgattctccaattggcctgaaactataaaaaccaaaaacattttgcattcgttgtgggagagtcttcaaggcgaaccggtaatttgaggtcccaaaccgcagaagcctgattaaatcttattataccaatttcggccagcctacagggctctttgtaaaaccgcaaagcgaaaaatgtgaattataattattgtatagcaatttcacttgaaaatttgcttagccaaataattatatcgtttctcgggaaagatctggccaagttgtgacgaccattttgtgtctcgaaatcatctagagtaggtccaaaatcaacaataaaaacagaaaaaaactgaaccaatcaagcgtcgaccattttggagacggttcaacggaaacgtcgctttttcatgttcgtgaccaaagtttaggtttacgctttttttttttttggtttttggtgtgtagggaagagagatacagcaacgcaagcacggcttaaaataaaaagcgcagagagggaaaaatacatattttacctgaattaaattgagtaacaaaacacgaaagtttttcttatatatatgtgtgcgcgcacataaaatatatactcgtataaataatttaagaaatatatgtagaccaatcttgttcgtgtttttgttcgctgacaagggaacagagagagccgcaaacacgctaccagtttaagtttggcccacaccacaccacacacaccaccacactccgaaagcctctctcattctcctttcggctttgttgcggaggaaataattacatgattgaggtactccacacacacactggcacgaatacccacaatgacaaacactgtgcaccctcccctccccaacctcttcaaggccccctactgcccaccaccatgtatatatgtatatacacatttttttgccctttggtggtggtcgttgtctgatcgaaaagaacatgtcaggtttcccgacctggccattgcacgccttgggttccctgttcgagtatgaatggatgaccgcgccatggcggctttttgtagccagtggttgtggttcttgctggtccgctttttgctccgttcagttttttttggtctttgcactcgaaaaaatattcatgggctaagttcacagactgaggccaggatgcaatgccaagatacatcttaaatgtacaaatcatttaatgtgttaactttgattctaagccgttgtaaagttcagactacagactagattcagagttgtaaagttcagactacaaacaatgttccattggcatctcctagaccttacagtgcttgaggttttagtgcatctaagtcacttagaaaaccttcaaactcagttttaatatttaaatccatacatttatgatacaacaaatcgtataagtttgcatggtagttaaaatagtttagctaataattatgtaaatttgacaatccctggcctatttctatggaaacacaataacttcagcaagatcatttaatgctaaactatcaaacgcgctttaaaggtaatgaaatgtgcttagatcttccagaacttccaatcttaaaatgccatatagcatttcttgcggtgtatgtaattcacgcttagccgcaacactgtcgactggcaactggcgaaggccctggcccagggcaattattgtatcgctggcaatacccaccatgcccaccctcttcctgccactgcgactaacttaccccttgaaacccctgctgggccacaaaacggtaaccactttgcttcgaggttgtacataagtgtgtgtgccaggagcagagttgaggtcagcgcattgtcgtcctgtaattggctggctttggcgtacttacatatttcacaggacataaccaagccaaactcccactctggaagctaggcatatgtgactagggttcatgtatattggccaagtcggttaccaaccacacataggcatttcagagtgtttattactcatttcggatatttcaatttaatgcactcaataattatcggattctagcgaaaatatatattctctttaaacaagagtttttaccatatatttaatattatctgaagtctttgaatctgaacaattattaaacggtaatgctgaatgaacctttcaaatacgtagccttcttagataagggttataaatatatgatctattttatcaattccccaatataaggccttttttctcgaaatataatttggaacttcctcgatgagcttcactcgatagatcaactatgatgtgtgtatatgctattactccgacttgtcagtcatgaggatttcccattaattttgcctgacctctaaagttccgccccccaaaagaagaagtagacaaaaaattgatactctacccctgctcagaccatcggagtcgaatcttcccacaccatcccccttggaagtgtttccatctgtggtttagtggcaggattaatttctaatttcgcctaatgtccaagagctacccagttcgatgtttacattttgggtgtctcgtcttctaatttaccttgataaaacgttaccgttcgcattcccaattccattcccattcccattcccatgccgtgccctgtccccgggctgtttatgtctctgccccctgaacgcattcgagtcgtaaaggtagccggactcgcagtcggattgggaatcgtagtcggagtcggtcggacacagagaggcagacggagacgggcccacatgtttgcatcattaatcatgacgtttcagctctgacacatttggccgatcggcggcagcggcagcggcagcggctgcagcagaagcaatggcaagcggattgtaatgaacacgttttgtaaggcagacaacggcgagaaaaacgcggagacacagatacagatactgatgcagaaacaacccatagatttagatacaaacgcagacgcagactaaaagatatggccagaaagcggatgggagacgacgagcttgagacagacgcacgtcagcagtgaacggcgacgactgcggatgcgtgtgcactcagagatattttttatttagatacataaattgttgtcgaaaaaatttcagtatgtagcagaatattgtatttaccttgccacttcttggttactaccttacctgaaaaggacggcttttatctgaacgcgttctacaatatttatttccaaaaccaagtcattttaatctatttaacaaacttaaaactcagaatattttgcagaaatattttataagtgaaaagaaagttgaaatacaattggggtaaatatttccgagtgtagccgatgcgtgccgaatgacaggagagcgggcagggacaatgggtcgtttgaagacaaatattttcacaatggcagcaaaagacaaaaggaacaaaacccacaagcagcccaggcagaaggcaactcatgtaaatattggccaaaactatttacgaaactattagctgctgttatgggcaagactaattgtgccgctccggggagggtgcctttataaggcgggataagtcagaggaaagggaagatatgtggaagagtttcataaggattgcataaggacaacgcacaataatgaggtttaaacgatgacatctctcagacacggttttgatttgttaaaccgtaaggaaagatgtctacctctatcaaaacgtcaaaagcacagggaaaagaagacaatttttatatagttaaatagtaaggtgaaatttaaaaagattttgaaaatattattcagtattcaagtataaaagctttctcctgccatttttgcatcgttaccttttacacctaaccaaccacttttgtacaaatttaaacaatgcagtccttaaagcgccttctccctggcctcggcaagtttctggctgaaaggccatttgtccttggtatcagcagagctgctactaaaccaaatctaggttgacttatatacttccgtttccggcagcaagcatacgctccaactcaggtcgaatccccatccaaacctccgcttgtgttcgagggatttttatagcccgctctcggggaggggagaatgtgaagcgcagtgtgtacttggcgctgaaacagaattttatgcaaatatcctaatcaaattcacatttgaagttcaactgttttatccaaaagttttaccttctgaaaaagccgagagccaaagccggcagcgtcgttgtcgtcgtgtggcagacgcgcttgggactcgcagccagaaagatgccacccatttttaatttatttccacttttccactaaaaaaaaaaagggagccgctccacccccgaagttgcggaaccgcccataccttcatccgcagccgtatccggtgcgtgcgtccggcggagtttgtcggggcttggggttggtgttatcgccgcccgtttactgtcttctgtgcactcgaaaaatttgacacaatgttgatcaaactaacgaattttgtagactacatatacttaaaccaaagtctttaagagcatagagcattgtcttttcaaaattccttagtcttaaaaaatccaaaacattaatatgtatttttttttttaagctaattaattttaagtttatttcaatacatataattttgcgagtgtagccatatcctcatccgaccgacatcagcgggggttgtcgcccatattttcacttatcaaaacgccaccccatttgcctcccaccgcaaacttaagtctgcatatcgaaagcgattaaacagttaccgcaacttcagctccagtgtcttcttaattcgctgcaaattaaaacaaagaatcggctctcggcggacaaaaaaggataaaaattagtcactgcggtgacagtaattcaggccagtccccacattttccaaagcccccacttccctttccttccatagcttatcccccgccccttcccgcgaggattcgctgcgccattcggcaacaactgtgcaacattcgtggcatcctcaccgccgagtgattaattgcaatttaaacggtttcaattaaggcagtgcgcatccttcgcatccactgcactgagcaggcctaacattttcggatccgctttttccaccttttgttttaaatgtatcttttcctgcggatggaatcgatgacattgatagaaccaaatttcattcgggattggatgtataattggaaaacattttattttgaatatggccgaaaataaagccgagaatctcaaactttagaatataaatacatagtctatttatccttttttttatgaaaaccagaatgttgatattgtatctgctgcaattgtatggtaatagtggggtaatcatcccaatcagaacaatttcttatgaaaacacacatgcgattcatctattaaagagttttgatggtaatggtaactccctttacacattcatatatgtatattcccaaacttgcaagctgcttacatataaccaaatccattttcgtaatcagagatgatgcaatgttagtgaaagtatatatgttgtactccctgcggacactcatttaatggtctccaatcattccataatcgtttcatcaattcgcagcaatatcctgaaatatggccaagctcaattgacttacaccctcccgattgctatatgttcgcatgtccaggatatgcataaataagccaaataaatgtgtctatatatcatgcgaacgtaagtacatacgtttatgagtggcccgaggaactatgtgacatttagcatatgtcgccacctgtgtgtaatgccccggcaagagctacacatgcatctgacacgacccacgtaagacctgaagtcgggggtcgaaaaatccccgaaacggagggggcgccaaactttgacgggtggcaagacaaaatgcaaaactttggcaaaaagcgagttgcttaggcaaattcgtatgtgaaacatttggcagcaggcgatttatttaatgtctttgccatagaacaaggacctcaagcagtttgggaggctagtggcaggcagttgcatgttccagtgatttaaatgatttatgtcccaagactttgacttgagggttaatatcggccagggaaccagccagagcaagccgaccgagtagcagcagctacatccacaagaacaacctgagcaacagcagtaacagccacacgagcagcatattttaggggacaaattcacttagcacactcaaaaatatatatataaaagaaaatgaattatgttttctatacgtatttttcataaaaaataattattcgaatatgaagcgcgattgaataaggatgatgacaattaaaaattctaaatgtttttcagacgaaaattttattcgtactgtcttgacaacatttatttcgagtgcactcgtggaaaaaagtgcgtatttttactggtagagcccactggccataactcatttcggaaaggcggcgcttgtggcaaattgaaggctacaccaccagcagttccaccagaaagtccggctccaatcgcacagctgcaagtcgacgagttgaagttgaacgcatgcgaaacaccgtcgaaattcaattatcagcagtggcatcacgcatacgccatgttgtcggggaacggccgggtgcggaccggcaattaaagccactgccgacggagccgttaattaatttgcatttgcgacaggccagaaagtttgtgcgttcagtggcagcagctaggctcaaccgaaactaaaaacttgttgattggtcggccagcacgacaagttaaaactgaagacagcaggattaagacgaacactaaaaagcaggtggatttattaaaatttaaaaaaaaatatgggtgttttaattacataggatgataagaagcactagcgagtctaaaatataattttttaaaacgctttcgagtattcaaactccaagtgaggtctaaatacattagggtataagttgatcggccaatgtcaattaaccaatttgcgttagccgacaacaaagttgctcagccattttatcgactgaagatttatagcatttttaaatagttttctgttgttgtggctcaaatacactgagtggtttgcgttgaaagctttgaaagtagcaaaatgtaaatactcaaagttaattggtcaggtgccattaaaactggaatgggacgaggaagtatttagttaatctagtctgtagtgcgggcagtcgcgtaatataaaagcatttataatatgaagtattttgtaagaaacagtgcaataatataattgaacttcgatgccgtaatcttagccattacactataatgttttcaataaagttgacattaagtattaagcaaagtaaaaagtaaattatcgaaagtttcagatataatagtccaatacaacgatacttttgttttacgctaacgaaatatatataatacgaaataatgtgtacttggaatagggactttgttcatatattcggcttaattggatgagggaaattcttcaagttgtggccactagctacccccactccgccataaggttgtccatctttttctcggtctccattccacgttctttacactcgcagacttttcgcgttttcctttggcgtgccggaagtgacttttgctttttctcattttcctattttttttccacaatgaatataattttttgccgccggttgttgttgttattctaggagctgttgttgctgttcgtgtttaaaataagcaaaacttacgaagcgataaaaatgccgcttcaagaagtggaaaaagaatacgacgatgatggaggagagaactcagaacaggaaaaatcgcaggcaaaaaaccaagttggcgtgtaaacggtttttgctttattttttccagtaatgttttttcctgtggcttcccagtaaaatgtaccttgtgatgtggccagccggctgggtggccagagacccacagattcctcacctccagatgtaatccccccgctcgagaagtgacgcggccactctgaagttggctaagggcgattcacttgcgagacaaatggaaatgaagcgtttattcagctttattgctgcgataagaaaaaatgaggcattatttcgtttggtgtttcaagcggagtttcatctcgagcttcggcgctttttccagtcactcgcaccctcctcaatccaaatttatattatttatttgtacccgcgagttttccatttgcgccctgaggcggtgagcagtcggcctgaccacaggtcgggttttcctgccagggacgcggcaatttcctcgaacgtctccggctttctggtagctgaccagtcgtgagttggcggtttccttatccgaccgccagggaatccgattgcgagggggtggcatccagtagccggaattacttgcatttaaatgtgactcaaatcgagcggaaataaatctgatttagcggaataaatctgatgcttcgccaggctgtggagactgaaatgattataatgaaaatattgatccaacttacgatcctttattttaatctatttatgtaagcatattacaggtttatttagatcttaaatccttatatgttgggaatattttcgtagaacatcgatcacagcatatactattcattttttacagactccaatgattttccctcatttctctaagaccatcaccccaaataaagtcaattattatccgattcgactactgggaattttgttttggtttcgattttcaataactcatcagcaataaaccgtgaaaatgaacggtagccagatcaatcaaaggccagtactccgctcggttcaactgagatcgcggatacaggccatactcatactcgtataaaatccgatgggcagagtggcgtgaaaccaatgcgatcgaacaatgaaactccattggcagcgccaaactcaaaagcgcccaatgccgcgcatcattaattatgctcagtgttgctcaacaacaaatatagcaacaaaagtggcagaagatcggacacaaaagctgtcagcacacgctgatctgtcaaacgcggcagccgaaaagaaatgccagcgacatcgtcagtcagtatttcagttcttcagtcgcactttcagccagtcaagcattcagtcatccggccatgcagccccttcttagccgtcggtactgccacttggcttttggctcttggcaacgcgacgcttttgttgcaactcaaacaaaaaatattgattaatcataaggaaaccaggggtatatttcgtctagaagtccgccattgctgaaggcgctgctgctacctattgctctgcattcacagttataggtgatatcgtgtcgggcatacttaaaataaatttcgtgaattgtcaaatttatgttcagattttcaattaatacgaaataatttaatttctcacttacctagatagcaaagtgtgtacaaagtgtgtaggaaactaaaaaaaaaaaatcgttgcccaaaacgcaaggttgtaatacaatgttcactgaactattttacgtgcagtgagtgcttttccagctccattcatggtgcgtgagcgctgaaaaccacgtcgaaatgtgtaatcaactacccatctctaaggggcattattcattcatggcgaggtgaatctgggttggtagttggctccaggaggtgtcagagtcagacttcaaacgatcgtaagctgatttttggccttcagctccggtatttgtcattgtctggtctgcttcagtgtgagtagtgtgttgtgtgtgcaaggggccttacaattcactcgttaaataatttttcatgcaactgagaccgaggggactaatcattctcgtttctacggctcgaaggcggcacgctttcttgtccattgtttgcgaataccgaagagctttccatcgcccattgtgcggacttctgttcgggaatcccacagcggatcggatggaacttagtatggtcagcacctgaagggccgcctcttccagtgtaatcgcattcgagtcgagccttggtttagttttggtacatatatagtgtagacgaaaatcaatttccgacggggcgaactcttaaatcgacattaattttccattgactgcgatgaggctttaagcagtttttccgctcccatttttaattcgctttcaatctggcagacatgcaaaaacattatccaccccacccggagcactctccaccccacggaaatgtaaattttaccccatgagtgagggagaaggagtgctgctggaaaagtttccctcgctgattttgattgacagctcttagcatccctgatggatttcatattttgagctcgcaggacgaagtgagctggagcaggagcagagcaacgcaccaggccaaaatgacagccagcgggagtggtaacctggcttaaacggtggacaaactttttaccaaacggctttcatttttccatggcaaccgagaaatatcttttcattttttagcgccagttcacccagcttccctatccgccgcagctaacacatgtattgaaagagcacaatatataatacaaatatcgaaaatatttacaagctgctgggccacgctgaaagtttttcaatttaaaacgctttaatttaaagtatttagccgaaatctcttttcccagggtgtcatctctcatctgtgtcattcaatttcggaaaaatttaaattgtgagaaaatctggataaatcattgagagaaattaaaaacaaacaagaaacatttttaaaaagactataaatggttatcattgtttgattttctattttcttttgctgcttttcatagcctaatgtctttttgatacaaaatctaacggataaaaaatatacgaataataagtaaactagaaaaggttttatatttaaggaactttaaatatgagtggtaatatgttattgattaatttataaaaaccatttaacattattcaatgcaactatacacattttttagacccccgactcctaaactcataaatttaataagataagtaaaaacttcttatcttcccttatattatattttcgaacttccccattcactagacttacaaaattaatatttaagcaaaactaaactctgaattattctcttgatctctgacctgccttaccacctattaggtaaaaatattatcgtaaaatatttcaacattaatcaaaaattttcacacctccagcagagcaaaacactgtccccattcagctgctgtcctggccaacaatcctgagtgtttagtttctttgaatttcttttccctgtttgtgtaaatgttcgtattgttgacatttgctggtcatgaaaagtcattaaatatatttctctaatttatctttcggctatggcagctttgctcggtggtggtaatggcattaaagtaaagttgggccaagtgaaaagaaagcggaaatgtgtgtctggccaccgatgctcggcttggcttggtttgggatctctgcggtctgatctcggaccacccacccttcaaccctttcatgtccgctaattaaaactaatcccgaggaaaggacccggccattcagggtgttgttatacttttcgcataactgtcaatcagtctcacaattaaatgattgaagacactaagctcggggtttgttatcctttatcaatatacctcataagttcaagctgagtcttatgcaaccaaatatagatatacgaatttgtttggagagctctcttcttagttggcctgagctggtttagtttgaatgcatatcaagtggatgcagatacaaaatgtttccatgagaaattgactttttccattgctccaaagacgacgtcgtcgtcagatgtctgttggctgttgtcttcctttggccggaatgattaatggttctgctctttgcgcattcgtcggcccacacccgcggcaacaaaaagacatccacatacacgtccagcatttcttgctccgactgtatctgtatcttattgtgccgctgaatgagaatttctactgcatcgcgcatcagcgtttggcgattggagttttcagctactgagctgcctcgctattgtctcccagtttttattgtgtctcccccctttttgattgaatccgcctcggcacttgcagatacttgagctgatcgcctggcatttaaagttttagccaactcgctgccgctcaaccgcagagagctcacattatttaaggccaagccaaggcaaaagttccccgtccccggctagaccgaccgaaaacctacaagataaattgaggtcattttttgccagtggccacctttggtcagtccggtgtccgggctggaggtcgggttcgggttcgagttcgggcctgagcttatgctctggtacgggtccaccttgttgaccggccacaaatgtccttaatgtgcatccttatggactgcggtcatgtgcaagtggtcgagatggtcgagcccaaaaaattccgcccatccccaactacttacgtaagtgttcacgagtagttagcgttagccaaacagccacgagtgtaccattcattctgcaaattccctggcatgtaagtaagtggggagtggatgatttagatggtgaggtgggcaaagtacactagaaagaacaaacacgcgcaaattggacttgaatttcctgaggcactgatttataggattcctaatttataggaaatttggaattaaaaataatttcatttcattatttttggtgacatatgagatatgatataatttagtggataatgatccgtttttttcctgtgtactgattataatatgcatctgtggcaaaaaaaacttgaccatccttggcgcctttgaccatttgtgcaattgttgcaaaatttacgctcattttaattccagcccaaaagagcggcaaatgcgttaaatattccgcttctgaccaaactctttcctgtcccgtgtctgcttgtgtttttggggtgttagttcaacccgaaatataaacataaatccagtccttcagcagaagaggtggcgaaagaaaggtcctgttggtggacaacgagtgcgtttaagtgttaacatgtaaatgatgctgttgaagcagttaataggtgtatgccaagggctgtaaatcatcgggagcgtttcctttccttagaaattaattttattcgcagagcagggaggagatttacgagcaaataataaccaagtgatgattgcgagaattagacttggacctcctcatcctcccaatgaaaagcatcattcccagtaacctaatccaaaggcagctgcaaagtatccttcgctcgtagtttgctgataagtttccattctgacttttccggcatttcatccatgctgatgacatttccaatgtctccccagccctctggccatgacaaaacaaaattcattttgtaatttccaagccacctagaaaaggccaaagccagccagctgtcatttggggagttggcgatgtgggatggttggttggtcggattccattttgaccaggctgcagaaattgcactcaacttggctgcctagcatctttcccactccccccttccgcccatcgactaccgccctctggcactgccacgccctccgcccgattcgggtttagaaaattatctttttgcttgtcgtcgccaaaaaggaaatcatattttctgcttttgtgcactttacttttcagttttcgttggctgcctctggctgccactgcctccagtttcagttcgctcgtaaacagttttcgggtgcaacttttgtgcgaaatttatgctttcgttccgtatcggtatctgggcacttttcgcacaagtacatgcgacttggtcctgggaaatgggaaatggccctgtgcctgaatccctgtgtgtgtgtgtgagtgtgccccaccaggtggtgtttatggcatccgttctgcgagtattgatgaaggaactcgggctcgcatctgtaattcaatcagtgtctatgtctggctcctcgtcctgctgctgccaggatactgttcctttcgccatttgccgctattgagactctgtttacgcagctcgttcagctggaatcgccgtgcttgttgccaaaaggcaagtggcgaaaaaatacaaaaatattttgcaatcgcatcaatgcaaataaggtggcagaagttgaactgcgggaaaggtagcaaaatgtcctgtttcctaaaatgatatgcgcatttctttactactcaatgcgagttttatttagggaaaatatattttcgctgagtttgtgtcctagcagtttagtgatccctatcattagagttctttttagtttcgataaggattttatatcgcgctttggatcgaagaatattcaatggctcccgattttgataagttttcctcatattttggtttgggcttaacgatctcgaaatttaagtctgagttatacaaacggcaacattgattatatagatatgtagaaataacactttttaactttactaaggacgttccaacaaccttgaacatatttaccattgggataaaatcctgttgtcgcgttagttcattatatagtttataataataatatagtttattatattatacacattcaggcgtgaaatattttccataaaatgaagaccagtttttcaaaaaaaaaaaaaaatagattttcctttgctattcaaattaagtttttcacgctccccctgggagctatgtacattccaccgaagctgctggctgaggcttccgtttggtagccgaaccacttgagtgccctgctgtgggcacgtctttggctcactgattgattgattaggtttttgttaattacttaacgctcgagctgcgagtgtcgcgactcagcggcgcaggaaaaacgcttgagtcgagcgacttgcggcgcggcatcagctgcacttttcggcaggattgctggaaaaagctgaaagttttcttatctagttgggcgagtttctctgaattagttatgccctctgacgagctgatggattggttacgggcggagatagaaaggtggaaccctcgaagcacgggccctatcgcgaatgcaatttgttgacgcatgtaccacggccacgcccgcacggagacatgttggtgggaaaacctcgatgaacaaatagaaaaattgaaaaataaaattcacattcactccgcaagtcttaaacgaacaaaatgcaatttctcaattgcagctgaattcgttccagaaaacggcctgccccgacgactccgcaccgcatacaccaatacccagctgctggagctggaaaaggaattccatttcaataaatatttatgccgcccaaggaggatcgagatagcagccagcctggaccttacggagcgacaggtgagtgcttcacaatgcaatttattccgctgcattcgcacacggcagcggaattccattattccgctgacaaattgctcacagccagtagttcagtgtgctccctccccccttttgactcttttaattgcacacacctgatcggaactcaaactaatcccatctcggttgcaggtaaaagtttggttccaaaaccgccgcatgaagcacaagaggcaaacgctctcgaaaacggacgacgaggacaacaaggacagcctcaaaggtgacgatgatcagtccgatagtagtaagtaaagcacatataaatatatacatacatatatgattggttgtacaataacatttaagagttggttagctttatacattatattatattattctattcagaaaaggaaaacatttgattgggaaatactaaccgttaatgcatattaatataaatatcagacataatgttttcaattcgttgaccctaaaaggattcagagtccaaagaaaactgtaccaaaatttgaacttgctcttgggctctaccaacaagttgttccacttttacttttcggttttgcatggtttcgcttctgaggcttttacgctgaagtaagagatggtgtagcttatcaatcattgtcagagcatgggatgggatggaacgacttttggctgggcgaccctcgacgtgctaacccctttcgcgtgagagttccgagttggttctcgaccctccgctctcctctaagtctcccacttacgaaaacaaatcatcaatattcctggccatatacctactgatttgctttcatcctatcctcccgtgaaatgcagactccaattcgaagaaatcgtgtcaaggctgcgaactgccatccgatgatatacccgattccacgtcaaattcccggggtcacaacaacaacacgccgagcgccaccaacaataacccgagtgctgggaaccgtaagttttattataaaatgtggtaacatttctaataatatttttaaaatgaccagtgactccaaactcgtccctggaaacgggcatctcctcgaacctgatgggcagcaccaccgtatccgcctcaaatgtgatcagcgccgactccagtgtggcatctagtgttagcctggacgaggatattgaggagagcagccccataaaggtgaagaagaaagacgatggtcaggtgagtcagtcatctatagtgatggagtttctaattaaaacttaggattatatgaatgaaacagcttaaatagaatgaattatatttctgataattttagtgcgaactctaaggagacaatacaatattttggtagcaatctaacaatcttcaatatatatatttgaagaatatatataaaaatcttgtttattttattaacaaattggtttaatactacacttcaggtcatcaaaaaggaggcggtctccacctcgtcgaaagcctcgccttttggttatgaaaactccactcccagtctggtcagttttcgacgggattcagatgcctccgctgtcggaaatgcacccaccagcaaggcggtcggcaagaaacgctttcagagtgccgccaatgccattgccacgcccacgcccctttcggacagtaatagtggaaacgggagtggaggcggcccagctggcggctactttccaggctattatcctagtcccaagcagcagcagcaagtgcagcagcagcaactgcacccgcaacagcagcagctgccgcagcagcagccgcaagactactacggcaaatacgatatcgaattcgccgcctcgccgcaccacaatccgcacaacaagcagcaggcgctgcacggcgagtacctaagtcccaagccaagttcagccaatttccaccaaaacagtcaacagcagcagcagaacgaccacttctattacaactacaacgacaccaacggcactccgtacttgaaccaccagcagcagcaccaccaccacgcacagcaccaccagcagcagcagcaccaccaaaaccatgtggccgactttgaggggcctgtcaacggacccagcaactttaacaatggcgcctactacgacaacatgagttttcaacaacaggctcaagctcaccaacaccaaacggtggtcttccaacagcagcagcctcaccagccagcggcgattaaccaccagtaagtagcaagatatcaatcacgatatctgctttatatgcaagtttaaagcatgccgttttgttaattctgtcgatcccgctgttcaacatgagttttttgtatagaaatgccaatgaatgtcgggcttatatatgcacaagttccaagtcggatatataatcatttaatgactagttcctggtgccgtaatcttaaatcgatatgttttacatttttaaacgatatatcgtcttaagttaacatttgcttattttggttatttttgcgatagaaaaaagtagttttttaatatttaaatttcagacgctttcagcataacttggctaaaacattttaaacgcctatgcagacttgtttgaataaatttaatgatcgtatgcatgcgaaaatatacaaatttatttcatatacttttgttgagataatattatatatttttaagttttctggacattgttctttgcttaaccatccataaaataaaacacattccagcactgacatcgtagctagtacacaagccatacacggttttggtcttcgacaaaagttagccgaagagcaaaccacttgcttagggtgtcacaacacccagattctgtcagctattaatgctcctgcgataatctttttgcgtctaagtcgattatttgcccattgaaaaacgtaattttcaaaaatgatgtaaactattcagtggtttatctaaaaatgccactcatttaaaactgtaattttctcattaggcaaatctttataactgtacgcaaaaaacttttctttcttatgttattaatattcacaatcaagacatatatttttttaataatttaaattttatcaaaaagaatatatctttatgtttttgctttaaaaggaaatactctatgcaataacctgcacgtctgctattttgaccacgagctctgatcctttctcctttttatctcgctacaggcacatgcatcacctgggaaatggggagacatacagtgctctaggcctacagatggagaactgcgagggctacaacaactttggggccgccggaaccggtggtgggtactacgaggcgggtcagcaacctcctattccggccacccacggccatggacaccatccccaccacgtgcaggtgccggctcaggcgcatgcccccatccacgcccaccacaattctgccgcgattcccggaggagtgggagttggaccgcccccctcgcatatccatggattcgccatcaatgggggaccggctgttcagggccaggcattcggaaacaacggaagcactgcagctgggaccgctgcgatcagtggtctggagaactccaatagctcggacttcaactttctgagcaacttggccaacgattttgcgccggaatactaccaactcagttagttcatgtaggaagtacgccagaggccagtgtaaatatttgttagcctaattcgccgcgtgggcgtgagtcttgtatttctattcagtgtcgtagcgtcgtaagcacattgtccttagcacatatctgtacataataagctattcctctttttagtctaatcaaatcgaaactgttatgattttctattggcttcaagtcagatgatgctctatcttaaaattccaattagaactacaacagacaacaaaattgtaaatagatagaaaaattaaacgactttcgcacaagtccacatcaatgattataaattactgaattatctttgataaactcggtttttgtatatatctgaagtagcttaaatcaaaaacgtaaactgtcaataaatcttatgtaaaattataaataaaagtttggatcgctctggatccaagtgcaatttctcaatgaaaaaaatttaatttaatatcttaaggcactctcagttattttgatgtttgtcatgttcgtatgttgatctaaatttttccataatagtaaacaaatatatattataaatatgacttaaaataatggaatagatatctttgtaaggaaaaagaataaaaaataagtaagacaaaaaactttcacaataaaaaaatcttacagaatactaaagacgacttggggttgtatgacggttgacattaacttaagttgctaacattttcttggctacagtcggtgctcaaaaatgtatttttttttttttgagaaaatggcattggcaacaatattacggttggtatttgcaatctaatttgcacttcaaggaaatcaacaagccaccaaccacaaccgagataggtgcaccgagtaggcgttactaaaatctattataattgcccgactcgaattcgaagctcctatatttctcagatgaacggagtgcacagtgatcaccagatttcgagttacaattaaatccttgaattagtaatatatattgatagtgctttgaaaagttttggagtttctctagattatgctttgttttgtctttaaagggtaatgtaatccgttcttatgtccactgtaaactccctgaaatcttaaaataataaattagcacgaaagtaatagagagatctcgttgtttcgataaatattatctaccaagaaaaatgtctaggccacggctcttgaggagtttgtattttgtcaggctcatccttttaggtcattatcaaatctacaagctgaaattgctggaactagttaaacatgaatctaatatcttattcaaagctagagcgaaatacttcagctatctcaaaacctcaaaaccttttttaatttaaatttaatttggtattttggtgattttaatcccatcgctttgaaatttaaaccatgccgctgtactagg

SEQ ID NO: 26378 - DNA, 3717 bp, DROSOPHILA
ggtgctattggatggaatggttgttggctgctatctagctctcgggaaccgcacgaagctccccaaaagccctctgtctcgctctcgctacgaatcggttcggtatctaaaaaataatatttattaaaatgacagctacaaaaatagttcaaaaattttgaaaactaaaaagtgatattattaaaacgagttgaaaccaaaagttttactatacggttgagaagcactttaggaacccctggaaacccggttctgcgcacctcttgaaggccagagagggacagctagtgcccacatgtgtatgagtgcgagtggagaaaactatctcagacgaattgcaacgactgagtgtgtgtctgtgtgtggccattgcagcgatcgcagcgactctacaaaactctacaaaatcaacacattccgcatacgcaccgttgtacagcgcgtacttgcactattgtcgttatcgccgttgtttcgtcggttgtgttggcctttcgcgtcgccatggctgccaaaaggtgtgtgtctatgtcaacctgaaagcgaaaaaccaactccaaacaccacttgacggttgagcaaacacaacggtggccatatttacattcggatctgggttccctcgctctcgtcgcggttgtcgcctcttttcgcggcccacagataagccctgacacactgaagttttacgcaaaacccgcatcgcaaaagttgtgccggttgaaactaaaaaaaaaaaacaaacaaaaagttaagccagttactatgagcgagtgcagacaatagtgaaaacggtgacccaagtgataccggtgaaatttccacaaagaacgcatatgtcaacgtaagaggagaaatatggaatactgtggtctgtaaatgatcaacttaatatggttcccaagctgaggaacatctaatacgctcaggaattgaaatagaaagaatctaaaaaaaattatacccaagctatgcaagaagtctgcagctccttggacacgacctcaatgggcacccaaatcaaatcggaatctccactcaacccgctgcaggtgcaaactggacagacgtccctgccagtgggtggttgcggtggtgcgggcgtcgtgggtggtgtgggtggcgtgggagtgagtgttggtcagcctggtatcggacagcagggggtgccacctgtgccgtcggtgctcatggtcaacaagatgaccccgaactgtgataaacggagcgcggacacggcctattggatgacagcatccgagggcgggttcatcaattcgcagccgtcgatggctgaattcctcaaccacttgagtccggagagtcccaaaatcggaacacctgttggatccggcgccattggcggagtaggcgtcaacgttaatgtcaatgtcggcgtcggagtcggatatccggttggcgttgtccctcaaacgccggatggaatggactcggtgccggagtatccctggatgaaggagaagaagacatcccgcaagagcagcaacaacaacaatcaggctgaattcgttccagaaaacggcctgccccgacgactccgcaccgcatacaccaatacccagctgctggagctggaaaaggaattccatttcaataaatatttatgccgcccaaggaggatcgagatagcagccagcctggaccttacggagcgacaggtaaaagtttggttccaaaaccgccgcatgaagcacaagaggcaaacgctctcgaaaacggacgacgaggacaacaaggacagcctcaaaggtgacgatgatcagtccgatagtaactccaattcgaagaaatcgtgtcaaggctgcgaactgccatccgatgatatacccgattccacgtcaaattcccggggtcacaacaacaacacgccgagcgccaccaacaataacccgagtgctgggaacctgactccaaactcgtccctggaaacgggcatctcctcgaacctgatgggcagcaccaccgtatccgcctcaaatgtgatcagcgccgactccagtgtggcatctagtgttagcctggacgaggatattgaggagagcagccccataaaggtgaagaagaaagacgatggtcaggtcatcaaaaaggaggcggtctccacctcgtcgaaagcctcgccttttggttatgaaaactccactcccagtctggtcagttttcgacgggattcagatgcctccgctgtcggaaatgcacccaccagcaaggcggtcggcaagaaacgctttcagagtgccgccaatgccattgccacgcccacgcccctttcggacagtaatagtggaaacgggagtggaggcggcccagctggcggctactttccaggctattatcctagtcccaagcagcagcagcaagtgcagcagcagcaactgcacccgcaacagcagcagctgccgcagcagcagccgcaagactactacggcaaatacgatatcgaattcgccgcctcgccgcaccacaatccgcacaacaagcagcaggcgctgcacggcgagtacctaagtcccaagccaagttcagccaatttccaccaaaacagtcaacagcagcagcagaacgaccacttctattacaactacaacgacaccaacggcactccgtacttgaaccaccagcagcagcaccaccaccacgcacagcaccaccagcagcagcagcaccaccaaaaccatgtggccgactttgaggggcctgtcaacggacccagcaactttaacaatggcgcctactacgacaacatgagttttcaacaacaggctcaagctcaccaacaccaaacggtggtcttccaacagcagcagcctcaccagccagcggcgattaaccaccagcacatgcatcacctgggaaatggggagacatacagtgctctaggcctacagatggagaactgcgagggctacaacaactttggggccgccggaaccggtggtgggtactacgaggcgggtcagcaacctcctattccggccacccacggccatggacaccatccccaccacgtgcaggtgccggctcaggcgcatgcccccatccacgcccaccacaattctgccgcgattcccggaggagtgggagttggaccgcccccctcgcatatccatggattcgccatcaatgggggaccggctgttcagggccaggcattcggaaacaacggaagcactgcagctgggaccgctgcgatcagtggtctggagaactccaatagctcggacttcaactttctgagcaacttggccaacgattttgcgccggaatactaccaactcagttagttcatgtaggaagtacgccagaggccagtgtaaatatttgttagcctaattcgccgcgtgggcgtgagtcttgtatttctattcagtgtcgtagcgtcgtaagcacattgtccttagcacatatctgtacataataagctattcctctttttagtctaatcaaatcgaaactgttatgattttctattggcttcaagtcagatgatgctctatcttaaaattccaattagaactacaacagacaacaaaattgtaaatagatagaaaaattaaacgactttcgcacaagtccacatcaatgattataaattactgaattatctttgataaactcggtttttgtatatatctgaagtagcttaaatcaaaaacgtaaactgtcaataaatcttatgtaaaattataaataaaa

SEQ ID NO: 26379 - protein, 777 aa, DROSOPHILA
MQEVCSSLDTTSMGTQIKSESPLNPLQVQTGQTSLPVGGCGGAGVVGGVGGVGVSVGQPGIGQQGVPPVPSVLMVNKMTPNCDKRSADTAYWMTASEGGFINSQPSMAEFLNHLSPESPKIGTPVGSGAIGGVGVNVNVNVGVGVGYPVGVVPQTPDGMDSVPEYPWMKEKKTSRKSSNNNNQAEFVPENGLPRRLRTAYTNTQLLELEKEFHFNKYLCRPRRIEIAASLDLTERQVKVWFQNRRMKHKRQTLSKTDDEDNKDSLKGDDDQSDSNSNSKKSCQGCELPSDDIPDSTSNSRGHNNNTPSATNNNPSAGNLTPNSSLETGISSNLMGSTTVSASNVISADSSVASSVSLDEDIEESSPIKVKKKDDGQVIKKEAVSTSSKASPFGYENSTPSLVSFRRDSDASAVGNAPTSKAVGKKRFQSAANAIATPTPLSDSNSGNGSGGGPAGGYFPGYYPSPKQQQQVQQQQLHPQQQQLPQQQPQDYYGKYDIEFAASPHHNPHNKQQALHGEYLSPKPSSANFHQNSQQQQQNDHFYYNYNDTNGTPYLNHQQQHHHHAQHHQQQQHHQNHVADFEGPVNGPSNFNNGAYYDNMSFQQQAQAHQHQTVVFQQQQPHQPAAINHQHMHHLGNGETYSALGLQMENCEGYNNFGAAGTGGGYYEAGQQPPIPATHGHGHHPHHVQVPAQAHAPIHAHHNSAAIPGGVGVGPPPSHIHGFAINGGPAVQGQAFGNNGSTAAGTAAISGLENSNSSDFNFLSNLANDFAPEYYQLS

SEQ ID NO: 26380 - DNA, 3495 bp, DROSOPHILA
gactcggctattgatcctgatcaagaacatatatactttattccgtcgacaacgcttccttctgcctgtttcatacttttcaaaaaaatttccatatccttttactctacgaataactggtatgaaaatagcaatggtgaggaactactcggaatggatgtgctacaagttagcgtcgatggtggactttttgaacatgggggaaaaaccttatttatttattttttcgttatttattggtgaattctaaaaaattaaaatgcaaatatgttaagaaaagaaagaactaactatttatgtacgaccaagattgtaggactcaagaaagtgcatgaaatatgcaattggaaaatggctctccactccttggggaatatctctactcgcagagcgtgttccaaaatgcaccctagagcatcttaaaagacatttcttaaagtacatttaggaaaaatgtctaaaaaaattacccacagtttttgagataattgcataatagttggtcaacatatgaacactctgtgtgcagttgcgaatttcggcccctatcataactcaaatcagcttattggaacatcgcttcccagttcaacacattattgtcgccaacgacggctacaccacgaaaattgcaattcgcaattacaacagcaattaaaattctataattttcatgccatcattaaacgaaaatgattgcctgatagttattttagcacggcattctgtcagctgcgacatattatgtatatacataaatgttcagcatataaactgtttttatgtttctggtacacttattattttgcatataaaggtgagtaatggtgataatggtgatacattgcaagctcactatatgcataattcacattccgctgttcctaaactgttgataattctttgaagctgttttgatgcaaatggaattttaatgatttacagattcgatatttactagaaattcaacattgatgtttctttaaatcttgtgtttcagcaaatattagggttttattgtagacgctaaaatacatctttaagatattggctattttgtgaatagtctcagtttcgtgcattgggaagcctttttaagaaatatcacgttttatttggatttaaaatgaaaacattgagtgattataatagcaaaaataaattgtgctgacgtgcaaacacaaagcatttcagctcaagcgttccgacagcctccattttgaccgaaataacataattcttaattgttttcttatattgagcaatatgatcaaaaatgaacaacgtccccttaattttgaaaaatgtatggaagaataaaaatggtcgtgaatgttagaatcttactaacattttatttgtaggtccggaatctgatgatgagctcaagaaacggttggagatagaaaaattaattaataaaaacatcgacaaaaatattagttttgatgtacttgtgaagttatccctggcgccttacggattggttaatgacgattttagaaggattttatggcctcagttggcaggagtcgacattaaccatttaggacaagctccaacgctcgataagttccagtgccatccagaatacaatcaagtggtgttagatgttaatcgttctttaaaacgatttccaccaggaattccgtacgagcaacgaattgcactgcaagaccaacttactgttctgattttgcgagtaattcaaaagtatcctaacttgaggtattatcaaggctaccatgacgtggctgtaacatttctgttagtggttggcgaagaaatcgcatttgcaataatggaacagctctctacaacacatttttctgaatgtatgcaggagactatggaggccacgcaaaggcgacttatgtttatttggcctatcattaagtttgaaaacccagaactttatcagttcttgcaaaactcgactgtgggaactttgttctctttgccgtggtatttgacttggttcggacatagtttaacatcttatagaaccgtagtccgcttgtatgactatttccttgcatcgcctatttatacatcaatctttgtaacagcagcgattttactttatcgatcagatgaaattctaaaggaggactgtgatatggcatcggtgcattgtctcttatcagtggtatcttatagcttaaaatattaatacatattttaaaaacatattttgtagataccagaagatttaccatttgaggaccttttgaaaacatccagttcgcttttaaataaatatagcctaacacttatagagaaagatgttgaagaacttatttgtcaagagtaagtaaaaaatttcgttagtactctcaaaaataatttgtttcttgtaatagaaggaggaaaaggaaaaccgatgaagctttaatcgtaaaaagacgtcaaccggccacatcgaatagaattcctatcataacgaaatggcttccaaatattttaacagcaaagccggtgatattgacaacagcaatttctattgtagtgggtgtatgtgcctattattacaataaccagtatttggcggcaggtataagctgattataaaagtaactgagtatatcgacatttaaatttgttccttataccgcggtataatcacattctcccgaaattctgtgttttggtgaagaccttattttaatacattgtacaattctactgtcaccaaatacttgaaatatatatatatatatatctttagatttacttagtattgtttcaaatctagcgagaaaaacaagagagaatgctattcagctagtgggaacacaaacgcgaaatatcatttttctgggatatcgctatatattagggaatatattaaaaaaaaaatatacaaattgcttaaaagtgcgggagtgaccgtttgtgggcgttttgtaggtgaaaggatggccacattgttttggcatacagataaaaataggcaagacaaacaataaaacgaacatttttcaaaagtgtgggcttggcagtttccctaagaagtttttgaaaacatattgcattgacttgtttagtcaatctgggtaagcttcaatcgtaactcttataacgcgatgtttggtaagagatcttccgacgttaagagctcaacagaaaaccaacgcaagtttgcatgcgttgtttcggctgctctcaaaaatttcagtctacgtatgtatatgtacatccaccgcgttgagggaatacaaattaaaatcttacgcaaatataggtatcataggtatatatcaacccaaatgttgataatataacgaaattgttacaaaattctcgaaaccggacgcagcaacaaacgttttgaaacttaaacctatccgtttgcaatagtttagtgagacctaagacaacgctcccaaactgttcatgattcaaaattaaagttctaccgaagtgcaaagtgtggataccgaagtgcttggcacatgtataatatgttctccttgtattttcgtaccaattaag

SEQ ID NO: 26381 - DNA, 1384 bp, DROSOPHILA
caaatattagggttttattgtagacgctaaaatacatctttaagatattggctattttgtgaatagtctcagtttcgtgcattgggaagcctttttaagaaatatcacgttttatttggatttaaaatgaaaacattgagtgattataatagcaaaaataaattgtgctgacgtgcaaacacaaagcatttcagctcaagcgttccgacagcctccattttgaccgaaataacataattcttaattgttttcttatattgagcaatatgatcaaaaatgaacaacgtccccttaattttgaaaaatgtccggaatctgatgatgagctcaagaaacggttggagatagaaaaattaattaataaaaacatcgacaaaaatattagttttgatgtacttgtgaagttatccctggcgccttacggattggttaatgacgattttagaaggattttatggcctcagttggcaggagtcgacattaaccatttaggacaagctccaacgctcgataagttccagtgccatccagaatacaatcaagtggtgttagatgttaatcgttctttaaaacgatttccaccaggaattccgtacgagcaacgaattgcactgcaagaccaacttactgttctgattttgcgagtaattcaaaagtatcctaacttgaggtattatcaaggctaccatgacgtggctgtaacatttctgttagtggttggcgaagaaatcgcatttgcaataatggaacagctctctacaacacatttttctgaatgtatgcaggagactatggaggccacgcaaaggcgacttatgtttatttggcctatcattaagtttgaaaacccagaactttatcagttcttgcaaaactcgactgtgggaactttgttctctttgccgtggtatttgacttggttcggacatagtttaacatcttatagaaccgtagtccgcttgtatgactatttccttgcatcgcctatttatacatcaatctttgtaacagcagcgattttactttatcgatcagatgaaattctaaaggaggactgtgatatggcatcggtgcattgtctcttatcagtggtatcttatagcttaaaatattaatacatattttaaaaacatattttgtagataccagaagatttaccatttgaggaccttttgaaaacatccagttcgcttttaaataaatatagcctaacacttatagagaaagatgttgaagaacttatttgtcaagaaaggaggaaaaggaaaaccgatgaagctttaatcgtaaaaagacgtcaaccggccacatcgaatagaattcctatcataacgaaatggcttccaaatattttaacagcaaagccggtgatattgacaacagc

SEQ ID NO: 26382 - protein, 282 aa, DROSOPHILA
MIKNEQRPLNFEKCPESDDELKKRLEIEKLINKNIDKNISFDVLVKLSLAPYGLVNDDFRRILWPQLAGVDINHLGQAPTLDKFQCHPEYNQVVLDVNRSLKRFPPGIPYEQRIALQDQLTVLILRVIQKYPNLRYYQGYHDVAVTFLLVVGEEIAFAIMEQLSTTHFSECMQETMEATQRRLMFIWPIIKFENPELYQFLQNSTVGTLFSLPWYLTWFGHSLTSYRTVVRLYDYFLASPIYTSIFVTAAILLYRSDEILKEDCDMASVHCLLSVVSYSLKY

SEQ ID NO: 26383 - DNA, 2129 bp, DROSOPHILA
ctatgccacacccactcaacgttctccaagcggattaatttcagctgagtcagtaagtacaaacgtctcattcgctgttataaatcgacgaaacaagagtcgatccagtgctcgtgcaactgtgctggctggaattatactaacgtttgacaatatttctaacaacaaattcaatgcgatagacacgcatccatttgggccatcaattccataatgataatacacccaaccaacattaaaaatcggagtatggaatctgagtatctgaagaccttcgtttattccccagcgatcccgatataaaagtaatgcctgtcatcaagcattatgtatcatgtcattagtttttgaattattaattgaggtcaataaacaaatctggacgacggtagatatttacaatgcataagccatttcctgagcaaactaaatgaggcagctctgcttgttgcaccgagaactccacatgaagtagaggagcccagaccacattaatttcctactaaaagattgacactgcttcggataaaacgaagagcacgaagggaacaaaagaacaggagacctacgcatgcaacggattcactgttgcagtggcgctgcaaaaaagtgaagaaacttatagcaaaactcacccaataaagctccaggagcagatctccgtgacaatagaattagtattacagtaccttgttcatgtattgcgatactttccaaaatctgggatggtgcgtaagcacgaaaggccacagacagacgttggctcttaaaatcgcaccagtctactcccatccctaggaaaaattatggagaagctgatccttaacaggctgctcgctttctaaaatattaccaaagcgatccccaaattccgccagcagttcctaaaatcatttgcttatgtgctgccaagtctctctctatacttcctactctcgcgcatacacctttggtttagcgttctgcatactcgcgcttaggctttcacaggtaaacttacctgccaatataacccgcttgcgccatcatgccatttctatcatccatcactctctgtggctgattatttacaacttttccgtcatcatttcctttccaggtcccatcatcttctttgaatgattgacttctgaaagtattaaaaatttatttttggttaaaatatttcttttggtaaacttagaaattatgtgacatttttgctttgtcaaatgtaattctaatagctagaaattgcagaaatagacgcgatcgggttttttaaaaatatatatatgttatgctaatattagtaaaatactcaaatgtcatctccttagcttcaacgttgttcaggtttctttttgaaagtgtaaccttcagagctgtccccagcaagtttatactacgtgcgtctctacgcttgaccttaagtgtcgtaataagtgtgtcgatgtgtcagtgaggtcagtgagcagtacgttccgtatgtggtcctgtttgagtaagtttgtaagtaagtctggtttcgtccgtgtaagtcttatacgtagtcacattcgttgtgtgtcctgagaagccgtaatcttgccaaatggttacatacatacgaccccgtctgttacaagtaagtaatttgtcaatttaactgtggctgtcgtgatgatcgtcattaaaagcgctacaactgttgatgttaaaagaagtaaacaaaatttaattccaatttcattcttatttcctagtatttctaggatccaattccatttccaattttttatattgttctaatggaccacccctacttttataagaactaagtctccttccatgccctcaacgcatagtggagttggtttatttcccaagcgtttgtttaatttaaccgtatctcctacttgataactcttattttccgtttttattttcctgttcgattttttagactgtgctttcacaagtctatttatttgaactgatgagttcaactggtttcattttggttaccgaatgaattttttttatattcgactgttgaaagcagaatcaaatcaaccgaagagaatttagagacctttcattgtcgcaataaaaagtgttaattttgggaaaaatatttataagttgtgtagaggcgactgaggcagtgg

SEQ ID NO: 26384 - DNA, 129 bp, DROSOPHILA
aagtcaatcattcaaagaagatgatgggacctggaaaggaaatgatgacggaaaagttgtaaataatcagccacagagagtgatggatgatagaaatggcatgatggcgcaagcgggttatattggcag

SEQ ID NO: 26385 - protein, 13 aa, DROSOPHILA
MMGPGKEMMTEKL

SEQ ID NO: 26386 - DNA, 3292 bp, DROSOPHILA
ttattttgactatgaaactcgtgactttggtgggcgaatcgcttcaaagtcatttcggatgttctggtgttgttttttcgtgtcaggttgttatagttagtttggtttttattaacaataaatttcaattacgctcacgatttggatatcaacaaagttttcagcggcacgaaaagaacaaaaacaaagcagaaaaaagtccacaaatgtggtgtaaagtggtaacattgaacatttttttcttccgattttctctagaatctttatgcttaatctcaaccttctagcttttatagtttctgagatcccgaccttcatttggacgaacagacagatggagagacggacagacggaaatggtcagattgactcggctattaatcctgatcctgtataaaaagtaggcaagaccagtaacgttactgttagctatgacgaacagtctggtgaaattagtaaatataaacatatattaaagacatatatcccaataacattagggaatacaaaacattaatgaaaacttgatgtatttcttgttaaatacgaaaggataaccgatagttatttatgctttcagtagaggacacttataaaatgcatatacaaataaatgagacccaaaaatcaaataatgaacacattgtgtattgcacgaaataacttcacatgctagtaacttaaatatcttaaatataataatcttgcaccaacgtgctaggcatgagtggtacgctttgccctggtgctttgtgggttattagacagacagtcgcctcgagcgtataattaaaccatttgctagccgaaccaacccgtttcacctcgtcaagttttccgcttacccgtggcaataaattatcttgtattttaaagactaattaggcgacaacagagttttgttcaaagtttttctagccagccctcgaaacatttttaaatacacttaaatgggtaatcattcttagtttaaatttcccagcactcagtaaaggacgaaatgtcaaagctaatcgaggtgtttctgggtaatctgtggacgcagcgttttaccttcgcccgaatgggtttggatttgcagcccgataaaaagggcaatgttttgcgatctccgcttctttattgtattatgtgtctgacaacaagctttgagctctgcaccgtgtgcgcctttatggtccaaaatcgcaaccaaatcgtgctttgttccgaggccctgatgcacggactacagatggtctcctcgctactgaagatggctatattcttggccaaatctcacgacctggtggacctaattcaacagattcagtcgccttttacagaggaggatcttgtaggtacagagtggagatcccaaaatcaaaggggacaactaatggctgccatttactttatgatgtgtgccggtacgagtgtgtcatttctgttgatgccagtggctttgaccatgcttaagtaccattccactggggaattcgcgcctgtcagctcgttccgggttctgtgagtaatcttaaaaagtatgaacattttaatcaattggtgcactttggtatactgtcattttataagttgatcatttctataaattacccgattttttgtaatatgaaattatgtactgagacacttttttgttgttatctcaggcttccatacgatgtgacacaaccgcatgtttatgccatggactgctgcttgatggtatttgtgttaagttttttttgctgctccaccaccggagtggataccttatatggatggtgtgctttaggcgtgagtttacaataccgtcgcctcggtcaacaacttaaaaggataccctcctgtttcaatccatctcggtctgactttggattaagtgggatttttgtggagcatgctcgtctgcttaaaatagtccaacattttaattatagttttatggagatcgcatttgtggaggttgttataatctgtggactctattgctcagtaatttgtcagtatataatgccacacaccaaccaaaacttcgcctttctgggtttcttttcattggtagttaccacacagctgtgcatctatcttttcggtgccgaacaggtccgtttggaggctgagcgattttcccggctgctatacgaagtaattccttggcaaaaccttcctcctaaacaccggaaacttttcctttttccaattgagcgcgcccaacgagaaactgttctcggtgcttatttcttcgaactaggcagacctcttcttgtttgggtaagcatattcctttttattgtattattattttaatttatttgattcaaaaagtttcttattttactaattgatcaatacaaataatttttttatattattttttaaagatatttcgcacagcaggctcttttacaactttgatgaacgctctctacgcaaaatacgaaacgcattaaaaaacaaagtcaacatttatgactcaataaagtaatttattaaattattatttgtgtactattttttaaatcaattttatttaggtattaaattacaattatcatatctggttttatgtacacacacataataaatttatgcttaattggacaaaaagaattacattatagttgcgcataaaatatattttatatatatttatataaaaatgtaatatatatgtagtagactacgggctaatttaaaaatttaacaaacattgcgagattaaaagcagacagacaaaaaaaaaactgaaaaagtatatgtatatgtattagataaagtgcttgcatttgttgacatggaaattggggtggctattttgttgtggcttgcgtttatctcgaaatataataaataaatctaacaacggtattcgaaagtttgggttctggcttatagggttattctttttgacgcttaacttagagctagtaaaggctctatttcttgaggatcctggactttgggggccgttttttttcggtattttttttgcaactttgtattagacaatttcgactttattttcgaagaagttttgttctcaaattcggtatttttcagctctttttccctgtccagctgctctaactgttcaaatatgtttttaggatgcggatgagagtgtggtacagaggcatttttggccgcatacaccaccacaaattgcgaaaacgccgtatcggcgggcgtgttgatatcggcaaaatcgcgaaaattagcgaactgctcctctggatacgtgtacttttgaacaaaaccctcagatggtcgaccgtgtccattgttagcatctccatagatgtaatca

SEQ ID NO: 26387 - DNA, 1146 bp, DROSOPHILA
atgtcaaagctaatcgaggtgtttctgggtaatctgtggacgcagcgttttaccttcgcccgaatgggtttggatttgcagcccgataaaaagggcaatgttttgcgatctccgcttctttattgtattatgtgtctgacaacaagctttgagctctgcaccgtgtgcgcctttatggtccaaaatcgcaaccaaatcgtgctttgttccgaggccctgatgcacggactacagatggtctcctcgctactgaagatggctatattcttggccaaatctcacgacctggtggacctaattcaacagattcagtcgccttttacagaggaggatcttgtaggtacagagtggagatcccaaaatcaaaggggacaactaatggctgccatttactttatgatgtgtgccggtacgagtgtgtcatttctgttgatgccagtggctttgaccatgcttaagtaccattccactggggaattcgcgcctgtcagctcgttccgggttctgcttccatacgatgtgacacaaccgcatgtttatgccatggactgctgcttgatggtatttgtgttaagttttttttgctgctccaccaccggagtggataccttatatggatggtgtgctttaggcgtgagtttacaataccgtcgcctcggtcaacaacttaaaaggataccctcctgtttcaatccatctcggtctgactttggattaagtgggatttttgtggagcatgctcgtctgcttaaaatagtccaacattttaattatagttttatggagatcgcatttgtggaggttgttataatctgtggactctattgctcagtaatttgtcagtatataatgccacacaccaaccaaaacttcgcctttctgggtttcttttcattggtagttaccacacagctgtgcatctatcttttcggtgccgaacaggtccgtttggaggctgagcgattttcccggctgctatacgaagtaattccttggcaaaaccttcctcctaaacaccggaaacttttcctttttccaattgagcgcgcccaacgagaaactgttctcggtgcttatttcttcgaactaggcagacctcttcttgtttgggtaagcatattcctttttattgtattattattttaa

SEQ ID NO: 26388 - protein, 381 aa, DROSOPHILA
MSKLIEVFLGNLWTQRFTFARMGLDLQPDKKGNVLRSPLLYCIMCLTTSFELCTVCAFMVQNRNQIVLCSEALMHGLQMVSSLLKMAIFLAKSHDLVDLIQQIQSPFTEEDLVGTEWRSQNQRGQLMAAIYFMMCAGTSVSFLLMPVALTMLKYHSTGEFAPVSSFRVLLPYDVTQPHVYAMDCCLMVFVLSFFCCSTTGVDTLYGWCALGVSLQYRRLGQQLKRIPSCFNPSRSDFGLSGIFVEHARLLKIVQHFNYSFMEIAFVEVVIICGLYCSVICQYIMPHTNQNFAFLGFFSLVVTTQLCIYLFGAEQVRLEAERFSRLLYEVIPWQNLPPKHRKLFLFPIERAQRETVLGAYFFELGRPLLVWVSIFLFIVLLF

SEQ ID NO: 26389 - DNA, 3275 bp, DROSOPHILA
aaaaaaaaaaccaaggatactacacgcccttaaaaattatataaatataattcacccatataaaaaaccaatttattaattgtaataaaatttgttaaacttcggtgcgtttgtgtgtgttttggtgttgttgttcgcgtttctgttgtcaacatttttcatcgattttccctgtcgggcgctcgtcgtttttcgcctactatttcgccgtctctctctctctctcgccgccacccactcacccataactatacctaaaattctccaaaaaggaaaaacactcactaaaaaaaaaaaaatttaagctgctgcagcgtcttcttctttaccaaatctgccatctctgtcgcacgccgggcgaccaactattgcaaatgccatattagtgctttataactgtacaataagatatcacatacctacaatatatatatatatatgtaatacagaatatatatagaaagccaagcagaactctaaccaaaaagcaattgattttatttttagtgccgacacaaaaataaaaataaaaaaaagacgaaagagcctaacaacaaatttcagcgttaaacgtttttgaaactgaaaactgtcaacaaaaaaacgaaaaaaaaaaacagaggaaaaaacaaaatagaaaagccacagcaaaataaaatacagcaactagagaaaaccaaacgcattcggcatttgctgcaggaaaagcgctataaaaatagcataattagccaatgaaacaacaaattcaattacacgaaaataaaacctaacaaaaaaaaagtaaccgcaaagtcagcgaaacgtacatttaaaaacagccacatgaattagtttttaacgaataaatactcccaacatttcttgttgtactcgcaaaagttgttgttaaaacataaaaatcttgttgaatgaattcgcggtgcctttatttatagccagcataacaaaaatccaacagaaaagtaataatatacaaatatatctatatacatctctatacgtatacaaaatatctatgtaaaaatctatagagaaagatcgtatacatataaatatagacaaagcaataaatcgtaacggaaaacgtgcaatattttcaaaggtttaattaaattaatttcgattgtgatccaaaaaaacaaaacaaacaacataactaactaaactaagcaaccaaatcaaaaataaccatcaaagtgagatacaaatttcgttcgttataaattaaataattgattaattgttattgttgtgagataaacatcattctaactattattgttgcaaaataaaaaaaaagaaaaacacacagaaaaagcaacagcaatctgcaggccagcaaaaaacccgcaacgagacattttttgttcgtgtataatcacaaaatttcggaaatttttatgaaaaaatgagcgacagggagcgatcgtccccaacactgatcgaaactggtttaaaaaacttaattggcggccgtgatggtaattacccactgatcagcggcattaatgaatgcaacattacatcaggaggtggagcagttgaaacaggagaacatggacttgcgtgcacgtctatcgaaattccaagatgtgtaatgataaatacaattttgtgacttggcctgaggacaccacaacaattaaataataataactattgataaaataacaataatcataactatgataaaactactaataatgtttagtacagcagacatgaaacctacactataaagtacatattgtatctaaatatgtatatgcaaaagtataattagtaagcaaacacacacccacacaaacacaagaaacccctcacggcgtcgtgctccgctttaatatttattttatgctaaaaactaaaagcaaattaactaaacaccgaggaggagaaaccgaccgaatggaaactaaaaacattttttagagtagccaaaaaaaaagaaagtctcacgagagcagagcgttgaaaagctctgcagccgaagctttttgcctttaacgtagcatacttccgagcgcaatgggaatcctaaaaaaaaaacacagacgtagaattgttatcttttaaattgtttaatagttgtctagcctagttttacgcaaaaaaaaaaacacttctcttcttcgacttcttttgctattgttttcacccttctactttagtttttattattctttgtaattagctgtttgattaagtttttctttagcttatagtgaacggaaatccacatgcacacaacaaatcatattgtaaataatttcgttgccttttttcaaattaactcgagagaggaattaccataaaatgcaaaagaaaacatgtataaaaaattgcaaaatgaaaacccacaaaaaaaaaagagaaaattaaaggaacgctaagagaaaaccatttagagatgagcaaagaacttccctcctcagttgccgggcacttggcagctgtttagtttaagtgagctatgatttttataaaaacctaatgaaaaaaatatcagaaaaccccaaaaaaattaaaaacggacggacagagacagacggtggacagacagaaatgaaaaactagaagtgaaatagttttcgttgttgatttcttgatactaaaataaccaacccaaaactaacccagacatagtcagctggctaaagcgagagaacgagttttctcacttcctactaagaactacatacacacagaccatctgcgaaaaaccccttcataccatgctaacactctacaaattttcacatttttccttttagttgtaaacattttattcgtttaacttttattacaagaaaaaactatttcttttggtgtgatttgcaagatcttaaacaaacaatttaaaaacaaaacatttttacataataccatacaattatgttactttaaacaacaactattttcgttagttaagtttattaattattattatttgttatacatttgagttacatttacctgcatacaattatatagaaatttaagaaaatatatgaaaccggaaaaaaaacttaccgaccgagagcaaaatttatattttatattcagcaaacaatatggaagctataaacaaaagcgtagagagataaataagtccattaagcactctttctaaacaaatttcaataagttatagaataaatctatggaaaaatgtgcaaaaccaacaaaaaaactcaaagaagaacgacaaaagtaaagatcgataaaggagaatgagcgtaacgaaaaagtgagaaagcaaaaaacgattt

SEQ ID NO: 26390 - DNA, 1898 bp, DROSOPHILA
tacgtatacaaaatatctatgtaaaaatctatagagaaagatcgtatacatataaatatagacaaagcaataaatcgtaacggaaaacgtgcaatattttcaaaggtttaattaaattaatttcgattgtgatccaaaaaaacaaaacaaacaacataactaactaaactaagcaaccaaatcaaaaataaccatcaaagtgagatacaaatttcgttcgttataaattaaataattgattaattgttattgttgtgagataaacatcattctaactattattgttgcaaaataaaaaaaaagaaaaacacacagaaaaagcaacagcaatctgcaggccagcaaaaaacccgcaacgagacattttttgttcgtgtataatcacaaaatttcggaaatttttatgaaaaaatgagcgacagggagcgatcgtccccaacactgatcgaaactggtttaaaaaacttaattggcggccgtgatggtaattacccactgatcagcggcattaatggcaaatccacatcgaatagcaaagagatcatctgcccagatgacaaatacaaggaggagggcgacatctggaatgttgaggcgcaaacagcgtttctcggcccaaatctgtgggacaagaccctgccctatgatgccgacctcaaggtaacacaatatgccgacctagacgaattcctgtcggagaacaacatacctgatggcctgcccggcacgcatctgggccactccagtggcctgggccaccggtccgattccctgggtcacgcagcgggtctgtctcttggtcttggccacataaccacaaagcgagagcggtcgccctcgccatccgactgcatcagtccggacacgctaaatccgccatcgccggccgagtcaacattttcgttcgcctcctcgggccgtgactttgatccgcgaaccagagccttctccgacgaggagctcaagccgcagccgatgatcaaaaagtcacgcaagcaattcgttccagatgagctcaaggacgacaagtactgggcacgtcgccggaagaacaacattgccgccaagcgatcccgcgatgcccggcgccagaaggagaaccagattgcgatgcgggcacgctacttggagaaggaaaatgcaacattacatcaggaggtggagcagttgaaacaggagaacatggacttgcgtgcacgtctatcgaaattccaagatgtgtaatgataaatacaattttgtgacttggcctgaggacaccacaacaattaaataataataactattgataaaataacaataatcataactatgataaaactactaataatgtttagtacagcagacatgaaacctacactataaagtacatattgtatctaaatatgtatatgcaaaagtataattagtaagcaaacacacacccacacaaacacaagaaacccctcacggcgtcgtgctccgctttaatatttattttatgctaaaaactaaaagcaaattaactaaacaccgaggaggagaaaccgaccgaatggaaactaaaaacattttttagagtagccaaaaaaaaagaaagtctcacgagagcagagcgttgaaaagctctgcagccgaagctttttgcctttaacgtagcatacttccgagcgcaatgggaatcctaaaaaaaaaacacagacgtagaattgttatcttttaaattgtttaatagttgtctagcctagttttacgcaaaaaaaaaaacacttctcttcttcgacttcttttgctattgttttcacccttctactttagtttttattattctttgtaattagctgtttgattaagtttttctttagcttatagtgaacggaaatccacatgcacacaacaaatcatattgtaaataattt

SEQ ID NO: 26391 - protein, 270 aa, DROSOPHILA
MSDRERSSPTLIETGLKNLIGGRDGNYPLISGINGKSTSNSKEIICPDDKYKEEGDIWNVEAQTAFLGPNLWDKTLPYDADLKVTQYADLDEFLSENNIPDGLPGTHLGHSSGLGHRSDSLGHAAGLSLGLGHITTKRERSPSPSDCISPDTLNPPSPAESTFSFASSGRDFDPRTRAFSDEELKPQPMIKKSRKQFVPDELKDDKYWARRRKNNIAAKRSRDARRQKENQIAMRARYLEKENATLHQEVEQLKQENMDLRARLSKFQDV

SEQ ID NO: 26392 - DNA, 17073 bp, DROSOPHILA
acgctcccattccatacccaacggcgtgctggccagcgagctggagccgctgaataacaacaagcatggcgcttcgttcaccatgggtggcctgaccatcacgacgacggcgcccagcatccccaacctatccagtattaacgagaagaccaactccggaaattccataaacagcagcaattacagcaataacaatagcctgagcacgctgaccggaggaggaagtgctgccagcggacccggaggaggcatcaccattgtggccggttccgggaaccatggcggcgctggtggaggaggaggaggcggcggtagacacaagtcgaatccccgccgtcttagcatcaagcaggatcagctgcccatcgattccatttgttgatattattaattgagttagtcagttatctgatgttgtattctagttaagcataggctcctcccaatatacataattctaactcaaactaagctaagcgaaattccatggagagctcatctgtcatagccatagagctgctgcagctgtgaacatccctcaaaaaaatccccctatcctgctgaagtggaggcaatctgattgttatccacctatctactatacttactactaaccctgaaacgattgtacatgtttatgtctaggctaagctgatgaatgattcacgttgttagctttagctttgtgttgaatttactatagttaagttacaaattgatattaacgcaaagtaagatgtgagacccagaaaccaaaatgctgcaacttagacaactagataagtcattaaacggctcacttaacatgaaatttatgcgaagacgcagcggaattgaaaattccctttaagtcgattattgtttaatattactcacttcaatgagatataaagaatgtacattttaatccatatactgtttcaaaaacaagagcttcaattatcataaggagtggacaataaaattgtatgcgtatgtgagagtgattgataaatgaattttatttttaagcttcgcccagattgtgcaaatgaaagacggtgaattataccataaaatggaatgaaaagaatctaaccgatgcgttttatttggaatactcccgggtagtgcataatatgaatccaatgaaagacagttttatatatttttgtagtgtttttttctttaattttgacgttctttgtttagctgagggaaagtttatcatttttaaagcatacaaatttctcatatgaaacatacacaaatatatagcgacatacaagtacagggattggtcaaaggtggtcagagatccttggaagcttttgatagcatatcaaggatattcttggtatctaaacactcctcttaccaaattttatgttaatagaatacgcgaagggtttcttttaatgtattttttatgtccgtaggcgtagtagtacaatagtaggtaattagttcaatttcaatttacaacaaataatctttttattaaagttgcgctttttattgaatttcgtagttttcgatttcgacttgcaacaatcgactttcaaatgtgcgcgaaattcattacaacaattaaaatacatatgcctatattaacaatagatccatgttttgttttcgtatcggatttgcttaggttgatatcgtatctgtagctgtggcttagtttaaagtttaactctttatgctgtaggacatttttaagaatattaaatattaatatttcttaatcgcttatctactaaaccgttttaaagacagttaacgggacgctctagcaagagcaattatttttgtttaaaatttttcgattctttccctttttttttttttttttgtttagtattttctttagtttctttgaggtgtgttagcacactcattgttgctttagcctagcgctggtttattaaatgttagctaagtttaaattatgtatttacagatgctgtgtgctagctcgaaagtgataatttgtgttattttttgtgtatgggattttgataaatgccttatgagtttagaacgatttacaactattcaccgctgtggtagatctttcactagaatatagcttacaaatgtaaatgtcttacgcccgtaattcatgaaatgtccagcaatattttcaacctttacaatagttttgtgtgtgtgtgtattttcctatcgtctattttatacatttttctctgcatccatctttgtgttttcatattttacaagctaatattatagagatgtaaacggtttcaccatcaaatattgttggacgacgcgacgatgaataatggataagtgggattggttctgaatgtgagttgtttactgatttacaaattcatgtgaagcatttttaattacattcttttcggatctgtttgttttcgcacatttttctgtcagcttgacctttggggcgcaaatatttcggagtaaaagagctgttttatcacaagttttgtttttcattaattgcaattaagtaaaaggcttcgcatacgctgtccagaagggacaacaccatgcaagacggacttggacgagtccaaataatcaattaattaaaaaataaataacaatcatgctgactaaatgagtaaaccattaatgggaggattggtgcgataaatgaaagagctccaatgggccgaaagcagcgggtgcaacaaatgttgccagcaacatgtggcatctaaaacaagaagtagaatatccaaatcgccgctcagtagtacagataactgttgttcatcatatcgtagcggtaatcaaactgttgctgttgctgctgcacggatcgatgctgctgcccgcgctggaaactagtgaaccaactcttagttgcggcaattcgcaacaggtactttcattccttgcggtgctgctgttgctgctgacctcccggctgctgttgctgcgactgcagatgatgctgctgttgcaggtgtggaggcagcctcgactgctgttgctgctgctgcgacatcccaccgacaacatgttgcgcctgcattccgtggctctgatggctgtgcatgggagcctgagtgggcacgtggccattaagacttcccccactggccgacgaaacagcattggaggcagctgtagccgtgttgttaccctcggacttttcacgtggtagcaagtagacggagccatcggcagcctgttgcaaactgtagtccgccggcgagcagggatttccctcgggatcccgtaggtactgcaggataaagaaattaattagtttatcaattaatcaagtctgtgtaattctgtattcgagtaacacctacctggaagacatgacgatgcagcatggcaaacttgttcgagatgcgcttgcgttcgctctccaaatgatcgcggtcctgattaagttgggtcttgcgcttaaccaccgcgttcacctcatcctctagagtcaggatctggtccaatttgcgtttcctgcaattctgggcagcgaccttgttctttccacgccgacgaatgtcgcgaatcagcgacaactggttctcgctaaggtcgtacttcgacaagcgctcgttgaactcgtccatgggcaggttaatgatgtccggcactgaaatgggtatgttcagggatcgagcgcgcttttcatcgcgtgtcagatgctcttcctccaagttgctgctgtttccgccaacactgctgctgttgccggcactcgctcccttcgatgcggttttagtggcgaccaggggcttcttatcgcgtgcctggggtctgggaagggatccacttccctggggtagcgagtaggtatgatttagttgcaccaaatcctgcgaagtccttggcgatggtcgtactgtatagtcgccggaaaaggcgctgccgctggctcccatgccgtaaggctgatgatgatgatagtccttggatagagcgggtcccatcgctcctggctcactgattccaccgctggccattcccgaggaggcgtacccagcatcgtactcgtacttgatactctgcgattggactgcagtcgcggctgctggtggagctgttggtggcaaagccgatggcgtctgcttatggggatccctcttgccgtacagctgatgcttcttctgcgccaccggcggctgacgtgtggcggtgctaagccgtgaattattgttgtagctgaagtcgtaggggcctccgtacttgccctgatggtaatcctgggcggagtcactgccctcaccccactcgccgtcggagagggacggcactcgctcggagcccatcgaactgacagcactgtcgctggacgcgtccaagcgatccgcaccgccttgtgctcctgcaccgccgcttgccaagagatcggcggtcattcccgtagctccagcgcccacagctgatccgctcattgagccaacgccgccggacgctccgttggcctggttaccgtgcggatttcccgccccaagttgtgccgagctaccggagccgttgctaacatgtccactgctgggcaagcccagaaccgaggagttgttgctagtgctgttgtcaaccatgcgacagaagcctgcaatgaaaaataataggttagttagtagagtacattaatggatcatcagttaaaccttagtataatcacgtactactacttgaaaataatcgacctaagttcataacccaagtatatactttgggtgttatcagctgacaagttttccattgaactttatattgtgtattttacgctatcctcccaattgatcaaaatcgaactagtttcccaactggtgctactgcttttggcctgacccacttcaagtagacggtcttgattagggaggatcgcccttatcacaagacacgtcttgagtcactcgcagcttcgattattaagcacaaatttacgactagcattcagtttcgctgttcgaaatgaggagaaatactaaaaactgtgcagtcattttccatatttcactggacttatcttatcgcgcgataaggaatgagtgtgtgcgtgtgtggggaagagctcgtgtgcgtctctcagttattttttgctgtttccaaatacctggccacctttccacatctttctggccccgcggcctgctgataagaaggagtccgatctgctgccccctgggtatctaatcacagtctaaatggagaacaaacgacacgcccaaggggcatatatatatatttttttttggttttctagtataaccaaaaacacaatctccatgtgcaatctggcattattgcgcgcctgcagttaattagacaaatcaattcgtaagctgattgggacaagctctcgtgtatttataccctctgtgggcaaggtcaaagcttaaaccataaacattgatgacttgacaaaatgcgatacattgtacgagcacgtatatgattacggggcactctctttataacgaaagctacgttttatgaacctttaacaactacgaaatctatatttagacataaacataatatagtgctctttgcttcaagtttcacatatgcaatatcaattaccggagctagtcgaataaataacagtaatgctcgtatttatgggtcctccatatcgatagtgcactgtaactgtgcaggagagttatcagcaacgaactgaacgcaagacataacggaaaccataaagataaccgttaaagccagtgacacgtttcatgatgtgcagaaaaaaaagcttaaaaacaatatgaaaatccaaattgagaccgtctttgtttcgttaggacgtaacccacttacgttataatttgaatgccgatctcaagaacgtgaactccacagcaactcctgtggaattccgcgtcaagatattagcaactactctcatatgcctctactctctactctatgctcttccgagctttttttaacgttattgtttcgaatagcgatgactcagcagtttaaaaatagtaaacagcaaacaggcgggcaaataataaaataagcgaaatgaaaaaaaaaaaacttgctgagcgggcggcgttaggcagcggtggcgggagaggctaggaaagcgctcgagagagggagagcgaagaacgttccgctgatatcagaaacggaatcagaaacagcaaaaagatcgccgtgcggcatgactaatgaaaaaattgttacgcggtcacaagtaaaatatttttgagggcttctcctctttttcttttttggcaacaccgaaaataacacgatgcagagcattttccattttcccgatctcactcactctcacctgttggattgcccgttcaccgtttttgggatgctgctataaaacgctcgaaattcgccgaattagaactcactgagctaaattgtacatatgtatatacataggtacgtcgatcgtatatcagctacactgaatcgaaatgcgtcattattttattaaattggttatgctaattacatttactttacggcacgttgcgcgttttgatctttaatgaataggtatgtgtgtgcatatatatggctaaatggattttcgagtcgcgtcggttctaatatttactttactatcgtattcgattgttcgtgttcgactgatttgcctctgcctcgcgctctgttcttttcgctttgctttccgccctgcttttgagtgcttttttttgtcgtttgttgttgttgtcgtttgaatcgcaagtgagtggcaatcgcgaaacctgagcgcccgctcccttctacgctcgatcactcaggcaaactgtgaactaattgtacaaaattttgtatgctaatcgcgcaagaacgataaactgtaaaaaaagctcatgggccgagtggatttgtgcttgagtcgtttgcatcgcgcgcgcttttcgctctgttctgagtcaaagctcgcgatgagtgggtggggaattcggcaacgatgcgcaatccacttaacggaccaaaagctcgtccatcacttaagggaactttttggcaagcagaaagctcacactgagagaaacttattcttgctagaacaatttcttgatataacttgatataacttttcgtaatttttagttgtatagaaactttgtagttatgaagagaatcaactttactaggaataaatactcaataatactcactctcattcatgtccatcaagtgcagatcctcgtcggtaaaaatggagttaataaagccatccgtctggttaatgtccgatgaggtgttctaagggtatcatcgtttataaaagctgcattgccacatgcggttgatccaacttaccccgtagtacattaaatcgtgctccactttgtaggcggcagcagcagcggcggctccatcggcctcgtgactggagttggtcagatgcatgctggaggtgacagccgatcccagattgtgcccgtagtggggctgcccggtggggcagatgtcgcccaaggcggcattcgggtgatgcaacatggcagcgtgatgcggcggcggcggtggtggtggtggctgcaatgtagcattggcgccactgccatactgaccatgctggccaggagtgccgggtgctccgttcgagggactcgcctgataggagtagccgggatagtgatgcggatacggtgacatatcggataccccgcccaccatgctcggaatgggactgaagtaggtggcaaagtcctgaagacgctccatcgaaacgctgcgattcagacgcggcatgcggccctgcaagtggagaagtgcggggagaagacattgattaatacggcgctcgtcgcttagccgcgttgatgtattaacaaggtgagaagggttcggaattacgaaacttataactcaataaccgatcaatcatccgccaggggaattctctagaaacgcggccagacaataaaccgaattcaaattgcgctacaagtaacaatctcctggctgtcagagtctccgtctccgcctccgcctccgccttcgtctccgactccgactccaaactcggaatcagactctctgtgtaagccaaaaaacgtgcacaatgtatcggtctggcgatttgactgccacgccagatcgatcaatgtggaattgaaatgaaattcgtatctttcaaattgacaagtgctcggggttcgcgcagctcagctcagccagcggtcttggccacttttatttttgtatcagttttttgtttatctccccccccccctccttcatatttcttattttcctaagactcctcctctgtaaaaataaaaaaagctggctctgtaagtcgtggcatcttggcatcttgggctgactgatggccggagatcgtgagactgccactacgacttcattaggccgccttttgttattgttaattaccggtgggtttatttatttgttcaactaattccgcagccaccgcgtgggcgaatggcaaaagggtattatttcatatttgactcccttcagaaatcacacactcacactcgaataataatcaatatttccacgaactgcgatcctttatcgtttcgcttttggcggcaccaatttgttcttaatgctaaatgccgccgccgccgtgcaattaagatctttcagatgcgatggacacctatatctggctgacgttgacgctgatgcactttgacactgacattgccgataaggatcgaaaacgagaaatcgagaaacgattattccgacaaaagaatctgaattttggattcgaatcgaactcctttgcgcgttgacgttgagttgtcgtttgaccagcatcaactgactgactgacggaatgacagtagccaaggcaacctcacacagatactccgaggagatggatgcattcccagctgagtgtgtgtgtgtgtgtgcgtcagcagtgagggctgagcaaacaacctgtatccccgagtatctcaccattccactcgcatgtgtatctaatgaatgcctcaacacgctcctgaacgcaaacaggtatgtgtgtggaagaccaaaaaaaaaaaaacggcaggtagaagccattgggcgttcacttcagccagttgcagtcgctctgtttgcatgtatgcccgtatctttttgtatctttgtatctgtgagtgcgcaacgcgcatgtgtaatttgaattgtcactgtcttgtcattaacttctggtgttggccattgtttgttacgcttcgcacgcaaacaaatccaaccgacaacttagacacggtagccgcgatctctttgctgcacacatgacatgtatcgatctggagagtgagatcgtctaggggtttttgtgggcaaaagaatctattctttggaaccactaattcaacctcaaccgttacggagtcgaagaaatgggaggaaggtgcattagattgcatatttgataggggaattactatcatttaagagtttttcattattgccgatcccattaacggttgtcatgcatttttcgccggattaagattataatctcgaagcggctttttcttcagaaacagtaaagtacattttctagttcctcttcaatgtttaaatttattgcattggctagctaatgtgtttaatcttcgtataatacaaataactatttttaaatgaaccgtaaattaccccaaagcgcattgatcatttttgataaatttatacaaaacctaaacaattattattaattgcaagcaatttttcaaaaacactaatgctcaaaatacaaagtttacatggaaattaaacgcaaatagctacaagtgcatttagtaagaaaaacctatttttaattgaacgaattcccaaaatcgtcgtttaatcttcaaaacaaacaaaaattttttttttcgatatttgttgaacatatttccgcgaaattcgcaattcatcaatggccagccgggattcaccgatataaggcgacgtcagccaacttgaactaatatattctatggatttcatttagtccctctgttgccaacgaccggcaaatcccctccagagcccagccaacacacctgagcggtagtttcgtgtttttttttttgtcattaacttgatttatgtgtgtgcacaaatcgagtcccatgacagccgcagtctgagtttcgcagttcgagtcgcaacttaagcctccgcagccatcaaactgtttacataaattgaattaaaatcgtacagcacaaaaaaaaaaaaaaaaaataaaaaaatgggggggaaaaaaactacagccaagaaaaacaacgaagcgaggcaaagcaaaacagagatgctgtaaaataattaataaagtttttttcactctgcgctgatttttcagcgctaagctttttgcaaatatttaaaattcacataattaaagccgtgcaaggggcgattagggggcatggggggggggaaggcggtgaagggacggacattaagagataaattttttttatttttttgtaattcgcgcgcgctaaatggggatttaattgcagtggctaccgccgagccgagctgaaaagatgcaatcaagcaatctgggaggggaacaaattggagggcagccaccgcggcaaagtgccaccgaattcaataaacacttcggtcccatgcggaaaagtcaagtggcacattgcaagcgagacaagaaaccaaacaaaaaaaaagagaaaaacaatgaaaatattcaggcgacaagcaaaaaagtcaacggcaaagtgttcgtaatgaacgcaggcgaaacaacgccccacttcacacttcgcacatccactaatcattttattaagtattagttataaaataaaaatattcagatgcatttaaaaatatcaatcatagctatagtgctgctcgttcaattgcagtttcaagcagtctaataatagggaaatctatgaaacccactcttattttgctcggtgcagagatagacactttagtacaggtagccaccacagccacctgagacatcatcaatgaatgcaaatgcaagtgcaaatgcaaatgacaaattaaatgtgatcaggaagttgcataatgatgatacgcgcaaggatcaagcagaagaagtgctggaataacaaagctcaaagccgcctaatgacactttccgtttaacggcaccgatggcaaatctccccagagagtcggcaaaaggatttgggccgacactagttctgctgaatcctgcgaataaccgatcatctggctcattaaatggctttgccaagtgccgagccgccgagccgccgagcaacccgctggcattcacaaaaatcgtaagtaaaactgaacgtaccacatcaaacacgccggactaagcctaatccaccaactcaggctgaccactgtggttttttctttttttttccttttatgcgaggtgtggtgtacggtttatgagtttgctaccggtgaaaaggctttacggtaattgccgctgacttcgtgactgtttcgcccgtcctgctgttctgctgtctcttttgtcaactctatgtccgtctcttttcatcgggaagatcaggcaggtcaaaggttgagcacaggtttgcacttcattcagaaagcacttgtgcgggagattagttttattggctccgaagacggaagcatttatatattgctacaaataaagcaataataacaggaactacatatatctaacctcaaatttgtaaaatccaaagccactaagaaaagaccaaaactcacggaaaagaccaaaactcacggagatattaaaaaagaatcgagtcaatttaaatctttagaaaacttgacgaatttcaagtcaaggtataaaatcaagatagaagactatgtatatatgtatattatatcaacattgagatacatttttgatgagcgcttacaacaaaagccaaaaaaataataatacaagaaatcgtccgacaagaaacggctaaaaagctgctgaagattgaagagttcaggggagagaggcccagaagactgggaacttgattgacgaacttgtagtttgacttttgggccaggagagacacattgtggaggcaaggtgtggagcatgtacaaccagatttgaagctttgtacaaacacagcaacaacacatacattgctcctcttgaagagagcagagccccaagctcaagtgcttcagaacagcccacgacgaaggaggtcgggagacgaggccataccacgtgaagagccagaagaaatggaaggcagatcacgaaaaacgaaagaaaaaaaaaaaaaataaagaaccgaacagtgaaaagagccactccagaacgagaagcagcccaagaataacgaaagcgacgtgcaaatgatccttaaatgaatacatatgtatacaccatcagcatatacaactaagatcaatatatagtatttggaatgcaataaattgaacttttagtttttaaatcatatagaataataaaagttttgactccaatttaaaatgcactgatcgattaagtttttcacattttaaagtaaaataaaactgcaattctaactgaacaaataaattatctaatatatttgttttagaaccttaaaccttatttgagaaccctattatttcgaccgcagctgtacatacactcacattcagccgggtatatgtatgtatgtacatatgttcgcatgtaagtatgtggagcgctcgacggatggcagcacttgaaccgagcatccgcatcaaattataaataaatatacctttttgtctgtggggaggattacgatcgatgcacacatacctgatgatggccatgatggaatccgccggcagctggctgcctctggaaggcgctgcccgtgccactgcccacgcccacaccgacgccaacgcccacgccgactccaccaccatagttggcctgctgcaccgcacgctggtgggcggcagctgcagcggcagcatggtgggcatgggcatggtgcatcgacgcatggtggtggctatggggatgagcatgagggtggccgtgatgcggatggggatggtggtatgacggaaccgctgattgcaacatctcgtctagttccttcttggcgtcctcatctaagtcaaacaggggcgagcccacagaattttgaagttcctcgaaatcgctcaccgagaagctatcgccgtcagctttctccggatcgttgtccttattcttcgcttcgtttctattttgcttgctggaaattccttcgccactgagtaaatcctcaccggtttccgaaacaatccgttgagcttggttctcgttaaaagcggcagctgcctgcgaagtggaggccaccggatcgttggataactaggtggttgagaagaagtcgataaggaattttctatttttctaaatgggacatcgaacttacatcgtcttgaagcggaaattcagaaagtttgagtacgtcgttcaacaactcatccaggggcaagcgtatgtattcacctgaatgaaaaagaaaaaggcatttattaaaaaaaaatccaaaaatccaatccttgcggtttgctcttagttctgtttaaaaatgggtttataaaactacattatagaattggaagaatacaaccttttgatcgcccactgtatacataataaataaactgtattccctttggagtaaaaacctttccccagagtcaatatctttgtgactgtatcaaagcatggaaaatataggaaaatattttgatcatttgaatgaaatagctgaatctcttattatactcggccactttgcctcgaaattccccagagagtgatcaattttctgctacaaaaacagttggaaggttcatatctgtggcgggggggggagcaggaaagtaggtaaataaggagcgtcccaaaacagtagcactttcctgtgggagttcgtcagatcagcgaagagatcacagagtggacagtaactagagtcactcgaacgtcggtgatcattaatcataatcataaaaacgtgatctttgagagatctccttcactcaaaccccgtctgacggaagcagctgaaaaatattgcaataaatgaacgatttcccaagctccctgcggtctcacccacatcttcacttaattaatgatcagttttgacagctcccagatatcgcaactaaacacaaactaaactcgaggcacaacaataggaaagcttgcctcaagtgtatcgcttacaattgactagcagacaattgattcctggtcaaatattgatggcgaccaaatatttgcattggaaattcttgggaaaaaccaagtcccagaactgagtgggggtattggaggatattatcagaaaattactacttaacacaacgacttgagttccacgaacagggaaacctagagaacccgaaggtgggcagcaaacatctagataacgccaaaaccaaaaacccgaaaaaaaataaaggctaaaacgagggcgcaacttggtcgaaagacaggagagaagagactcaagtggtgtgacgacgacgacgacctttaccgtggcacttgagtcgggtcaaaaaattagaataaacataacagatggaagtgtttggtggttctctggggcctggccaacacaattcgaccaaatgctttgttattcttacgattggttacaaaacaactcattcccccgccgccagcttttcccatttccatcgcaaccattttgggcccgttctgttcgtcttctgttctggccatgtttttttttcggcttgctggcttatagcctgttattttagggttctcccttctttgcttaacttttttttttttttttttttttttggtaacaattcgtggtccgttaattttggaatgcgttcgtgtgggtttcgaattgtttacttatcgtttttggtctttgggctgattgtttgcctctcgtttcgtgggttttcagcttgcattgtggccgaaacgacaacgaaaatattagtagattcgggttcgtgtgcttgcctttgttttgtcgtccggttggtcaggagcaactgtcaactgtcaccagcaattaggcgacaaggctcaaagaaggcgttgatggggccaaccattgtttgatcatattggtatgggagtgggtgtacttcaattttcggttacctttcaggaagttcgctcggaaggaagtatgaaatactgtgggagcgtttcgtaatggaaccgctaatggggttgattgagcactaaacaccgacggctacttgatatttccacaggggtgacgacaatgaagtaattttggggtggcattgggcggtacacttttctatgtttgtacagattataagcctaatcgaagaggtaaataaggcttgacttgtgcttatagtagagattgaagagataaagattgtttgatatagaacgaaataaaaacaaggaaggctagagtgatctaatatcatgccatcattttaaacttttttaaaaatgtcttaccgcactcgaattctctcatcaactttttttaatcggaaagaacgatttaatactaaatttttactcaataaccataatcattatgccccacgttgggcgccaagttgctgtgttatacgcccatactaaaaccctacattcggaaatatgatcgaacaaagagtaaagtattacgaacctttattagttcaagggatgctgcaatgatgacactgttgatatctgtgaacaattcgtgtttataatccaagaaatacaaacgtctatagagccaaagtcaaatgtgtcttgactgttttagtttttttttcgcgttgattgtcgtaaagatcgttgtagttggctttttgtgaatagattgaatacaaatcgttgcaataaagcgctgattgttgttgatatttggccaaacactttgacaattatgtaacgttttgacagccaaaatgttgcagaatcaacaatggcgtgccgactaaaagcagccaaagcaaaagcaatccaatcgcaacttcgatattgccgtttccgttgcagacagactttgtattgtgttgtctttatttttgattttttttttttgggctttgcacaattcgattgtgtgtgtggaaaatgggtttaagttattttgcaatgcctttggttattgtagggggctttttttttttagaatcgcacaatggtcacttgagtatgggggagcttggtatgtatttttgatttggtaactttcacttttttgttgttttttttttttgtatagcttttgcacaaatgcagacgcgtaatagtttacaaatttgttaatgtttgacacagtttagtgattatttttttacggtcgaacagaatttttccaaatcatctaattggcatagcataaaaagagccgaaacacttgacttggccagaacgagcgatttgaactgtcgattcggaatgccgcgtcaccttgccgggctcacagagttgttaacgaattttcgccggagcagagtcctttttgcttgtccacgcccacgaatttgctggcgttattgtccattcacatatatttttacccttatgcgattttctgcgcgcgcgtcaagcgtccaacgtttctcgagcgtttataaaaattcaaatacgattctaaaacgctgctcaaagcctctgccgcggtcgctgctccgccatcgctgtcgacgtcgacgtaggcagtagcgcaagagaaatggcgctctcagctcgtgctcagacaatgagtgcgagtgggacaaccatatgcacttcctccccgttttgagctggatttgttcatgcgcactcgcactgctcgcgcgtgtgtgtttgtgtgcgtgtgtgtgtgtgtgagcaagaggcggagctaagagttcagcttggcctgtttgtatctgttgtacttttgcttttggccgcttcaatatggacgctttgtttaagcccgatgtcttctacaataaaacaaaaaaaaagccaaaactggttctcttgttcttattcccagcatgtgcatgttccacagccagaaactgtgtgtgtgtgtgtgtgtgagccattaggaggaaggaaaaacaatctaatcaagcaatttaaacagtcaacagcaataaaaactgcttaaatttgcatggcttagattctcgtggtacgaagtaactttaaagtag

SEQ ID NO: 26393 - DNA, 5132 bp, DROSOPHILA
attctaaaaaaaaaaagccccctacaataaccaaaggcattgcaaaataacttaaacccattttccacacacacaatcgaattgtgcaaagcccaaaaaaaaaaaatcaaaaataaagacaacacaatacaaagtctgtctgcaacggaaacggcaatatcgaagttgcgattggattgcttttgctttggctgcttttagtcggcacgccattgttgattctgcaacattttggctgtcaaaacgttacataattgtcaaagtgtttggccaaatatcaacaacaatcagcgctttattgcaacgatttgtattcaatctattcacaaaaagccaactacaacgatctttacgacaatcaacgcgaaaaaaaaactaaaacagtcaagacacatttgactttggctctatagacgtttgtatttcttggattataaacacgaattgttcacagatatcaacagtgtcatcattgcagcatcccttgaactaataaaggtgaatacatacgcttgcccctggatgagttgttgaacgacgtactcaaactttctgaatttccgcttcaagacgatttatccaacgatccggtggcctccacttcgcaggcagctgccgcttttaacgagaaccaagctcaacggattgtttcggaaaccggtgaggatttactcagtggcgaaggaatttccagcaagcaaaatagaaacgaagcgaagaataaggacaacgatccggagaaagctgacggcgatagcttctcggtgagcgatttcgaggaacttcaaaattctgtgggctcgcccctgtttgacttagatgaggacgccaagaaggaactagacgagatgttgcaatcagcggttccgtcataccaccatccccatccgcatcacggccaccctcatgctcatccccatagccaccaccatgcgtcgatgcaccatgcccatgcccaccatgctgccgctgcagctgccgcccaccagcgtgcggtgcagcaggccaactatggtggtggagtcggcgtgggcgttggcgtcggtgtgggcgtgggcagtggcacgggcagcgccttccagaggcagccagctgccggcggattccatcatggccatcatcagggccgcatgccgcgtctgaatcgcagcgtttcgatggagcgtcttcaggactttgccacctacttcagtcccattccgagcatggtgggcggggtatccgatatgtcaccgtatccgcatcactatcccggctactcctatcaggcgagtccctcgaacggagcacccggcactcctggccagcatggtcagtatggcagtggcgccaatgctacattgcagccaccaccaccaccgccgccgccgcatcacgctgccatgttgcatcacccgaatgccgccttgggcgacatctgccccaccgggcagccccactacgggcacaatctgggatcggctgtcacctccagcatgcatctgaccaactccagtcacgaggccgatggagccgccgctgctgctgccgcctacaaagtggagcacgatttaatgtactacgggaacacctcatcggacattaaccagacggatggctttattaactccatttttaccgacgaggatctgcacttgatggacatgaatgagagcttctgtcgcatggttgacaacagcactagcaacaactcctcggttctgggcttgcccagcagtggacatgttagcaacggctccggtagctcggcacaacttggggcgggaaatccgcacggtaaccaggccaacggagcgtccggcggcgttggctcaatgagcggatcagctgtgggcgctggagctacgggaatgaccgccgatctcttggcaagcggcggtgcaggagcacaaggcggtgcggatcgcttggacgcgtccagcgacagtgctgtcagttcgatgggctccgagcgagtgccgtccctctccgacggcgagtggggtgagggcagtgactccgcccaggattaccatcagggcaagtacggaggcccctacgacttcagctacaacaataattcacggcttagcaccgccacacgtcagccgccggtggcgcagaagaagcatcagctgtacggcaagagggatccccataagcagacgccatcggctttgccaccaacagctccaccagcagccgcgactgcagtccaatcgcagagtatcaagtacgagtacgatgctgggtacgcctcctcgggaatggccagcggtggaatcagtgagccaggagcgatgggacccgctctatccaaggactatcatcatcatcagccttacggcatgggagccagcggcagcgccttttccggcgactatacagtacgaccatcgccaaggacttcgcaggatttggtgcaactaaatcatacctactcgctaccccagggaagtggatcccttcccagaccccaggcacgcgataagaagcccctggtcgccactaaaaccgcatcgaagggagcgagtgccggcaacagcagcagtgttggcggaaacagcagcaacttggaggaagagcatctgacacgcgatgaaaagcgcgctcgatccctgaacatacccatttcagtgccggacatcattaacctgcccatggacgagttcaacgagcgcttgtcgaagtacgaccttagcgagaaccagttgtcgctgattcgcgacattcgtcggcgtggaaagaacaaggtcgctgcccagaattgcaggaaacgcaaattggaccagatcctgactctagaggatgaggtgaacgcggtggttaagcgcaagacccaacttaatcaggaccgcgatcatttggagagcgaacgcaagcgcatctcgaacaagtttgccatgctgcatcgtcatgtcttccagtacctacgggatcccgagggaaatccctgctcgccggcggactacagtttgcaacaggctgccgatggctccgtctacttgctaccacgtgaaaagtccgagggtaacaacacggctacagctgcctccaatgctgtttcgtcggccagtgggggaagtcttaatggccacgtgcccactcaggctcccatgcacagccatcagagccacggaatgcaggcgcaacatgttgtcggtgggatgtcgcagcagcagcaacagcagtcgaggctgcctccacacctgcaacagcagcatcatctgcagtcgcagcaacagcagccgggaggtcagcagcaacagcagcaccgcaaggaatgaaagtacctgttgcgaattgccgcaactaagagttggttcactagtttccagcgcgggcagcagcatcgatccgtgcagcagcaacagcaacagtttgattaccgctacgatatgatgaacaacagttatctgtactactgagcggcgatttggatattctacttcttgttttagatgccacatgttgctggcaacatttgttgcacccgctgctttcggcccattggagctctttcatttatcgcaccaatcctcccattaatggtttactcatttagtcagcatgattgttatttattttttaattaattgattatttggactcgtccaagtccgtcttgcatggtgttgtcccttctggacagcgtatgcgaagccttttacttaattgcaattaatgaaaaacaaaacttgtgataaaacagctcttttactccgaaatatttgcgccccaaaggtcaagctgacagaaaaatgtgcgaaaacaaacagatccgaaaagaatgtaattaaaaatgcttcacatgaatttgtaaatcagtaaacaactcacattcagaaccaatcccacttatccattattcatcgtcgcgtcgtccaacaatatttgatggtgaaaccgtttacatctctataatattagcttgtaaaatatgaaaacacaaagatggatgcagagaaaaatgtataaaatagacgataggaaaatacacacacacacaaaactattgtaaaggttgaaaatattgctggacatttcatgaattacgggcgtaagacatttacatttgtaagctatattctagtgaaagatctaccacagcggtgaatagttgtaaatcgttctaaactcataaggcatttatcaaaatcccatacacaaaaaataacacaaattatcactttcgagctagcacacagcatctgtaaatacataatttaaacttagctaacatttaataaaccagcgctaggctaaagcaacaatgagtgtgctaacacacctcaaagaaactaaagaaaatactaaacaaaaaaaaaaaaaaaaagggaaagaatcgaaaaattttaaacaaaaataattgctcttgctagagcgtcccgttaactgtctttaaaacggtttagtagataagcgattaagaaatattaatatttaatattcttaaaaatgtcctacagcataaagagttaaactttaaactaagccacagctacagatacgatatcaacctaagcaaatccgatacgaaaacaaaacatggatctattgttaatataggcatatgtattttaattgttgtaatgaatttcgcgcacatttgaaagtcgattgttgcaagtcgaaatcgaaaactacgaaattcaataaaaagcgcaactttaataaaaagattatttgttgtaaattgaaattgaactaattacctactattgtactactacgcctacggacataaaaaatacattaaaagaaacccttcgcgtattctattaacataaaatttggtaagaggagtgtttagataccaagaatatccttgatatgctatcaaaagcttccaaggatctctgaccacctttgaccaatccctgtacttgtatgtcgctatatatttgtgtatgtttcatatgagaaatttgtatgctttaaaaatgataaactttccctcagctaaacaaagaacgtcaaaattaaagaaaaaaacactacaaaaatatataaaactgtctttcattggattcatattatgcactacccgggagtattccaaataaaacgcatcggttagattcttttcattccattttatggtataattcaccgtctttcatttgcacaatctgggcgaagcttaaaaataa

SEQ ID NO: 26394 - protein, 805 aa, DROSOPHILA
MLQSAVPSYHHPHPHHGHPHAHPHSHHHASMHHAHAHHAAAAAAAHQRAVQQANYGGGVGVGVGVGVGVGSGTGSAFQRQPAAGGFHHGHHQGRMPRLNRSVSMERLQDFATYFSPIPSMVGGVSDMSPYPHHYPGYSYQASPSNGAPGTPGQHGQYGSGANATLQPPPPPPPPHHAAMLHHPNAALGDICPTGQPHYGHNLGSAVTSSMHLTNSSHEADGAAAAAAAYKVEHDLMYYGNTSSDINQTDGFINSIFTDEDLHLMDMNESFCRMVDNSTSNNSSVLGLPSSGHVSNGSGSSAQLGAGNPHGNQANGASGGVGSMSGSAVGAGATGMTADLLASGGAGAQGGADRLDASSDSAVSSMGSERVPSLSDGEWGEGSDSAQDYHQGKYGGPYDFSYNNNSRLSTATRQPPVAQKKHQLYGKRDPHKQTPSALPPTAPPAAATAVQSQSIKYEYDAGYASSGMASGGISEPGAMGPALSKDYHHHQPYGMGASGSAFSGDYTVRPSPRTSQDLVQLNHTYSLPQGSGSLPRPQARDKKPLVATKTASKGASAGNSSSVGGNSSNLEEEHLTRDEKRARSLNIPISVPDIINLPMDEFNERLSKYDLSENQLSLIRDIRRRGKNKVAAQNCRKRKLDQILTLEDEVNAVVKRKTQLNQDRDHLESERKRISNKFAMLHRHVFQYLRDPEGNPCSPADYSLQQAADGSVYLLPREKSEGNNTATAASNAVSSASGGSLNGHVPTQAPMHSHQSHGMQAQHVVGGMSQQQQQQSRLPPHLQQQHHLQSQQQQPGGQQQQQHRKE

SEQ ID NO: 26395 - DNA, 4727 bp, DROSOPHILA
tagacctgaatcggccgtcctcaccgacttttcgctaaatttgatgccgggaacaaccacagcggtagtgggtcgttcaggatctggaaagacgacgatagctctgctaatgctccgactatatgacccccaagggggaacagtgcatttggatggcatagatttgcgaacagtgaatccacagtggttgcgaaataacattggtgccgtcagtcaggagccggtgctcttctcgtgctccattcgagagaatattctttatggcgctaatcctggcgaaacaccgagcccggagcgactgcagcaggttattgaagatgcaaatgtcagccagttcaccgaccaactgccggatggactagacacgctcgtcggccaacggggaatgatgctcagtggcggacaaaagcaaagagtagccattgccagggctctaattaaggtggagtctaaattcaattcttagttactcaatttacaatttcctaaatgtaaacttattcatacccccacagaaccccgctatcctgattttggatgaagctaccagtgcgttggacgccgtttcggaaaatctggtgcagaatgccttagacaatcttatccagggacgcaccgtactgacaattgcccatcgactcagtacaattcgaaatgcggatcaaatcgccgtcttaagcgacggaaaaattgtagagcagggcagctacaacgagcttatgggcatccaggagggcgtcttccgggaactggtggccagccaagcgttcggcagccgaaactaaaagagggtgtggaatttaagataagttggactaaacggcttagaagtggccccaccgctccttggtggtggaccagctagtgctattgttaccgggatatgtgttcataaatcaaatgtttttaactctttgtaaaatatacaccgttgaccataaaggaaccgatgtcttttcttccaaaaaaaaaaaaaaaaaacatttctaatggcatctttcgttgctttgggtgaatacaaacacctaaaacataaatggttttattctacggaaacttattacttttcaaagaaaatattcaaacggttctttacataataatcgtttaattgttatcatttacatacaattattttcaagatacacgtttcgtctcaaatcgtcttaaatctaataaacaggcacacaaataaatgcaataatttctttgtatctagtttctaaatacgtcctgtgtgcaagcatccagaaattcaatacgtggaacatttcatctgaatcttctccagaatcttttcaggttctgcctatttcatggtgggcatggccacagccgcctgggtgtgggtcacatccgttttgcgccacaactgggtgaccgtcttcgtctgggtgtagaatttgataccctgtttgccatagaagtgatggtcgccgcggaaagagccacgagttccggtaaaggagaacatgggcaggggcacgggaattggcacattcacgccaacctgaccagcatcaatttcgttgacaaacttgcgggctgccgctccattggtggtgaatacggcggtaccatttccataaggattggcatttacaatgccaatggcatcgtccaaggtgtcggccttcaggataaccaacacagggccaaagatctcctcagtgtagcacttcatgctgggcgtaacatcgcttaggatggttggtcccacaaagtatccatcctcgtatccgggcacggttatcttcctgccgtccaggataagcttagctccctccttgaccccagactcaatcaggtcattaatgcgttggcgtgaggcggcactgatcacgggacccacgtcagttccaggtacatggccggcatttaccttcagcttctgggcacgctccaccagatcgggaatccatgcctgggcatcgccgacaaagacagccgtagacaatgccatgcaacgctgaccagcagctccaaaggcggcacctgccaactggttcaaagtattctccttgttggcatcgcccaggatgatgccgtggttcttagcgcccatattagattgcacccgcttgccattcttgccagcccgctcgtaaatgtacttgcctgcctggtcggagcccacaaaggacactgccttaatttcgggagcatcgcagatgaagttcacagcgtcatgttggccatggattacgttgacgacacccggcggacagccagcttcgttaagaagctccatcagcaacatggttgcaccaggcacacgttccgatggcttcagcagcatagtgttaccggtggtgatggccaccgggaacatccacagcggtatcatggccgggaaattgaacggcgcaacgccagcggttactccgaggggcagcactagtgagtacgtatccatgtccctggccacgttggctacggtttcgcccatctgcagagatgggatgctgcagcaatgttccaccacctgaaggccgcggagcacgtcgccctctgcgtcggccaaggttttgccctgctccttggtaatgttcttggccagctcacccatgttctccttgatgagagcctgcagcttgaacatcacctgctggcgggtgaggatcgactggttgctccacgagcgaaaagccttcttgttcgactcaagggccgcctgcatctccgcctgtgtggccttgggcacgcgggtgaccacttggttggtggccggatcgtgcacgtcaatccattcgttcgtcttcgactcaacgaacttgccgtcgatgaagagcttggttgtgggagcggctgaagagtaggacctctttgccagatggcgggcctggtgataaaggagggacaagagttggtaaacagccagtacaaaaggtatgaactccgatcgctaagcgtactttattttcccacttccacgtatactaaaccaaaaatttaccatttagtccacctttcatttgctttgcaaattgcccagtgctcgcaatcctaacctcaacggccggacaaatccgtttaatgtggggtgaggtctatttttttgggtgttgataacttgagtggtaggcgcgcggggggcagccgcccacgcttatcagtgtccatctggcaaattcgagattttcatggcgcgcctgtcgtggaaaggtaccgcttatcgcgttttattggatttaacgtcaactcaaacattgtaccgctaaattccccgcgaattcgccttgtgcgctttatctgcttaatattctggttctagttctacttcttccgcttcgcagcgacgtattgcgtaacatgtgttgttttcaactgcccgttcgccgctcacacccgtgggccattccaatcactagagtgggtggagtgtgagatgggcgccgaaagtgcatacattacatgcccaaggccaatcgcatcgccaattaccgaattcacggccacaccagtgtcagagagaacgagagagagcgccaaaacgatccaaatgctgatggatggatgcacgtatgtatgtatgtcagggtgaggatggcagcctagcatgcctataggacatacacccacccaccaattggaaactcacctctgctccgatcaatcgcactagggacatcttggggatacggagatgagaatttggtgcggggatcggatcgcgtgctctccgaacggtggctacactgaaactgaacgcagcgcagccgcccatttctgatgccagttattctccactgttctctacacatatacatgaatggaaatatatatgtacatatatctgtataggtttgaggtaatgtatggtggtgtggtgtggtattggcatggtgtggcgattgttgatatacgaaggcgaaggcgaagaccacgtcaaaaagtgctttacattagcaagtggttatagtttgatgctcacacacacgtgtacacgcacatatgtatgtaacttgctaccgcacacaccgttaggaaccgggggcacagctgttgtttttgtgttgctctgttttcgcaattgttgctgttgctgttttttgggggctcgttgtgagtatgtgtgtgtgagtgtagtgcttgctttgcggtgtttgcgttcttgtcaattccctgctggaagggaatgttagctatggtgacggcagtgtagtattgtagtacccaaatgcatactctatggttaatcaattttatggtaatcaagccagtttatgtgttccagttagattgtaacaactttttaagtgtacaacagtggaagtgtattggatcttcgatgctagacatgctgaactggcttagggtatttataaacaccggcggatccaatgtagtatatttgtgtttttccatcaacgtatgtacatatgtacatatgtacgtatggacacatgtacatatgaacttaaacgaaatgtaatcaaatattaatactagtgcttaaccgaggatggaaaaaataatcaattaggtgataagtgcttcctagctgaacagataaatcctaaaaatgtttcctggaacgcagtgtggacagaagcaggctggcgcatttttcactttctgaatgaaaatttgtctgcctgcttttaggcttttggtctattaaaatagcaagttcgctttcatcatcgggcagggtaagcttttgctagcagccccgcttcctggtcaacataatcaaaaggactagcctgcaccgggaaaacaaa

SEQ ID NO: 26396 - DNA, 1968 bp, DROSOPHILA
atgggcggctgcgctgcgttcagtttcagtgtagccaccgttcggagagcacgcgatccgatccccgcaccaaattctcatctccgtatccccaagatgtccctagtgcgattgatcggagcagaggcccgccatctggcaaagaggtcctactcttcagccgctcccacaaccaagctcttcatcgacggcaagttcgttgagtcgaagacgaacgaatggattgacgtgcacgatccggccaccaaccaagtggtcacccgcgtgcccaaggccacacaggcggagatgcaggcggcccttgagtcgaacaagaaggcttttcgctcgtggagcaaccagtcgatcctcacccgccagcaggtgatgttcaagctgcaggctctcatcaaggagaacatgggtgagctggccaagaacattaccaaggagcagggcaaaaccttggccgacgcagagggcgacgtgctccgcggccttcaggtggtggaacattgctgcagcatcccatctctgcagatgggcgaaaccgtagccaacgtggccagggacatggatacgtactcactagtgctgcccctcggagtaaccgctggcgttgcgccgttcaatttcccggccatgataccgctgtggatgttcccggtggccatcaccaccggtaacactatgctgctgaagccatcggaacgtgtgcctggtgcaaccatgttgctgatggagcttcttaacgaagctggctgtccgccgggtgtcgtcaacgtaatccatggccaacatgacgctgtgaacttcatctgcgatgctcccgaaattaaggcagtgtcctttgtgggctccgaccaggcaggcaagtacatttacgagcgggctggcaagaatggcaagcgggtgcaatctaatatgggcgctaagaaccacggcatcatcctgggcgatgccaacaaggagaatactttgaaccagttggcaggtgccgcctttggagctgctggtcagcgttgcatggcattgtctacggctgtctttgtcggcgatgcccaggcatggattcccgatctggtggagcgtgcccagaagctgaaggtaaatgccggccatgtacctggaactgacgtgggtcccgtgatcagtgccgcctcacgccaacgcattaatgacctgattgagtctggggtcaaggagggagctaagcttatcctggacggcaggaagataaccgtgcccggatacgaggatggatactttgtgggaccaaccatcctaagcgatgttacgcccagcatgaagtgctacactgaggagatctttggccctgtgttggttatcctgaaggccgacaccttggacgatgccattggcattgtaaatgccaatccttatggaaatggtaccgccgtattcaccaccaatggagcggcagcccgcaagtttgtcaacgaaattgatgctggtcaggttggcgtgaatgtgccaattcccgtgcccctgcccatgttctcctttaccggaactcgtggctctttccgcggcgaccatcacttctatggcaaacagggtatcaaattctacacccagacgaagacggtcacccagttgtggcgcaaaacggatgtgacccacacccaggcggctgtggccatgcccaccatgaaataggcagaacctgaaaagattctggagaagattcagatgaaatgttccacgtattgaatttctggatgcttgcacacaggacgtatttagaaactagatacaaagaaattattgcatttatttgtgtgcctgtttattagatttaagacgatttgagacgaaacgtgtatcttgaaaataattgtatgtaaatgataacaattaaacgattattatgtaaagaaccgtttgaatattttctttgaaaagtaataagtttccgtagaataaaaccatttatgttttaggtgtttgtattcacccaaagcaacg

SEQ ID NO: 26397 - protein, 552 aa, DROSOPHILA
MGGCAAFSFSVATVRRARDPIPAPNSHLRIPKMSLVRLIGAEARHLAKRSYSSAAPTTKLFIDGKFVESKTNEWIDVHDPATNQVVTRVPKATQAEMQAALESNKKAFRSWSNQSILTRQQVMFKLQALIKENMGELAKNITKEQGKTLADAEGDVLRGLQVVEHCCSIPSLQMGETVANVARDMDTYSLVLPLGVTAGVAPFNFPAMIPLWMFPVAITTGNTMLLKPSERVPGATMLLMELLNEAGCPPGVVNVIHGQHDAVNFICDAPEIKAVSFVGSDQAGKYIYERAGKNGKRVQSNMGAKNHGIILGDANKENTLNQLAGAAFGAAGQRCMALSTAVFVGDAQAWIPDLVERAQKLKVNAGHVPGTDVGPVISAASRQRINDLIESGVKEGAKLILDGRKITVPGYEDGYFVGPTILSDVTPSMKCYTEEIFGPVLVILKADTLDDAIGIVNANPYGNGTAVFTTNGAAARKFVNEIDAGQVGVNVPIPVPLPMFSFTGTRGSFRGDHHFYGKQGIKFYTQTKTVTQLWRKTDVTHTQAAVAMPTMK

SEQ ID NO: 26398 - DNA, 3751 bp, DROSOPHILA
ggtggttaattgcgaatcaacagcagctcaattaaagcaaaaaaaaaaaaaagaaatcaaccgccagtgccaatcaataaaaacaattgaaaaccaatcagagtttaattaccgcaacaaaacgctgatgagacgtcgacagtaaacagaaaatcccgcacaagagcgaaatcaccaaaccataaatcaatagcaaacaaaaacacacaaaaacacagcatattcgagcatatactggatatactggagcctgtggcagggaccagggagcatgtagcatgaagcacatgaggcgcaaccaagtagaccgcagaataaaggcaacaataaaaactggcaataggatggactcgtaaaagagcgggtgccacgaggatgcccataaacaaagaagtaaacaagcgccaagtacaatacacatactgaaacatgcaggcacggggcatatatacacagtatatatgtctgtacataaaaatgtctccttgggtggacttccgccggaaatggagtgcagaacgagcagcacttgtctgctgatatcagcagccatagacaagcgcataaaagcctgctaaccagctcaaaggcatcatcattacgagcttgacacgaatataaactgaataaacaaacaaataatgtgcgaaataaattcaacacaaatgtgggctttaaaaatgtgtcattcgaaaaaaaatttccttgattttactaagaaaataatttatacaaatacatccaataatttaattcggcactaagccattacggttaacattttttttattgagtacttggcgctttttcactagattcgcatcactgattccttgttataccagcagttggttttcccaagaattgatttaatattgctcaattaggtcctcaaatctggcctccaaaagctactagtttcctttgtggcaattcagtcatagttgaaaccaggatgcagttgcacgaccatatgaagtacatagacttgggttgcaagatggcatgcataccaagatatcaatggaaaggacgccctactgaaagacagttctacgcttcggagcaaaggatagtgttccttcttggaaccatttgccagatattccagattactggagtgcttatctattggtattgcaatggccgtcttgccacggaaacgggcacctttgtggcacaattatctgaaatgtgcagttctttttgtctaacatttgtgggattctgtaacgtttatgcgatctctacaaaccgcaatcaaattgaaacattactcgaggagcttcatcagatatatccgagatacaggaaaaatcactatcgctgccagcattattttgacatggccatgacaataatgagaattgagtttcttttctatatgatcttgtacgtgtactacaatagtgcaccattatgggtgcttctttgggaacacttgcacgaggaatatgatcttagcttcaagacgcagaccaacacttggtttccatggaaagtccatgggtcggcacttggatttggtatggctgtactaagcataaccgtgggatcctttgtgggcgtaggtttcagtattgtcacccagaatcttatctgtttgttaaccttccaactaaagttgcactacgatggaatatccagtcagttagtatctctcgattgccgtcgtcctggagctcataaggagttgagcatcctcatcgcccaccacagccgaatccttcagctgggcgaccaagtcaatgacataatgaactttgtattcggctctagcctagtaggtgccactattgccatttgtatgtcaagtgtttctataatgctactggacttagcatctgccttcaaatatgccagtggtctagtggcattcgtcctctacaactttgtcatctgctacatgggaaccgaggtcactttagctgtgagtatgagcataatagatttctatataacttttatactataactacactaaatagtaaataaaacggttgccaccttcaggctcacttctgctctaaatagtttttgtagaatatgtgcaacttacctcagcatatatctttcttcgtgaagaactgtttctcttcgacggtctatccgattgactgattgattgattgaaggtatcagtactaattgattgggatggattatgatgtcacactaataggcaaggccaaagtatacactatactatacgataatcgaaacgcagttgccgttttctcaggaaccctgatatagatgattacaaattacttaattcgatttttgcaggctagcgtataaaggtcggtaatatggggcaaatacgacagccacgttttagagcaggatggaatttgagaactactttaagtattttgacagcattttgcgtctggcgatgtttccacgaggaagatttgtatccaacgtttcgaagggcattctttttgctaggtaacttttgcctggcttaccaatgtattggagtaattatagattgtatagattggttcatatatggacggaaggcggtggatacccaaagattcgttgctgagatctcagaggctacaggtgctcgtcgcagttggattttttaatatatgtgtcctctcgaatcgtcgtcctaaaattgaaattttgcttagatattattaccatattatgttttattcatttaaattatatttttctttaaggaaaggtagcctttggaaaatcttgtcttctttcaccttattgaggatctaattggtgctcaaatattctaataatttgttcctaaattgtcccgaccaagtgccataatgaattttaaacacaaagactttcaaaaattccttattaaccagctgcagcagttggcagttctcaccacgaatcgtccaaccgattatattaatacgtctgggattacgttgccataacccagtaataattcaggactagatgcagttggaggactttatgcggtacccggacctcgtgtgtcaagcggcccaacttcccagatacacgtggaatggcagacgatccttggaagttaaacgcaacttggcaaaacgcattatcttctggcttggagcagtaaatttggtttatcacaatattggctgcgtcatgtatggctatttcggtgatggaagaacaaaggatccaattgcgtatttagctgaattggcatctgtggccagcatgcttggtttcaccattgtgggcaccctcaacttgtggaagatgctgagccttaagacccattttgagaacctactaaatgaattcgaggaattatttcaactaatcaagcacagggcgtatcgcatacaccactatcaagaaaagtatacgcgtcatatacgaaatacatttattttccatacctctgccgttgtctactacaactcactaccaattcttctaatgattcgggaacatttctcgaactcacagcagttgggctatagaattcagagtaatacctggtatccctggcaggttcagggatcaattcctggattttttgctgcagtcgcctgtcaaatcttttcgtgccaaaccaatatgtgcgtcaatatgtttatccagtttctgatcaacttttttggtatccagctagaaatacacttcgatggtttggccaggcagctggagaccatcgatgcccgcaatccccatgccaaggatcaattgaagtatctgattgtatatcacacaaaattgcttaatctagccgacagagttaatcgatcgt

SEQ ID NO: 26399 - DNA, 1182 bp, DROSOPHILA
atggcatgcataccaagatatcaatggaaaggacgccctactgaaagacagttctacgcttcggagcaaaggatagtgttccttcttggaaccatttgccagatattccagattactggagtgcttatctattggtattgcaatggccgtcttgccacggaaacgggcacctttgtggcacaattatctgaaatgtgcagttctttttgtctaacatttgtgggattctgtaacgtttatgcgatctctacaaaccgcaatcaaattgaaacattactcgaggagcttcatcagatatatccgagatacaggaaaaatcactatcgctgccagcattattttgacatggccatgacaataatgagaattgagtttcttttctatatgatcttgtacgtgtactacaatagtgcaccattatgggtgcttctttgggaacacttgcacgaggaatatgatcttagcttcaagacgcagaccaacacttggtttccatggaaagtccatgggtcggcacttggatttggtatggctgtactaagcataaccgtgggatcctttgtgggcgtaggtttcagtattgtcacccagaatcttatctgtttgttaaccttccaactaaagttgcactacgatggaatatccagtcagttagtatctctcgattgccgtcgtcctggagctcataaggagttgagcatcctcatcgcccaccacagccgaatccttcagctgggcgaccaagtcaatgacataatgaactttgtattcggctctagcctagtaggtgccactattgccatttgtatgtcaagtgtttctataatgctactggacttagcatctgccttcaaatatgccagtggtctagtggcattcgtcctctacaactttgtcatctgctacatgggaaccgaggtcactttagctgtgaagattggttcatatatggacggaaggcggtggatacccaaagattcgttgctgagatctcagaggctacaggtgctcgtcgcagttggattttttaatatatgtgtcctctcgaatcgtcgtcctaaaattgaaattttgcttagatattattaccatattatgttttattcatttaaattatatttttctttaaggaaaggtagcctttggaaaatcttgtcttctttcaccttattgaggatctaa

SEQ ID NO: 26400 - protein, 393 aa, DROSOPHILA
MACIPRYQWKGRPTERQFYASEQRIVFLLGTICQIFQITGVLIYWYCNGRLATETGTFVAQLSEMCSSFCLTFVGFCNVYAISTNRNQIETLLEELHQIYPRYRKNHYRCQHYFDMAMTIMRIEFLFYMILYVYYNSAPLWVLLWEHLHEEYDLSFKTQTNTWFPWKVHGSALGFGMAVLSITVGSFVGVGFSIVTQNLICLLTFQLKLHYDGISSQLVSLDCRRPGAHKELSILIAHHSRILQLGDQVNDIMNFVFGSSLVGATIAICMSSVSIMLLDLASAFKYASGLVAFVLYNFVICYMGTEVTLAVKIGSYMDGRRWIPKDSLLRSQRLQVLVAVGFFNICVLSNRRPKIEILLRYYYHIMFYSFKLYFSLRKGSLWKILSSFTLLRI

SEQ ID NO: 26401 - DNA, 3119 bp, DROSOPHILA
agaagatactaaagcaattgcatcaaagctgtcagacggacgatggcgaggacgatctgaagaagggcactcagctcctggaaatctatgccctggagattcagatgtatacggtgcagaagaacaacaagaaacttaaggccctctatgaacagtcactccacatcaagtcggccattcctcatcccctaatcatgggtgtcatccgtgagtgcggcggtaaaatgcatctacgagaaggcgagttcgaaaaggcacacacggacttctttgaggcgttcaagaactacgatgagagcggttcgccgcgcagaaccacttgcctaaagtacttggtgttggccaacatgtatgtaaaacagaaaacaggaaaagcattttcccttattaattgttccactcattttcaggctgatgaaatcgggcataaatccctttgactcacaggaagccaaaccgtataaaaatgatccggaaatccttgctatgacaaacctggtcaattcctatcaaaacaacgatatcaatgagtttgaaaccatcttaaggcaacatcgcagcaatatcatggccgatcagtttatacgtgaacacatcgaagatttgctgcgtaacattcgcacccaggtgcttataaaacttatcaggccctataagaacatcgctatacccttcatagccaatgcactgaacattgagccagctgaggtggaaagcctgctggtttcctgcattctagatgagtaagatataaatattgaagatgatgtaaactcaactaacgtttatttcatcgccagcacaatcaagggacgcatcgaccaggtgaatcaggtgctgcagctggacaagatcaacagcagtgcttcgcggtacaatgccctggaaaaatggtccaaccaaatccaatcgctgcagttcgctgtggtccagaaaatggcctaagtacagctacatatttccaattcgatgaaaattattaaatttgctagaatttatcttaaacagttggagatgattcattgggcgtagcttttaaggctggtgcttcctccttccttttgccacaacagttgtacactgacatccgcaacctgtaaattccaaaggccacgagggaaaagcaacagatcaatgccaaactcgcgcaaacgaatccaatcgccagaccaggtcgagcccagtccagggcgaagtagatgaagcgatttccgtcgctgcaaaagtaatattaagctgaaagttggataagattgcatagctctacttacatgtcggttccgccggcccaatagtaaataagggaatgcatcaagaatatgagcaccaccgaaaagggatacacaaagtgcataagacggttaggataagccaccataaagcagtcgaagaccatgcagatcgagttgaatgcatggcaccacaagttgtaaagctcacctgccacttctggcatggctaagagagattaaattgggtcttaatgaaagtgtaatatagattttaagatctttgcttacttaatgatagagctgcccagaagacggtggtaatcaacatggatagtaccgaagtggtgtagtgtgagatccagtaaattttcagagcacaatgtccgggagctgaaagtgttattatagactgcccgatttaatacttttcttgcatacacaactaaactaaaacttagtcaaagtaaaagtgtatttagatttgcagaattgaaacttattacagtcccattacaacgactaatactcaccaaaataagattgattgaagtagtaaatagtagcgattacagccccgtaagtgcaggtaaatagacacagtgtaaatccccaatccgtgagataaataaaccatcgaccgccattgaaatcctgcatcatgctgccaatgactccagcggcaaagaaagcagccagaagccatcggtatagaacccagattaaattccgctctccgttctgccattgtgatcggcagaagacaccaggatcttcatggtgcagcgagaattttgaccgctgaaactcctcctttaggggctggcagcaggactctgcgttcggatcagccattattcgatggactcgactggatgagctagttataactttggtggtaatctgcagactgatgaaggaacaggtgttccattggcttaatagccacatttaccgctctgaatagagctaatcgtgtggtactaggcgtatgaattatcacgatccttatcatcctgttaagaaccttttatgtctggttcggcagcagaactcgctaacgataagacccccagcgtggacaagattggtcagagcggttgactgaatcgaactttgattagagcaacataccattatctaccattatcataccatctagcgcagtcgctttaaaagctattggaattcgaaaagtcactttcggaatttcctggtttttttgatggcgcataaaaccattgcttaattgctcattattaggactccaagtgtcgtatgattttggctcggtagtacaactctttgctaatagtagatatcattggaaattcttgatcagagtccacgataaacccgatcggttcataccatattccatattcccagcagcgaatcacggaaaccctatcagtagttgttgttaagatagagaataaaagttcgattctagcacttgaaaaacccactatcgacctgtctgccaaatcgttttcagatatgaaaattaagttttatagtggccatcgatagtgccaaacaaacaacattatagaatgaaataatcgtatataaattcaaacatattgattgtcttattataaatatacaagcaaattgcctgtttaaagagtagtacaatatttttcgaaggcatgaagtgattggaaaaaaccgtgggctttaaataatatttgaattttgtttattgtccatctgtatgtaacattaactcaattcaaatttgaagctttaaacaataattcattcaacaacaaaatcgtgactaagagcattctatgaatactccgtttgcaataggacttcttgctcaaaattaagaagaatcctgcgatccttgtgttcttggaggtagattaatgaaaaata

SEQ ID NO: 26402 - DNA, 863 bp, DROSOPHILA
ttataactagctcatccagtcgagtccatcgaataatggctgatccgaacgcagagtcctgctgccagcccctaaaggaggagtttcagcggtcaaaattctcgctgcaccatgaagatcctggtgtcttctgccgatcacaatggcagaacggagagcggaatttaatctgggttctataccgatggcttctggctgctttctttgccgctggagtcattggcagcatgatgcaggatttcaatggcggtcgatggtttatttatctcacggattggggatttacactgtgtctatttacctgcacttacggggctgtaatcgctactatttactacttcaatcaatcttattttgctcccggacattgtgctctgaaaatttactggatctcacactacaccacttcggtactatccatgttgattaccaccgtcttctgggcagctctatcattaaccatgccagaagtggcaggtgagctttacaacttgtggtgccatgcattcaactcgatctgcatggtcttcgactgctttatggtggcttatcctaaccgtcttatgcactttgtgtatcccttttcggtggtgctcatattcttgatgcattcccttatttactattgggccggcggaaccgacatcgacggaaatcgcttcatctacttcgccctggactgggctcgacctggtctggcgattggattcgtttgcgcgagtttggcattgatctgttgcttttccctcgtggcctttggaatttacaggttgcggatgtcagtgtacaactgttgtggcaaaaggaaggaggaagcaccagccttaaaagctacgcccaatgaatcatctccaactgtttaa

SEQ ID NO: 26403 - protein, 275 aa, DROSOPHILA
MADPNAESCCQPLKEEFQRSKFSLHHEDPGVFCRSQWQNGERNLIWVLYRWLLAAFFAAGVIGSMMQDFNGGRWFIYLTDWGFTLCLFTCTYGAVIATIYYFNQSYFAPGHCALKIYWISHYTTSVLSMLITTVFWAALSLTMPEVAGELYNLWCHAFNSICMVFDCFMVAYPNRLMHFVYPFSVVLIFLMHSLIYYWAGGTDIDGNRFIYFALDWARPGLAIGFVCASLALICCFSLVAFGIYRLRMSVYNCCGKRKEEAPALKATPNESSPTV

SEQ ID NO: 26404 - DNA, 27314 bp, DROSOPHILA
tagacaatggtttagtacaaaattttaaagttatttatcgtttgttaatacctcctttttacgcaatttcggtttttgttttcatttcgcttcttgcatggtataaaaatataaatgttccacatatatttaaaaaatccttttgtttaagtttattaatttgcatcatgcagtgttattatttgtttgtttgcttgctttttttccgttttgttagtttattcttgtcttgttgtttgtccctttaagaagtatttaaagtaatgcataacttaggaatgccttgtggatctgctgattcttccgattcgcttctcgctcaattgttgaattattcgttaatcgtggtgcaattgtcatataactatggggagatttctaagtgagtggcttgctatcgttgcttgcattggtgttgagtacgagtagtatcagctataacggaatcgaatacagtgtcctaagtgcattcgacacctggctagagggtcacataaattttcctagatgctacagttgaaagcgaacatcgctcagtaggccttgaccacagttcatacctaatacaatacaattcgataatcgcttatttgattgagtttcccatgtggttttacttttggtttagggtttagggttttcttatttattggttggttttaaaactttcaaatgttagcaaacagttaatgttgttgttcttcataagtctaatacttgttgaatctatgtattatcagatagtgtgtggtattataataattgttgataaaaataacttaattaatatcagtgtggcttaccttagtaaatttcgaaaggttttcgatttccatagttaatacatattgatatgcctttaatacgattacagagtacggttacgattacgggttacaattacgattacgtttacgttttacttttacttttactcattagctctcatttagtctgcgacacacactgaactctagggttgacaatgatctttcattttgttggatttacgttttgaacaatatttatttatagatatagacataccaagtacatatacgttactcatcatacaatacgttttgtgttaatcattgatccaatttcgctatgtgtataaaatttataattaccattatttagtattaaatcatttcatcttcctccgtccaattttctcactaagccaatttgtaaaacgtttagtacaaatacaataatatactgatatgttttgcattataaatatcatcttcgtctttgccccgtactacgcttacaacacattttcgatcgattctttattacaatttgttaaatttgtttcgataaaatttgtcttgggtagtgcttggcttggggctattagtccgcgtttttttttttggttttaacttttagttttcttctaataaaccaatgccaatttttgtacaatacaattgttgattttccgaaaatgtccatttggggtttctcataagaatcgagtggttacaattttcgagtatagttttccttgggaatgtgaatcgaaatcaaacgaaccctcaacctaagcatgaaaccaatgcaatttggccaactatcttcaggcaacaaggacttttttccggtttgaactgaatgcttaaattgtgccattaaatgcgctcaaatatcgctcaagaatgtgggcatggcaataaagtgtctgtcatctgagcgagttttccgttcggtaaacgagtatctgtaaactttgtttctttttggctgccgcaaaggcaaaatgacaaacattttagttctatctgcattaatatttatcaaaaattccgcccatcccttggccaatttttcaaattaagcgatttagcattgtgcttcacaaaaaacaatttggtttgggcctggcctatggcgcgtggcgtgtggcatgtggctacagtggtctctggtgtctggccaggatgtccagaatccttcgaaggaccctgcctgaccatctgactgcctaagggtgcgtagagctctaatttcaatttacaaatgttcagcaattaccatcgcattgctcaaaccgatcctactaagttctgtaaacaaatcacctgctcctacacaaatgtctgcgcctactaaaaatttggttttattaatatacgtgttctaactttaagtgtgtatggttgcggttgtgatggggtgtgtgagtgtgtgttccagtttgtgtgtatatgtcgtattttccgggagtggtcttcttttagaaaacccttttggttcgcaatgcggcgcagatgtagatcagagcagcgattccaaggagctggagcctcggggatatggaagcacttcccgaatcgccatcgcaagtacctagtaagagataaagataatggagtttatattcaagcgcagattgcggacgatcaataatgattatgtatgtatgtgggcggttctgaaaaagtcatccaaggcataatctatctatcctctcgctaaacatagcaatatctatatcaataacagctctactatcatgaagccaaacaaataaaataatatggacatgtaagggtacactcaaatagatgaaaatcaagtaagcatttggttttcggtgcaagtttcggtgcattgggaatgtatagaatatacttagggagatctttgggccaacttaccttggaccgccaaaaagtcccgcagaacgaactgctttgcattgttgtatcataacttttttttacatttatgcaaacatagattaagtcaaaattcgtgtgctaattcattcgaaagttgtttgatcacaacaaaccaggcaagatacaaacttcaaatggcccggccggcgatcagatttcaacacgccaaaccaggcccaaagaccggcaaagtgttcaatttttagacttttagtatttcagcccgctgcgcaatgtacagggataacttgctcaacgacttataatttataatccgcgtgaggtgaagtgcaagtgtgcaaaatgagttaaaatcaagcaaggcaataaaacaaagcgaagcaaatcaatttcgaaatcaatcttcggttagagctaggcaataaatcgcctttataatatccgaattgttcatatttcttgagccactctgtcgcgtgcatttaatttttgctaatttgaatttaaaaggctggccaaaccatagattattccattcagataatgaagaaataaattggcacagccgcaacaaaaaccacatacaaattaaatacgccgaacatacatatttgaaacacgtgtcgctaaaagccaaaaaaaacgaaacgaaacggagcgatgcgaagcgatccaaaccgcaccgcaccgaatccaaagagaaaaggccatacaaatgcaaaagatattgtatctacaagctacaggtctttaatccgtatctcaacgcgtgcgcctgagttatgacacggcgaacgtttatttatcgcggccggtgacatttctcgattccagcggtgccagcgtgtctggtggaaacagcaggacgaccagttccagttcccattgtatgggattaactcaaactagatctcgggtgaaattttaaatggccattaaggcaaatgggaagcattgttggcaagcgctgttggcgacaaagaatacaccgctacatatacaaatgcaaattaattaatttgccaaaagcaaaacctgtttgctccgcggatggggatagattttcgggtgctaagtggcaaacttttaccgcagccagatcaaaagtagagcttgtcatttacatatgtatgtacatgcatatgtgtatattcgtatacccgtcaaatgatcgattggggagatagctgcattaagagagggttttagatagctgctctccccaaatccgcagttcgttcccccaggcttatttgcatacccgatcgatcggatttatgtaaaactgaaaaccaaaattagctcctaaaaccaatacggttaattagcataaattaagtttttattaatttgtgagacagtaattttcttttgtgccactcatcgatttgctggtcagattgcgagccagacatggtggcgcggccctctgcgatggtgatctttcacccaaagcccataaactttaatggctccacaacttttaaggccttaagtgcaaacataaaaagccacaacgcccaccgactcgcagctaatctatataactagagacttttacggggctcgtcattgatcattgtcagggccaggcttatatgcatatttacatttcttttctcggtcagtcgtccgatctgtctcgcaactcattttcctgattgatgtgcacattttgaaaagctgacactgccataaattaaaaatgcggtcgtcggaatgatgctacgcatcaatgaatataaattaaataaatgaaataaattcaaaagcataactaaaaatctttcaccgaatcagtcgcgtcagcccctctgactcatcacttcgactaagtgaaaaaggatggagcttcaaaacgtattaactgcttgaagcacagaaaaaattcttatactataaactttgtttgttatgataaacagttcttgggttagaataaataccaaaatgcctattgataagaattaacaatattatagtttaacattatatttatctaacaagaaataatagattttcttttggttattcatttttctcatataaaagccaattctgtcaactaccatttttgtgaatgtatttttctctctgcagctctgagttaaccattaatcattcgaacggtaagtgtttaacatttcggatttggacgaccattgacactcacttttgtccagagactctcgaaagaaaggcttgggataggttggcactttaatcgccgttatcacaggtacattatcggagtgaataatccactccggactcgtatgttttgcctgaccagagttaacccagcgctcgaagggaaccgaatctcagccggccttaaggtgtggtgccgatgatgccgacagccattagctgactttatgccgttttttacgatatatcgtagcgaataccaaatttatgttaattgtatgccaaacatacacacaaaacgatatcgacacaacacacaacacaacagaagccaaagaacgaacactgatagagcaatacaatggcaaacagaaacctccaacgatgactgtactttcattcacaattggatcggagtgtgtggggcatttatataatatgtataagttattatcactcacctgcccaactcctgacttttggcaagtaatcattccagaacgagcagcgagccgccaaaggacccctggccaatttctcgatcttatcgtcggtgctgaaaatatagtagacgggatcctccttggagaagttgggccactcctcgccatcctgagcgggatttctgaaatgggcgggcgttggtaaaagttttttttatggcaaacgagagggaaacttggctaggtttgctataaaaccggtaagagcttttggtgtaaagcttggcagacaaaactcaccccgtcttagcaaactcgatgaccgcactgagcatacgcttgcccagctcacgctccacaggtcgatactgcagggagttgttcagcggctggccaaagaagtattcgatctcatcgccgtgcagcacgcccatccattcgccccacaatgaggtgcttgtgcgctgcaaaaaagcaaaagaatccaaataagaaattgaacatggctagaaaagccaaagaaaatgccgtgaaaatgggaccgtcgataaatgagagcagagcgccacgctgtcgtaaactccgccagaaattatgcagataaacatctaccctttttatttatttatttgatttcgctcgcctgctcgctggcgttcgctgttaatggtaaatattgtcgcagcatgcagcgcactggaacgccgaaaaaaaaaacgaatgaataaataagtaaacgcctggtcggctgccagctctgagtttcagcatttcagtcccaaaactctgtcgcccttgacaggcagcggcattaaatgccctcgtgtggcgccatttcacgtatctcacagcagtttgcactggagctgcatctggggatgcggaatcgcaggacaggctgttgcactgggtacatgcacgggcgaccacgttgcgtatacgccatgctataccatggaccacatctgcaggggcatatacccataatgcctaagaaaattaacacccaaatatttccatcggcacataaatgcttggcactatgacaataatgaaagccacatatacattattttagttttagttcttagatatctaagctcgaaatttttttagaactcactttgtatgcggcttatactgatacttaaatgtaacaatatcaaaggcacgtttaaagctactagccgtccgtactctttgctaccatcgtgctgattttcattctctggccagcaacaccagcctaaatgctaattaggcaatcctcttgtaaaatgcaatcttatgcaaagcgaaaaaggaaaacctgcctatacgattctgctgaccattacgcccagctaagagctgaaagccgagagctgagggctgagaactgagaactgaaagctgagggctaagcacttaaccattcaacttgagttggccacagtcgggctctgcttgagctgcaccttgacaggctggcagccaagtgccaagtcgcataatgaatagtgtccgggatatgccatgggtaattctggtaatgcgggccgctgcttttgctccttctgctcctgccaagttgttggaaatttatgcgacttggtcgttggctgtcaggacacacgtcccctatataaagtagtacgtacacacataacataaaagtcctgcagtccttacgccttttcgtgcaaataatgaaaaattgtacgcagccggagcggagaactaaacttttttgatttaagcgcaaaattgcaaacagcagtgaaacttggactcgtaggtcataatgagaagcgccacagtcgaaagtcgagaggagtagcgaactacagtggagtaaagtggagtggagtacaaccagtaggagcaggaaaagcaggaggaacagtggagaaggaaaacttatttaagtgccaggcacgttgcacgctgcagtagtcagcggcgaatggcgaaatgaaacagaaacaggatctgggaggggggctaaaatatgggaggacaatgggaggaacgctggtcagtcaagcatgcggccagtggggaatggggatgaccccctggtcaccagccaagcagatagacaatctggcaggcactttagcagctggcgaccccatttgccatgcttcgtcgccccatcgcgtacccgtttatgggcaaagtgagttacgagttgtgctgctgcaacttgacggctgtaattaaaactaatttcatttgctctcatttccatttcgggggtggcaacaaccggtcagtttctgcctgtcaactgctggcgctgctggtctattggattattaacgggcgatttggtataaacaatgcagtcaaactggcacaccgcacgcactaaattctgcatattgtgcaatcagccggaaggagccacaactcgacgggtaaaacagtttgattatcactgtaaactggcgtaaatattaaccgaacatcaaaagtaaagagcatattggctatttgataaactaacgagtgatgtggaaacatattgattgcaatgaaaatggaaatatatagttttttcgtgcattttcgtccttaggaaaactcaaacctcccaacaccagagatatatgtgtcgtaagagtaccgcccactaatttctacgctgcgtatgcttaatattgatttgcctactgcagtgattcgttcggccaaattaccacttattatcggtcaatatggtagacgatatcgcagccattagtttgtgtatattcaaggaatcgaagccggcgaacgaaaatcaatacataatacagaccactctgtgtatacgcattgtaagagctgcgtatttgttaatcattaggccgatccaactgggtctgcaagcagccgatatcaatcgacggcagcaggcaccgcagctaaagtcgtttaaacaaataactgactaaaattatgccccacacgtgcagggcatgcgggccgtgacctcgtaaattgaagttttattagtcgactccgctttcccatgctcctggcccctttcgtagggtcgtgatccagtaacgatttcttgccctgttccctcttagctactttgtagttgtatagttgttgtgtctgcccgcagccaacatcctgagaactgtgcgtgtgcgtacagtttaattggcgcccaacgtggggcgtttcttagtatgtgtgtctttgcgagggttcttcactcttgggtgggcgtgagttgcgtgaaacttttggttaccataattatggcggccaaggttgcctgctagcttaacaacagcaagaacaactgcgacagcgacccttgcccccataggtgtgacattatgaagtccaatcaacggattgcacgcgttgtagctgtcttcaacaaattgcttgattaattgaaaaattcacacgaagtggtcggacacgctacgcaaaattgcacacgacaaaggacagggatgatatcttcattcagtgtcaatgatttttcaatcatcacaatcataagaaatacagtaatttcttggttgacggattaattgtccagtaatatcggtagcacataacttacttctagctctttagaaattgcctataattacaatttttttttaatttcgatgcagctcgaagaaaacattacgcaagtctgagtatttttcgttaattagtttatcaacgaactttaactttaacctttacaagcatgaataattatacaccattgaataacgctaacttgaattcatgttcaagttattctccgtcaaatgcaattgactagggtatgctcctgaccccattctgcctaaagtactttcactttctatgtctctgattagccgcaagctctgctttcagaaggttcaacccttagtaatatacttcggcttttgaaaacgccccgccatcattcagacattaataattaacgttcacagtgtagcgttgacatatcacggagccgtaactgcttccatcgaaaatgcagccactgtggagtacatcgagagaaattcagcttttttaatttaattgaataccttttgaaagagtcagcttgaactcgacactcgaaaggtatctgcaagcgcatagtttattcacgcttttcagttggctcaactttcaaaaaaaatggcttaagattgtaaaaaagaaattctctggacttgagcaaacattttcatagtgtcgaatacttgcgacagttatccactttgggcctgagccggactgctgcctgccattagccttgtgtgcaattttaatgacacgcaaattgcagttgcctgcgttgcagtgacttcagcgtggatttttgcgccgttgcgtcacttgcgccccatttgaccgcattccgattggacgcacgcgcttcaacgccatcttacgtgtcaaagcctgagaaatatttaatgggtgccatgctgttctggccatttcgccaggatacagtgggcaccctcgatgtggtactcacgtgtgtaaagtagtagtagtgcacggaagcgcctcgctccgccagagcctgggcatactcgttggtggggcaggtgaagaagtgatcgcccacggcgcgtccgatttgctgctggttctgatagccaggattgccttcccaactggtatactgaaaaagaagaaaaaagtttacctcaatatatccctctctaatttggaataatttaaattaatgatcagtacattacgtccataaagttttaaaataaatcataagacccgccagttactgtaatataatataagatattagtgtggcaaatgtttctaagcaactatcataatttttgccaactcaatgggaacgaagtccgtagtcatctacaaaatgaagttggctgtccaattaaccaataaccaatggactgtttcagagaaattggatcttttaaaagctctacaggatcctggcccagctaattccggattttgtccggacttaactgtcaaatgcatatccagtgctgacgcagaatgccgcgaaatgaaattaaccggcgacagggcagagtaaatgaataaagccactaaatgcaattcaatcagccagccgtctccgttgacgtcgcatttaacatgtttagcacatgcagcgatgctgctggtgacacggagcagttgcacgttgcactaatgcacttcgggggatgtgtactttaaaaaatattcgcaatatacataagtataaatcaacaaaattctataagatactacggggaatgtgatattttaatacattatatattatattataatataatattcctaaggccttgaaatgcgaattggtatgcataatttcaaaaataaaataaattttcttcagtgcatctgtcttttgcagttgcttattcatcatagaatgccagtgcgtatttaataattacctggaaaatgatggcctcgcgttccgcttgcgttgccttgccaaaaatattgttcataatttccaggtatttgtcccgtggcagggccgtggcatcgtccttatcgaagtaatcgatgaaatcgtacagcaagaagtaagtgcctgcgaaatagaaaagggaaataaatgtttaacccatgcgaggtcatgtcataacaatgctgggtgaaaagtgacgcgaagagggatgctggccaatctggaaaaacaattaccactacaggcggcgcttcaagatgccgactcacaatggaggggccgtgccaaggacaccgcgctcagcattaaccccaagtccttagacccagcagccgcaccaacaacaggcgcagcagcaacacctacgacatcagcagcagcagcaacaacagcagcagcaatcataacagtttcagaagccgaggagttgtaagtgcaaaatagaataaaccaaaacttgtgcccactacaaaaacagaagcatgaactaagaaaaaagtcaagtcgactgccatataccctattccttagaagtcagcccgatagaagggttggttacttccctagctcagcagaacgtgaatgaggtatcgaataccttttctgccagactattactactaaaaaaactaatatcgaattaataacaagcggagttttgggacacatctcacacgatttctcataatcaacaaacaatacctctctctctctcttaaaacacgaggtacaacaggcaggacgatagaacaaagcggctcgtcgttgccttttattaacttaatttttatggcacttgttgttggcccagttgttgttctctccggcttttgtctttgtcgcacacttcaaatacgggccacactaacgaaccataattgctgcctatgagcggcgacggcagcaacacaacagcaacagcagcagcagcaacacttgcggcagcaacatcaggacacatagtcgagtatctgtgtttgtgtgggacgagggcacgtgcaacccattcccaatttatcttgctggcccactgtgtttatgtttgcttcgattccattaaggtcaaaaccttatgcaaagccaggcacgaggagctttgacttgaattgcaaacaatattgaacgagctgcctgaaacggtcgcttaccaaagtcgataagtatgctttccacacgatgggggggggggggggggccaggaaatatatttacattaaagaggggatggatcgcttaagggttttgaaatcgaataatttaatagcgtctgaatggtgcatcttatagagttatgggcgcaccatttatacagcacacagatttggaaaagtcatataatctgaataaattattttactacacgccggaacgaccttgcgcttttcaaatattactgtatgtcgggcatacgcttttaattaaattgccaacaacacactcactctgtggccacaaatttctgtgctgtttttttgcggaaaatctcactcactccctcacacacataagcgaaatgtaaatacggttttaatgagtgtataattgagttagcagcagcaacaacaacaacgcggcccaactgattcagcggaacgttggaaacgctagaggcgaaattcaggactcaggactacaactacggagccagcgataagttggccgtctcggaacgcgaagcaattaacgagcaaacaagctgtcttgcacacacacaagcgaaggaggcaccaccacacatacacatacaaacacaaacaagcacagcaaggaacgtacacatactcactcaggatggcatgcaatcgcaaggcagaggacttgccaccaaaagtgaattatttaagcagcgaaaagatgacgtctcgagttcattgcatacttttgggatgcacttgaaagcttctctgctcagggaaaattgttaattctctttaatccatttgatattaaagtacctcataatttcaagagattttcaagtcgtgggatgtgaaatcaagttacttgcgtactccacctaaatataaatagcttatttttggcgtatatttaatacatttaaaagtgcactccgtatccatttctaaataccaactaatttgctaaaaccacatgcaggtcaattagttgaactacactaatattttatttaggataaccattagccaaacgcacacactccaacgcactcaaataaatataaatatatatttatataatatgtttatagcatgtatgtatgtaaaagggacgaaggacgagcgaatttgtcaaaaacaaacagaataggatgctttcatgtacgcggctcatcgtaatgtatttgaatttgtattcgtattgttgcaaatgctagatgaccttgaactcacaaacaccagcacaaacaccagagccaaactcacatacgcacacacgctcagctgagtaacggcacttgtacccatggaaaatggtggcagttgcctggcggccatgcacgcacacctacacctttttggccaagagaaaaaagagaaaagagaacggtgagcggtgagagagcaggagccaggagcagagagaaagcggaaagcagcagctgtgagcaatgagtgaaagtgagcagaaaagcacacgtgtctgctgtgctggcttattctgctcctggcaagacaggagccgcaacaacagcaactagcagccgcaacaccaaaaacactagcgccagtagatgactggccaacagcaacaagaaaatcgaaaggaaagccaaagcacgaactggcacaaaagcaccgagaatcttcttcaatctcttatacgaaaaacacaacccagccctcccaaaaagaacctgccacccaacaccacccacccaaaacaccacccaacgacatcctgcggtggcgtctcgcgaaataataagaaaaggaaaacgcaaacggaaaatttgttacaagtgcgccacttacacggcctggcacggaaaagctggcagcacaatgcacacaaagagttacgccccagattgagaggaaaacaacaggcagtgaatgcggataaggaaagtggggaaaattatgggagaatcaacagcagcatttcgcagaacggcaggttctcaccacacttaacggtgatttatctaataaatggttgcattttcaattttatattctgattaactgtctagttgagtagctagctctagtagctgcaaatttaaaaccggggcttggaacatttaatgggaaaatatttaagagcaaattattcttcctttctcacgttttaaatacagtttgtataaaataatcggattaaaacttttgcgaacaagaattacttggatggaaataaataagaaatcaaatccacaacgataaaaatgaatgtatttaatactaatttaatgcaaatgcatttgcttttcctgccacataaataattcaattatattttaaacacatatttcctgcacagtcatttgtatactgctctttacacttaattcagattcatatagggtttaataaattgagtttggtttcaatatgtaaactttaaattgaaatggaccccaatcgttaaaagttttaatattaatttatgtcggttaaacatttttctcgaaaggtaatacgaaatgattacagcagaactttaactcaactttcattactaatagtttgctgccccgctttaataaaaccagtcccctttgtcactcaataatgctgcggcacgtgtgccactcacgcgtcccgttccgcccatcaagttgagggctcgctttttgctttcgcttttccgcagacctcctaccgccacactgacaccacccaccacccaccacccacagcccatcgcccacaacccatcgaccaccgcctcccgctgtcacctgagcggaatatatatttaaataatttatgatgccgtcccgcacagctgagcgccacattccagtgcgtgtgtgtgtgtgtgtgtgtatagttagtgtgtgcgttcggatgtttttccttttttcccggggtcaccgcaattcgcgtgggcgagtctggcaagtttcggcggcattttatatttttttctgtattttgactccggcaattccggtgcgttgacacatgcctcactcggcatttaaaatgtagcataagcatgttctacatccttagtccgcagaatccttatttttaaggggtaaaggaacaatatgtttaaactgtagtgaaaatgaatcataaacctatttaaccatcgaaatgtatctcgttttacttgccctaaggacacgtaagtatctgttaacttaactaaaaataccttgctatatatactcgtaagctggcaatccatttacacttgccgcacttgaaatttaaagttcgcaaaattcgcaatttgtgtgcgaagccaaaaaagggggaaaaaaacaaaaggctaagccgtaaaagccaacaatacaggacactatacaaagtgcagttctgcgacagccgagtcaggactaagccgagcacaatgtaaccactaccagtcgtactcctcgaaacccaaaacgcagaacccgaaatccgtaacccaaaacccactaaccccctcgattcgccgctcagtgtcatgcaataaaccataaaaattaagcactcgagccaacagaaagtaccgaatgcattacgagtgctcgaaatgggctgaggaaatttttgaaaagcagcccggctaagccaccttcccgcccataaaacgatgagaataaaatgcattttgtctgccagccaggccacaacaaaaagtgtatataaatatataactatatatatatatacgtatagttgcacaaaagtaataaaatctcaaatggatgaagagctccgagctgcagcgtaaaagtttttcggggcgcagaggcaggaagctgggctaaaaagcttggcaaacaacattggcaatgggtagtactttgtttcggataaagtttagcgctgacgtcagccacagaggatgcaacaatggcggcaaggacgacccagaaaaaaaaaccaggggagataggaaggtggatcacgggatggtcgtgatgaagtcactcgcaggaggatgaaatgaaggaggaggaggtactgcaccgggtctttaagtaagcacactcaccctcatccctgacatttcccatcaggatgtcgtagtccttcagatccgccgtcttcatcagcgtcatgggatccgccggcaggaacgcaccatcaatggtgggcgccgagggaaagctgaggatgcccgagtaggagttccactgctgcaccgatatggtcttggcgtccacggaacgcatgcagctcatcacgtgagcgggattggtctgaaatcaggtgggaatgcgaaaatgttccattagtaaagaaagtagtatgctgatgtgagtgacgcgttaaggcaaaggctttgtacttgtgataagagaatgcaatgttagtgaaataaatatcctgtgaacttaatgatattctgtatagcttaccttcagcatagatgcattgcagttgcagtcgttgatcagcgccttgccgatctccacggccttctcggaggtcatgtggctccagggggcgttcatagtgcccgactgcatcattccgcgcttgaccagacccctcgtcaccggcgacatgagctgggcattcaccgaactggatccagccgactctccgaacagtgtcatccactccggatttccgccgaaggcatgagcgttgtccttcagccagcgaatggcgagtgcctgatcccataggcccacattgccgggcgcctcttccgcgaattccgacggcatttccggcgccaggtgcaagaacccaaaggctcccacccgatactggaaggaggccactattacattgcccacggcggccatgatatccgcattgtagatgtccagggtggccgatccggtcatgaagccaccgccatagatccagatcagaatcggcagtccgttggtcgtgttctgcggatttccgttgtggatgagatggtcagtgtccgcctgtttgccattggggtgctatgataataaattgataagcataagagatatatcttagtgcaatatcctagcttgtcacatatatattgtttcatattcatatatgtacatcacaagatatattttctattttcttttcacacttacctcacccccgttggcaccccgcccatggcgaagtcgggcctttgccggcgcccagacatttatgtagaggcagtcctcggacacgttggtgttggggttccagatctcctcgccggagaagccggggaagtactcgtaactaggtggcggaagggaggaagggaggaggaaaggaaaagagcgagaggagagttcttgattagctggtgacccatatgcaaatcaaaggctgtttgtgccccatctggaattcggtcaagccaattacggcaaactaaccagctgtgttatttatttttattcgctctctcttccgttttgcccacttcactccagcactgggattcatttccccacaaaaaaaaaaaaacactggcacactcacatacgccccgttgtcccgggctcagtcccccacaatttgacatagttattccgctttataaatgttgaatcgctcgaatcgatatccctacgcattcgtcgaaagctcagcatttgtctgtccgtctccatagatacctttgtatattcctgtatgctggtggatgtgtgtatgtgtgtgcttaggtgtgtttggcttcgtgtccattaaaattaactttgccgtttcgcataaaagtaatttatcacagaggcggagagaaaagacgatttctgtttcctgcgccagctgccccattcgcctttatcactatatttttctaatttccttttgccgctttccttttggggtgcggaaaaactttgcttctctatttcaagagcgaaagtatggcaaaccaaatgagtttgattaaataaatggaagaggaatgggtaaaatgtttttatttcctctgtatctcttcgattttctatatacacacttgcaaaaagtttcaaaaagagaaacatcaaacggcatattcttttatgcaaattcctgctaaccaacagtgttagccattgcaatctctaccattagtaaatttgcaaaactctctgttaagttccgaatataattatatatttcaactacatccatcgtacgtatctctctacaaaaaatatacattttccttccttgaatggcaaacaatgtgcgatttcaattggcagggtcaacaagctgaacaaagtttccaattggctttttccgttttgaccggctttttgcatgcggcatgacgtcactggcaacggttaggtcaacagcgagctgccgctgcagccgggctgcgattctcctttctaggtcagatgcaaaagtggaacgttccagccctccccctctgagccacaaatacccgctaagtaagtgatgacaaatctctcgtattttcgaaaaaatattaccccctttattcgctgtctttgtcaaaaaccccagataacgtcatttgatagatcgatttgctctttagatcttatgaaactatcttatcttgaaatatttgtgtaactactttttgaaaacacacttataattctgactaattgttggcaaaacccttgcacatttgattacttttgtaataatatggttaaaacttggatttcaacttaccgctcttggacgcaggtggcggataaccgcgtggcgtcgaggacgccgtgccatggctccgcgggaaccggctttcggaagcgcaggtcctcgacgggcggcttggcgtaggggatgcccgtgtagacatgcacctccctgccctgcaccgtcacggagcgaccgcgtacaggtccggaggatgtctgcacgaccaggcgatcgatgacgccgcagacgccggacaggtgcagtgatagcaccagcaccaggggcagcgggatggtcagaggcaggggcaaggacatgggcaggactctgctctgccgacaggagatggccatgacgcggatgcgcagggcgtcgttggctggctaaagcggtagcgatgggtggtggtggcctactttggcctgacgtcactggcactgaccacttgtctctggttctctggctgttcgcgattcgcgatttctgctcgctgggtaactcggtacggaagtggtgtgtctggcggattcgggatgcctgcccggcgctacaagccgcatccacaacttattatccggttgagttcgcctctgctgccacaattgccacttgaagctgccgcccgtgggttgcactacacattctcccgccgcagcagctttggaatccggaatctgggaactggaaactgggtactggttgctcggtactcgccactcgaatcgggtctcggctttattggacttggcttagagtttgaaatggttttcagttggcgtcctctattcgtttcggttttcagagcagctgttgcacttttgcagagcccactccgtctgcttggcctttcttctccgtctgcggatgtgtttgaactgcaaacagaaggaacaggcattaaactatttgtctgagcaccccaatggggtattttcatttttgtagctgcacgtagaaaagcaagtagttatatattatatagttttaagcaagttactattaataaatattcttaattttaagatgtgtagaaggataacatttataaagataagttactttatttatattttttgtcatttttgtatgcacatatgtgtttatactagccattttattttaaaataattagagaaccgctttcgtcgcatgcacactttttctcagttttctgtcactgcgaacacacaaacacaaggacgaattgacttgttgggtgcttgtgcgcctgtgtctgtatgtgtgtgtgtgtgtgtgtgtcgtctgcccccgtttgtatgctgcaatatttatgtgtttgcctttgggttagtctgtgtgtttaccacttgagcagagatgcaaagatgcctcctttcttggtctcggtttgcatttaagactttccgagtgccacctgtatccacccacctcccaccacccgccgggttacccacacacctgcagcgggggccactcacaggattcgctgggattctctcgagtggcgcatatcgctctctaaggctttgcctgcaacgtcgttaaacatattttcttatacgctttcattagagtcacttgaccgatttaagcaaatatcttttcaaaccgaagtagccgagtaaaccattgaagcccaaaggctttttgcgctgattcgaaatatcaggcactggtccaaatggaaaatgtactattgctatgaatagcaagggtggagtaacgatttatctgcatttcaaaggcacactaattaaatgttttgctgaatacataaacgatattttttcacacatgttagtagattatgaaatgaggaatctataataatatatataaatattaaatagctaagtaaaaagtatgaaatacaagtttgatttgactcgctcacattccaatgttaaataaacattttatgacctcgggctgttttcctgctttctgccatttctcgataaattaatcttgggaggctgcagttgggcgaggaaaactagcttttcccggtagcaaatgactttttcagtttatgtccttgacgtttggagctgcagcaactcctggcactgaattaagaaacttgaattttctttggactgagccttgcatgctgacagaccattagaagtcggagcttgtgtaataacactgctgccaggccccctgcagttgcaacgcccccgggcctggaaagtccttttctgatccttttgcctgcaacttgtctgcgaaaggacaaaggaataaagaggctttctcagctggcaccgcagtaatttaaatgttatttagctgcacaattaaaatggcattaagacgccaccgaaatgcgagttgcaggttagcaatttaatttgtttttcaaaccccgccagcaatcccttcacagagtgcacattttatccaaattagcttaattttcctcaggttctttgcattttccacgagttttccctggcaaccctcgcttcgccaacagtatatcaaaattgtcgctgcctgtttctcgacagataagacgtcctgccctaagtgaatattttcttaatttcttgcggttgcagcagtttttccctccgcttttccgagcccccgtttttcctagaacttttccgtaaacatgcgcatttttattccgagtaagtgaggatttacttaaggacgggaaaagcgaccaaaagttgtatttatcttcttttatttgatgtctgtcagagccgtgaagctcacaatttaagcgcttagtttcagctgactcaagcatttttccgtgccaactttgtgttcataaagttgcaacttcaaagttgacacaagcactaaaatgcagaaaagtgtgttaaagcagtcttagtttaatttgaatcaacgacagagaaaattcagcaatttatgggattgtcagcaaaattcagagaaatatgctttaaagcttaactatttttttttcttctttgatatgagaaattgcgattcaaaaacatgttgcttctgcaatttaatttattcacaaaggcattcacacgaatccaaaatcacctatatctaaaccattttaattgagatgcatctctttccaaccttgttttttttttgtggcaacatattttctgtgtggcatagtttttcttgtttcgtagtcctccttttttacctttcaatggaaatccttcgagtgctgccatggatatgataacccagcgagcaggaaagcgatagccgaaaaatgagcgttagaaagagcaagtggagagcgcgaaaattttaatgacattcaaattaaattataatttcaaaagtttcggcgcacagagagcagcaagcgttgctgatgacgacgatgacaaggacatgaccaggtggcacaggtgaaaggcaccgcccaccgaccgcttttcccgccacctcacctccctcgccgacgggtcagcttcgttggccaaaggtcacagcgatagcagaggaaaaaggtttggcacacccccgatttcctccttgcccccaatcaagcttccctattttctccgcttccccgaccccatcgcttgtttatttcccttgcgtttgttttcaaattttggcaaatgcgaaaaaaacatggccaacgacaaaacgaaatggtaaaagccaaagggtaaacaacacaaaggcaagcgaaacaaaaacaaaaacgagagacaccaaaaaattacgggggaaaaattaaaactcgaaaaagccgagtgagtgggaaaagttaacagagttttgcttgtgttttcatttttgtttacgaggctttcatgtttggcgttcatattgtttcactttatttgtgcgaatatcaaactacatatgttcccggaaaagaaatatttcattttttttattggtaaatattaatttatttattatttatttatttatttatttattattaatttattttatttattattattattatttattaatttattttaataatctcaatgagcctatacatttgtaaaaataaatttacactttcgtaacgaatttgtctgcccttagataattttctaacattacaaatcttttttttttttttgaatatacatatttttttaagatttttaatgtctaacacaccaaagaaattgttttctgtgtacgaggttagatgtgtctgctttaattgatgacttgaagagggtaatggagggcaggtgaccgccagtcagcgaagcttaattggatccccctgatattgaagacaaggagtgagggacaggtttgtattatgggcttgaataactaaaggacaattggccaaaattgtgtctcttgtctaagacatggtttaaaattagctgcaaacttcagtcacacgagagccaggcgtaaaggaaattaaatttaacaacagttttgagcgacaccattaaagctagaaaatttgtacggatatctcgctaaacaaatcttacttaatattttccaagtcatttatgtgcactttcttccggtctattaaccgctgcgcaatcattaaaccccaaaaaatatggccatctgctttaatgaggcgcaatcatcatcaagttttcactgaccatttgaccttttcatttgccaggcggcaggactccgatcagaggcctttagtccggccattaagcgaatgtctggcgccaggcaaactataaaataaatgctggggcgtggctcggaggcggagaaaaccgaaaaaccaacgaacttcttatttttcctatacacaaaacgactctaagaattctagtcattttagtttttacaacatattataattaatttccattttaatgcgatcatattatttccttttaaagaatatttatatatttaaatctgaaacgattttttaagttcgaattcacaaatcaaataattttaaaaaatttcttttgaaaacaaaagtagcattcagccacaaatgaaacgataccacacgtgtaactgaaactataagctacacctttattaaattcggcatatgggaactatattaaagattttcatttcgatatgtgccagaagttctatacctcgctagagtgtgtggaaaaactacccactaaaatgggaaattgcacagcaggagacgaaaaaaccgagagctagtagcgcttagttttttattgcatggcgccgcatgtggcggctgcggcgattgaagtgtcccccgagaggcaggggaatgggacatggagcagttggcaacgggagctgggggctgcaggaggtgggaggatagggggctgggtggcgccggcagtacgtccggggcacgagtttggctttagtggctctcgcccgtcaccggggctcgttaacgctgagacgctcaatttagcgcgacttattcaggttggcgctccgcttgcctccgcctgcgaccgtgtgactgaccttgatgatatcaccgcagccacgtcgtcgtgaccatcgtcatcccagtagcagttcccctgcagctccttgccgtattcctattccgtttacatactcaagaacacatggacgaaattcatagcaaacttttggacctccgtaaaaacttagtaaatataaacacaataagaagaggtgcatctgaatatttttctaagaaaattaaatttttaagattaagattaattattaattattatattttgatgtttaacccaaaattgttccaagtgggaacaaaaagcttaacgccccacaaaagtaaataaagatatttggtaaacaaaaatagttaattgcttattaatgccgatagttttttctccctgcactccacggcatgtgcgaatctctctcgggcgggctcccagctctcacggcactagtcctcgagcacacaagacccctgcccttggtgtcgatgtcttgggtctgctcggcttacccgtgggtgtgctgcacttaaagccgaaataaaaaatcaataatcggggaatggcaagtcaacagccaacagcagctcagctgaactcaggcgaagccgccatttctgactgttcctgcctccgacacacaagcactcactcacgcagacacacacgcgcgcgggaaaggacatgtgtgcaattgtgtgtgtgtgtgtttggggcaaaagttgtatattaagtaacctgagcaagttttggggagtccccgggacacgtacggggcacacgacccaaaaacgtgcaccgcaggtctcgactcgaatttatggcagtttcactccatatttatgtgttttcagcttgcagttggttatgaaatatatagagtcgttaacctagagagaatgcaaaacccttaaagaagtggaatcagcaaatgaaatatgatttggtaatagaattttaaagatggcaataacaagataaataatctcaaaagaacgagaaaacttactaaatataaaacttataaaatatagatcccatttagctactattatcaaatatcaataatcagcttaaatattaagtatccgaccagtggtctgtggctgtataagtagcttctatggactgaatgattatgaatactcaacgtccagtcctaacggccggtccttttcgatcccttcgtcccttttcaactgatgccgatgatgatgctgtaaaatgtcaaatgtgagtgctgctttcatatgaaatgacgcaagaaataaaagcgttcgccattggggcgccactgccaaagggcaaccatccatctgccaattgccgtcgaaaccaagcatacaatgcgaaagcctggcaagtgacgtcacggccataaaggactgcatacatggtgaatatttcctgaccacaaaatccaggccgagggacccatccagcagaacagcagaacagcagaatgtgcctcaggcgggttaattaaacgcaagaacaacatcagcatcctttatatgccctggacacgttgcgcatacgacctgtgaaccgtgcgccctgccacaactctgactcaatttgagctattcaagctgcataatgcactcggtgcatccatcggcaacaacacgcatcaatggagcaacaaaaacaacgtcaacaatcaatattgatgccgggctagcgatgattgtgttgataacaagccctgccgttgttgctcccccgataattatgctcataaaagcgtaagagttttaattgggctgcttattacaaataatcagagcgttgcctgtccgggcatagaaagtggatctgaggcctggggaccggtcatatcacattgggcgtgtgcgctcgtgtgcacttgcctgagttattcaatttgcggcatcagccaaattgcagccacagcaacaattacgccaatcacacgacagcaacaataacaatatgcaaaaattaaacggaaaacgcgttggaaattaaattgaattttaattggacctcgcatcaataatttgtaatttgttacaataattacaaagttatttaatatttatgtagactcggcgcttgtcaattagtctggctcatgcaattaagttgattaataaattatatttcacgctacgtgcaaacatatccatatgcagttaatcgaaaaaaaaaataaattaatctatattaaaatcaaagattcagtcatctcattaattatgattaagatttgattatgctctaacgtttcaatttatttcgtatgctttgttttacaatgtgaagctcattagtttggcaaaagttatataaaaatttgtataccttataaaagtatttagataacaaataattcgtaattcatagtaatgcttatttgataatcttgaaacgtccgcacttatttacgacatttaaaatggttggaaattaacaacagtgcgaggttgtctcaaatcgcaagcgcaatttaaaggtaatctgtgcatgttaaagcaaagccaaagttggtatcaccggcgataacaacagcgaaaacctcagtgagcgatttacaagcaaagctgggcgaatacaatcacactaaaatcgcgcatacgccgcgtattccccaagaaacatcagaacttcgcatttgtttgcctttgagtggcacatgcgccacacttggcacttgcttttattttaccctggtttacttttaatgcccagagcagcagggcttacacacacacacgctggctaacgcacacggacacacacatcatgcggcttattcccagtacacgtcacggtctcaaagcgtgtgtgtgtgtgtgtctgcgtgtatgtgggtgtctgtgtgtgtgcttataagtgattatctgctgtaaaaatggcgcagaaagtggaagcttattttcccgtatactgatgcgcatttaactccccaacgggttataaaaatacgacacaactattttttaagcgatcagtaattggcattatgtaagtttctcaaagcatataagatacacccaataaattgaatatctcaagatgtgtaatattaataaatattgaaattgtgtttcataataataatggctgagaaacggaattgcaatatagaacatctaatgattacctcttggcttctagccctattgcattcgctgcattctaaaccatactgctgcaaccgattctgcgtagtaaatccaataaaatccattgggactgcatgcagtcactgcagcagaaaacaaatcgcgttattatcgccgggcaatggccaagagaaaaacacgacattccgtagccagaggccacaggaaaactcataaaagtagcccaggcacagacaaataaaaggatcgcataaaactaatgttaaacaattccccgttgcccctaaacttgtgccttttgtctgcggtcttgtgtctgtattccgtctgtactttgctctttccttgccctccatttgtgctgcgtgagcttctgttcgtttgggttcaattcggaagcccgggtctgtcgtcgcccatcgtcatcgtcatcgccggacccttaagacaatgatggct

SEQ ID NO: 26405 - DNA, 4377 bp, DROSOPHILA
cccagctttgcttgtaaatcgctcactgaggttttcgctgttgttatcgccggtgataccaactttggctttgctttaacatgcacagattacctttaaattgcgcttgcgatttgagacaacctcgcactgttgttaatttccaaccattttaaatgtcgtaaataagtgcggacgtttcaagattatcaaataagcattactatgaattacgaattatttgttatctaaatacttttataaggtatacaaatttttatataacttttgccaaactaatgagcttcacattgtaaaacaaagcatacgaaataaattgaaacgttagagcataatcaaatcttaatcataattaatgagatgactgaatctttgattttaatatagattaatttattttttttttcgattaactgcatatggatatgtttgcacgtagcgtgaaatataatttattaatcaacttaattgcatgagccagactaattgacaagcgccgagtctacataaatattaaataactttgtaattattgtaacaaattacaaattattgatgcgaggtccaattaaaattcaatttaatttccaacgcgttttccgtttaatttttgcatattgttattgttgctgtcgtgtgattggcgtaattgttgctttcaaacacatccgcagacggagaagaaaggccaagcagacggagtgggctctgcaaaagtgcaacagctgctctgaaaaccgaaacgaatagaggacgccaactgaaaaccatttcaaactctaagccaagtccaataaagccgagacccgattcgagtggcgagtaccgagcaaccagtacccagtttccagttcccagattccggattccaaagctgctgcggcgggagaatgtgtagtgcaacccacgggcggcagcttcaagtggcaattgtggcagcagaggcgaactcaaccggataataagttgtggatgcggcttgtagcgccgggcaggcatcccgaatccgccagacacaccacttccgtaccgagttacccagcgagcagaaatcgcgaatcgcgaacagccagagaaccagagacaagtggtcagtgccagtgacgtcaggccaaagtaggccaccaccacccatcgctaccgctttagccagccaacgacgccctgcgcatccgcgtcatggccatctcctgtcggcagagcagagtcctgcccatgtccttgcccctgcctctgaccatcccgctgcccctggtgctggtgctatcactgcacctgtccggcgtctgcggcgtcatcgatcgcctggtcgtgcagacatcctccggacctgtacgcggtcgctccgtgacggtgcagggcagggaggtgcatgtctacacgggcatcccctacgccaagccgcccgtcgaggacctgcgcttccgaaagccggttcccgcggagccatggcacggcgtcctcgacgccacgcggttatccgccacctgcgtccaagagcgttacgagtacttccccggcttctccggcgaggagatctggaaccccaacaccaacgtgtccgaggactgcctctacataaatgtctgggcgccggcaaaggcccgacttcgccatgggcggggtgccaacgggggtgagcaccccaatggcaaacaggcggacactgaccatctcatccacaacggaaatccgcagaacacgaccaacggactgccgattctgatctggatctatggcggtggcttcatgaccggatcggccaccctggacatctacaatgcggatatcatggccgccgtgggcaatgtaatagtggcctccttccagtatcgggtgggagcctttgggttcttgcacctggcgccggaaatgccgtcggaattcgcggaagaggcgcccggcaatgtgggcctatgggatcaggcactcgccattcgctggctgaaggacaacgctcatgccttcggcggaaatccggagtggatgacactgttcggagagtcggctggatccagttcggtgaatgcccagctcatgtcgccggtgacgaggggtctggtcaagcgcggaatgatgcagtcgggcactatgaacgccccctggagccacatgacctccgagaaggccgtggagatcggcaaggcgctgatcaacgactgcaactgcaatgcatctatgctgaagaccaatcccgctcacgtgatgagctgcatgcgttccgtggacgccaagaccatatcggtgcagcagtggaactcctactcgggcatcctcagctttccctcggcgcccaccattgatggtgcgttcctgccggcggatcccatgacgctgatgaagacggcggatctgaaggactacgacatcctgatgggaaatgtcagggatgagggcacttacttcttgctgtacgatttcatcgattacttcgataaggacgatgccacggccctgccacgggacaaatacctggaaattatgaacaatatttttggcaaggcaacgcaagcggaacgcgaggccatcattttccagtataccagttgggaaggcaatcctggctatcagaaccagcagcaaatcggacgcgccgtgggcgatcacttcttcacctgccccaccaacgagtatgcccaggctctggcggagcgaggcgcttccgtgcactactactactttacacaccgcacaagcacctcattgtggggcgaatggatgggcgtgctgcacggcgatgagatcgaatacttctttggccagccgctgaacaactccctgcagtatcgacctgtggagcgtgagctgggcaagcgtatgctcagtgcggtcatcgagtttgctaagacgggaaatcccgctcaggatggcgaggagtggcccaacttctccaaggaggatcccgtctactatattttcagcaccgacgataagatcgagaaattggccaggggtcctttggcggctcgctgctcgttctggaatgattacttgccaaaagtcaggagttgggcaggtacttgcgatggcgattcgggaagtgcttccatatccccgaggctccagctccttggaatcgctgctctgatctacatctgcgccgcattgcgaaccaaaagggttttctaaaagaagaccactcccggaaaatacgacatatacacacaaactggaacacacactcacacaccccatcacaaccgcaaccatacacacttaaagttagaacacgtatattaataaaaccaaatttttagtaggcgcagacatttgtgtaggagcaggtgatttgtttacagaacttagtaggatcggtttgagcaatgcgatggtaattgctgaacatttgtaaattgaaattagagctctacgcacccttaggcagtcagatggtcaggcagggtccttcgaaggattctggacatcctggccagacaccagagaccactgtagccacatgccacacgccacgcgccataggccaggcccaaaccaaattgttttttgtgaagcacaatgctaaatcgcttaatttgaaaaattggccaagggatgggcggaatttttgataaatattaatgcagatagaactaaaatgtttgtcattttgcctttgcggcagccaaaaagaaacaaagtttacagatactcgtttaccgaacggaaaactcgctcagatgacagacactttattgccatgcccacattcttgagcgatatttgagcgcatttaatggcacaatttaagcattcagttcaaaccggaaaaaagtccttgttgcctgaagatagttggccaaattgcattggtttcatgcttaggttgagggttcgtttgatttcgattcacattcccaaggaaaactatactcgaaaattgtaaccactcgattcttatgagaaaccccaaatggacattttcggaaaatcaacaattgtattgtacaaaaattggcattggtttattagaagaaaactaaaagttaaaaccaaaaaaaaaaacgcggactaatagccccaagccaagcactacccaagacaaattttatcgaaacaaatttaacaaattgtaataaagaatcgatcgaaaatgtgttgtaagcgtagtacggggcaaagacgaagatgatatttataatgcaaaacatatcagtatattattgtatttgtactaaacgttttacaaattggcttagtgagaaaattggacggaggaagatgaaatgatttaatactaaataatggtaattataaattttatacacatagcgaaattggatcaatgattaacacaaaacgtattgtatgatgagtaacgtatatgtacttggtatgtctatatctataaataaatattgttcaaaacgtaaatccaac

SEQ ID NO: 26406 - protein, 649 aa, DROSOPHILA
MAISCRQSRVLPMSLPLPLTIPLPLVLVLSLHLSGVCGVIDRLVVQTSSGPVRGRSVTVQGREVHVYTGIPYAKPPVEDLRFRKPVPAEPWHGVLDATRLSATCVQERYEYFPGFSGEEIWNPNTNVSEDCLYINVWAPAKARLRHGRGANGGEHPNGKQADTDHLIHNGNPQNTTNGLPILIWIYGGGFMTGSATLDIYNADIMAAVGNVIVASFQYRVGAFGFLHLAPEMPSEFAEEAPGNVGLWDQALAIRWLKDNAHAFGGNPEWMTLFGESAGSSSVNAQLMSPVTRGLVKRGMMQSGTMNAPWSHMTSEKAVEIGKALINDCNCNASMLKTNPAHVMSCMRSVDAKTISVQQWNSYSGILSFPSAPTIDGAFLPADPMTLMKTADLKDYDILMGNVRDEGTYFLLYDFIDYFDKDDATALPRDKYLEIMNNIFGKATQAEREAIIFQYTSWEGNPGYQNQQQIGRAVGDHFFTCPTNEYAQALAERGASVHYYYFTHRTSTSLWGEWMGVLHGDEIEYFFGQPLNNSLQYRPVERELGKRMLSAVIEFAKTGNPAQDGEEWPNFSKEDPVYYIFSTDDKIEKLARGPLAARCSFWNDYLPKVRSWAGTCDGDSGSASISPRLQLLGIAALIYICAALRTKRVF

SEQ ID NO: 26407 - DNA, 3199 bp, DROSOPHILA
tatcctgccatttccaaggaatgtacatgaggtacggcaactgtttgcccaccactcgaatgttgagccacttgtcatagacccaatactccattacacaaaacaagttgaatgtccagatgagaacagagtagagcaaggaatatataaggctgattctggagcaggtgcccagatacatcggcagattgtatctttcctctcggatcaaaccattcggatagatctccttcaattcattaatcagttcagttatagccgttttcttccaccggatgaagaacatcttgctcatgcctacggttacgaagccaatgtaggacaacgcagtgactgcttccaggaacttattatccatgaaggcactgtaaacgtaaatgctctcaaataatccaacgaagctcaggttaatcacattggaccaaaaaactatgtgaaatataagtttgttcattttggattcttcaccattggtatatggccgtatgcccactgctgtgtagaagaagctagcgtacttcattagcttctccatcctttagttggtcggaactgaggtagagaagtgtcctttctgattgagcgtccttagaatggttcagggcttttatagccttgtgcaaaatagctcttgtgtgattacaaatgcggtaaatattaaataagaaaataataactaagcacccttgaaggtaatgctaatgaacttgcgaatccttttcgcgtgctttgtagatttaacagctgcaacgattccagatggttcaagaccaaaggttttcctaatgatacttattacgattacgacgtcatcttataaatataatgctaattctttagtacataaattttcattataacttttaacatttgcaaatccaaataagtgaactaagctaagaataaatgtttactttatgtacatggtacgaagcagagcgaaaaatttgtaggatacttgaagaagctgaaaacataaatataatattagttttaaagcttaatgacatttcaaattgtatcttacgtccgtcatggtggcccttgttatattcatgaaaattgtagcttttagataagttgtcctctgaggtcgagctataaagaataccagagcccgacgatagcgaatgtcagcattttgccaattctgcttatatgcagaaatcgataagctagagctctaaaaatatgttagttgaatatttatatttaattaacatatactcgaaagtctcttaccgcatcggcaatcagctggccgtagtggcatatcaagtacacttgcgacaaggacgagaacaggaacaagaagagcttaatcatgatgtccggcgggacacccacggtcatttggaatcccacaaagcagatgacaaatgtggagaccataaagttaagcagtagcggtatcccgaatatatcgttgagaacgtccattagccgaagaatgcgctgatgatattgtacagtttttgccaaaaatctggagttttcgctccaatcgcgatctaacacttgtttttccaccactctggccaagtaatcgaagtgcattaccacctgggtagcaacagcacaaagcaaaagatccgtagagatctgtcccgatgccgaagtatgtcctgcgaagttttgacagaacagcagcacataatacgtccagttttcatgccagttccagggaaagtacatcaaatatggcagcgtttggccgaccactcggattttaagcaacttttcatagacaaggaattgcatgatactgaacagattgaaggtccagatgagtacggagtagagtagtgcataggtaatgctaattcgtgaacaagatcgcagatacctatccaaccgatacatctcctcctcagctttgccatttggatagatgtgctccaattccttaaccaaatcgcttagatcggtcttcttccaccatatgaagaacatcttgctcatgcccacgattacgaatccgatatatgacagtacagtgacggcatcaatgaactttccatcggaataggccactcccagatagaggatctctccgaaaacaatgacacttaaattgatcacattggcccagaagagaagatgtgaccataggctcgcttttttggaccgcgagtcaatcgtatacggctcaatgcccaccgatgtgtaaaagaaaactgcgtacttcatgaacttcattttccgacgtgaaaataatccaataagtgatggtcggaattcttttatagacttctgctcaaggcacacgcagcatttgttatgcgaagtaataacataattatagaactgtttacagttaatgtattgagtcgaatttataatgcttctaattcagggcttcgttcacaacttaattattgatttcgcttacataaacagtggataattgttatgcctaggcaaacgcaatcacgattcccatccaagtccccagttcccttaccacccacgactcctcctcctcccccttcgccattctggccaacacaataaatcactcgaagattgaatccgacggaaagcaattgaaacgtttgaataaatgcaattcgaaagcgaatcggtagcagcgcatcacacccaagtctaatcccaccgaagtgaagtcttctttcgctctcacttgaaataaattaaatcttttcagttttcaacaatacagcttagaagaaggaggtgggaccatataaacagaatgagatactccaccagaacacgttaccccaattatacagcgcgtctcagtgaaacatccgtagtaaaaaccatcaagacagccaatctactacggtattctgaataataattatttaatattaagaacttactctaaacattacaaaataaagtttagtgcatatgattgctttaagaggggttagctttctatacttagctagttttgactgtacgcacgagtctagccgattagatcctatatccagctatgtgcgttaccctacaaaactatgccatggaaatgcaaacagagcgcttacaagtgatgtagaaatcgggcggggattggggttggtgaattccgccacaactggccaaaagagatttttgggccaaattgaaagacaaaagccctgaaatgttgcttccatcgcggacagcgaatcgcagtgctaaaagcgaaccaagcgggtcaaaagcaaacgaacgaattttccat

SEQ ID NO: 26408 - DNA, 1155 bp, DROSOPHILA
atgaagttcatgaagtacgcagttttcttttacacatcggtgggcattgagccgtatacgattgactcgcggtccaaaaaagcgagcctatggtcacatcttctcttctgggccaatgtgatcaatttaagtgtcattgttttcggagagatcctctatctgggagtggcctattccgatggaaagttcattgatgccgtcactgtactgtcatatatcggattcgtaatcgtgggcatgagcaagatgttcttcatatggtggaagaagaccgatctaagcgatttggttaaggaattggagcacatctatccaaatggcaaagctgaggaggagatgtatcggttggataggtatctgcgatcttgttcacgaattagcattacctatgcactactctactccgtactcatctggaccttcaatctgttcagtatcatgcaattccttgtctatgaaaagttgcttaaaatccgagtggtcggccaaacgctgccatatttgatgtactttccctggaactggcatgaaaactggacgtattatgtgctgctgttctgtcaaaacttcgcaggacatacttcggcatcgggacagatctctacggatcttttgctttgtgctgttgctacccaggtggtaatgcacttcgattacttggccagagtggtggaaaaacaagtgttagatcgcgattggagcgaaaactccagatttttggcaaaaactgtacaatatcatcagcgcattcttcggctaatggacgttctcaacgatatattcgggataccgctactgcttaactttatggtctccacatttgtcatctgctttgtgggattccaaatgaccgtgggtgtcccgccggacatcatgattaagctcttcttgttcctgttctcgtccttgtcgcaagtgtacttgatatgccactacggccagctgattgccgatgcggtaagagactttcgaagctctagcttatcgatttctgcatataagcagaattggcaaaatgctgacattcgctatcgtcgggctctggtattctttatagctcgacctcagaggacaacttatctaaaagctacaattttcatgaatataacaagggccaccatgacggacgtaagatacaatttgaaatgtcattaa

SEQ ID NO: 26409 - protein, 384 aa, DROSOPHILA
MKFMKYAVFFYTSVGIEPYTIDSRSKKASLWSHLLFWANVINLSVIVFGEILYLGVAYSDGKFIDAVTVLSYIGFVIVGMSKMFFIWWKKTDLSDLVKELEHIYPNGKAEEEMYRLDRYLRSCSRISITYALLYSVLIWTFNLFSIMQFLVYEKLLKIRVVGQTLPYLMYFPWNWHENWTYYVLLFCQNFAGHTSASGQISTDLLLCAVATQVVMHFDYLARVVEKQVLDRDWSENSRFLAKTVQYHQRILRLMDVLNDIFGIPLLLNFMVSTFVICFVGFQMTVGVPPDIMIKLFLFLFSSLSQVYLICHYGQLIADAVRDFRSSSLSISAYKQNWQNADIRYRRALVFFIARPQRTTYLKATIFMNITRATMTDVRYNLKCH

SEQ ID NO: 26410 - DNA, 3399 bp, DROSOPHILA
ttctttttgcgcacgcgattgctcgccaactcggtgcacacgaactcctcatcagcttatcagctgcccacgttgcgtatacgttgcgtatacgccgcgtatcgtgactcagcccacagcccagaagcacacaataaaaagcatgaaaagcgcaggcagctacccagcggggtttttcacaataaataaaagactttcctgtagtaaaacaaatttaaatgctcatattggctgcaaaaacgctttacgactaaactcttttcaaaaaaaacccagcgtaaatgccataaaaatatcacatgtggaaagctaactaaaaattaatagaggaaaaaacgcgctgcaaattaggcaaaaactataagctctgcgggagctacgaaaacagttcgttgcacggaaaaccaaacacccggaacaactttatatatatttatgacttttagtaaaaaaaaagttttcgagaacaaatatagaaataggcctgacttagttgtttttttttttgctaggtgtacctgcaacaaaagaacgacttagataagtttcctgcagtctctaactcggctagtttttttacctttacttttttaccattttatttaccttaccttaaaaaaaaaatatctttaacgagtataatgaatatataattgattcttgtgcttgtgttgaccacaaggtttatatttaacatcacataaacatatataacttgaccagccagcaccgttcagttagagtatgacttcagttccttaccacaaattgcatgaatatcctctcgtccccaaagtgtccttcgatttttctccgtgtagtcctgggaacattcctgtagaactcaatattttagaaagtcaagtggcaggtgttccgttaccccaaattaaattaagtaattatgaggtcagcgaagggtgtctcatgcgaatttaatgggacacttttgatgggagctatataaacctaagacttattctgtcagccgatcaaacagctgaatcatgctgttccgcaaacgtaagccaaaaagtgacgatgaagtcatcaccttcgacgaacttacccggtttccgatgactttctacaagaccatcggcgaggatctgtactccgatagggatccgaatgtgataaggcgttacctgctacgtttttatctggtactcggttttctcaacttcaatgcctatgtggtgggcgaaatcgcgtactttatagtccatataatgtcgacgactactcttttggaggccactgcagtggcaccgtgcattggcttcagcttcatggccgactttaagcagttcggtctcacagtgaatagaaagcgattggtcagattgctggatgatctcaaggagatatttcctttagatttagaagcgcagcggaagtataacgtatcgttttaccggaaacacatgaacagggtcatgaccctattcaccatcctctgcatgacctacacctcgtcatttagcttttatccagccatcaagtcgaccataaagtattaccttatgggatcggaaatctttgagcgcaactacggatttcacattttgtttccctacgacgcagaaacggatctgacggtctactggttttcctactggggattggctcattgtgcctatgtggccggagtttcctacgtctgcgtggatctcctgctgatcgcgaccataacccagctgaccatgcacttcaactttatagcgaatgatttggaggcctacgaaggaggtgatcatacggatgaagaaaatatcaaatacctgcacaacttggtcgtctatcatgccagggcgctggagtaagtttgacggttatatattatatatatctctcaattcatccaaattaaggataagaactaaactactacatgtttttcttataatacacttttcagcctcagcgaggaggtcaacaacatattcagcttcctgatcctgtggaactttattgccgcatcgctcgtgatttgcttcgctggctttcagattacagcctcaaatgtggaggacatagtgttgtacttcatatttttttcagcttcgctggttcaagtctttgtggtctgttactacggcgatgaaatgatatcttcagtgagtttaatttttattaatttttcttgttttcggtctagtattaacaagaaatgtacatttcagagctctcggattggccattcggcatttaatcagaactggttgccatgcagcaccaaatacaaacgcatcctgcaatttattatcgcgcgcagccagaagcccgcctctataagaccgcctacctttccacccatatcttttaatacctttatgaaggtaatcagcatgtcgtatcagttttttgcactgctccgcaccacatattatggttaagggaagattagatacatatatatgtatgtgcataggtacatcggaatattgatagcaatccatcgaatacgaaaaatacatatttgcaaaataagatactgaattcgtttgcaaaatacaaatacataagtacacataatgttatataacaagataacaacttgtgatctttaagaaaaaacagtattctatcctaaaaaaaaccacaacaaatcaagttatttaatgtgaaaaatatataaaaattcataaaattaataaaacaaatcttaaattgtcataaaaaagatctgttctgttaacactttacagatgttatagagggtaaaagttattaattaatacatgctttaaggctgtgacataaagtccccatgaaaagaacattaacgttcccgcgacagaatactttgcatactttgcggatcagtcataaaaaacgacttgtaatacttgtaatatatggaatttaaaggtcaatccgcaaaagaccatcaatccctgcttcaccttgaagaccttaagtcccgtcaccgcacccatagagctggaaggtgtaatcctagatcaaccttcacaggctaagtacctcgggattacccttgataaacggttgactttcggcccgcacctgaaagctacgactcggagatgttatcaaaggatgcaacaacttcgatggctgttaaacagaaaaagcaccatgacactgagagccaaaagagcagtctacgtccactgcgtagccccgatctggctgtacggaatacagatctggggtatcgcagcaaaatccaactacaaccgcattcaggtattgcaaaatcgtgccatgcgtgcaattacagactgcccatactatgtacgtggcactacccttcaccgtgatctgaatcttcatacagtggaagagcagatctccaggcacaccagcagatatagtgatagactaagacgacaccacagtatacttgctagacgcttactccctgctaggcct

SEQ ID NO: 26411 - DNA, 1242 bp, DROSOPHILA
ctgaatcatgctgttccgcaaacgtaagccaaaaagtgacgatgaagtcatcaccttcgacgaacttacccggtttccgatgactttctacaagaccatcggcgaggatctgtactccgatagggatccgaatgtgataaggcgttacctgctacgtttttatctggtactcggttttctcaacttcaatgcctatgtggtgggcgaaatcgcgtactttatagtccatataatgtcgacgactactcttttggaggccactgcagtggcaccgtgcattggcttcagcttcatggccgactttaagcagttcggtctcacagtgaatagaaagcgattggtcagattgctggatgatctcaaggagatatttcctttagatttagaagcgcagcggaagtataacgtatcgttttaccggaaacacatgaacagggtcatgaccctattcaccatcctctgcatgacctacacctcgtcatttagcttttatccagccatcaagtcgaccataaagtattaccttatgggatcggaaatctttgagcgcaactacggatttcacattttgtttccctacgacgcagaaacggatctgacggtctactggttttcctactggggattggctcattgtgcctatgtggccggagtttcctacgtctgcgtggatctcctgctgatcgcgaccataacccagctgaccatgcacttcaactttatagcgaatgatttggaggcctacgaaggaggtgatcatacggactcagcgaggaggtcaacaacatattcagcttcctgatcctgtggaactttattgccgcatcgctcgtgatttgcttcgctggctttcagattacagcctcaaatgtggaggacatagtgttgtacttcatatttttttcagcttcgctggttcaagtctttgtggtctgttactacggcgatgaaatgatatcttcagtgagtttaatttttattaatttttcttgttttcggtctagtattaacaagaaatgtacatttcagagctctcggattggccattcggcatttaatcagaactggttgccatgcagcaccaaatacaaacgcatcctgcaatttattatcgcgcgcagccagaagcccgcctctataagaccgcctacctttccacccatatcttttaatacctttatgaaggtaatcagcatgtcgtatcagttttttgcactgctccgcaccacatattatggttaa

SEQ ID NO: 26412 - protein, 264 aa, DROSOPHILA
MLFRKRKPKSDDEVITFDELTRFPMTFYKTIGEDLYSDRDPNVIRRYLLRFYLVLGFLNFNAYVVGEIAYFIVHIMSTTTLLEATAVAPCIGFSFMADFKQFGLTVNRKRLVRLLDDLKEIFPLDLEAQRKYNVSFYRKHMNRVMTLFTILCMTYTSSFSFYPAIKSTIKYYLMGSEIFERNYGFHILFPYDAETDLTVYWFSYWGLAHCAYVAGVSYVCVDLLLIATITQLTMHFNFIANDLEAYEGGDHTDSARRSTTYSAS

SEQ ID NO: 26413 - DNA, 2836 bp, DROSOPHILA
aatagagtaattaaagggactggatttgaaaaaaaatattttttaaatatatattatagatatttagaaatttatctgtttttacatgattctttttctttacagcatgctttgtagggatttgggagcctaattatgaggagaaagatactacttcttgccagatagttgcttgtataacttgggcacatagtcgtcccactgtgcctgaaaaaagtttccggcaatgggatctcccagcttgtacttgctcatgaacttggaggtgctgaaattggctcgcttgtcgccgctcgtttttgggattttgggctcgttgcaagtgagcttttggggctgtttgaagaccaggaagacgtaacgatgaagccccgtgccttgcggcggacctgcacccacatattcggtcaaaactacgccgttctcgacttggttccctggaatattgaccaccagccagtggtgccactcgcggaacttgggctccttgcgactgggcgcatccggatcggtcaggaggagcgtgtaaaaggcattcggatctgcatcccatttcacctttggctggctctgcacttgcgtgggtgtcaattcaccgcctacatccaccacctgtccaccaccataagtcacctggaacaacaaaatgacatggacgattgtaggcgctatttgtattagcttaccgtaagcaaagtggcaggacacgtcttcaggatatccggcacgatcttgtgcttagagaagcacacggtggaatcggacatttttagctgagtgggcaacaactaaaatgaaatttgaggtgccagaaaatttcgtattttaaggctacgccgactttaattctaacatttctggctgatagtcaatagatagccaatatttccaaaaatggtgtccttgtaatctgacctaaatatccttataaggacatactttcaatagcttcttctgagatatatttggaattatttttattggaagctggactctaaattcaaaagtgtgctacttgacgggcattgtgcgagatggctttgataagggatgggacatcggggctccattgggatgtgaagaagttcccagctaccggatggccaaatctgtatttctttgcgaaccgcttggtttcaaagccactgcgacccttaaccgagtgcttcggcagtttcgggaagtcaaacttggtgtagtccctctgtttgtagagcaggaagacgaaccgatgggttccggtccccttcagcggagtggcacccatgtatcccacgcgcacgtccccaagggccaacagattgccgggtatgttgaggaccatccagtgtaggaactcccggtgcgtgggtgttatagcattgggtacgtccggatccaccatcagcagggcgtagtagttttccggtgccgagggccactttacggagggttcatcacgcacttgcatgggttccagtacctttccacaatgtgctgctaaatgcccgtggtaagtaaccttttgtgggagcaattcaatttcataatatgattaaaagtatattatttaattttgaacagttgcctagaaatacaattgttgaattgggcatagcatacatttttttggttaaactaaattggaattcaaattcttagatatccgaatattatctcttaaataattctttatgagatcattatttgtgttttactcacattaagaaactcctgcggtccgatgtgtattacatctggtatcacatccaaggacctcatgatcttgctcacttccgtatccgactgatgaactcctctagttgatttgaggctcaagcttggcgcgaatcgcatgaaaagtaggatacatatgctagccaacattgtgaaccaagtctttcactgacttcaaattggctgattgctggctttaaatacccattgcatctaacatatgttttctgcctggccaattaagcagcaaacacagatgtcagttccattaagttaaggtactttgcaacttccttacaacttcataaaacaaattgtcgtgtctcaggccaattaatggttcactaccaccacccacagcagttgcgtgctggcgagttctgtaaacatacactataaaatcagttagtacctcgtttagttgactattatgctacgtgacccctcatttacttgccattgcccagagcacttcataagtaaggcacatcaatgaatttacttaaaattctattatattatatacacccagagaaaagcccgctgtcaacgatcgcgatctatccaagatcgaatcataattagatcgagatcgaatcattctcagattgcaaatgaccttgcacaaaatataataaatattaagttattatatcttatttaatttaccaatttccgtaccaaaaaacgttgatgaatgttttaaatttttgcatttttaataaattaaataaatattaattaaattcagtttttggtcgttttgtgacaaagaaacgaaggcaaaaggacgaagagtcaatgagaaagaagatggtatgaagaagatggtaaaatcaggctaagtggggatgtggttagagctgaagaatggctaaaactctcgcgttcctaaccctaacaactacaattatggcctggggcaggttccggttccatttggtctgtgtgactcgcagccatccttcctgggaaggatcgcaaattccttggtatgtacaattgggcgaatgactttccccgtttaggaggacgagctgtagctggacgaagaacccgaggatcccgacgaggatcccgaggagtaggacgacgagctgctaggatggtacgagctgta

SEQ ID NO: 26414 - DNA, 636 bp, DROSOPHILA
atgcgattcgcgccaagcttgagcctcaaatcaactagaggagttcatcagtcggatacggaagtgagcaagatcatgaggtccttggatgtgataccagatgtaatacacatcggaccgcaggagtttcttaatgttacttaccacgggcatttagcagcacattgtggaaaggtactggaacccatgcaagtgcgtgatgaaccctccgtaaagtggccctcggcaccggaaaactactacgccctgctgatggtggatccggacgtacccaatgctataacacccacgcaccgggagttcctacactggatggtcctcaacatacccggcaatctgttggcccttggggacgtgcgcgtgggatacatgggtgccactccgctgaaggggaccggaacccatcggttcgtcttcctgctctacaaacagagggactacaccaagtttgacttcccgaaactgccgaagcactcggttaagggtcgcagtggctttgaaaccaagcggttcgcaaagaaatacagatttggccatccggtagctgggaacttcttcacatcccaatggagccccgatgtcccatcccttatcaaagccatctcgcacaatgcccgtcaagtagcacacttttga

SEQ ID NO: 26415 - protein, 211 aa, DROSOPHILA
MRFAPSLSLKSTRGVHQSDTEVSKIMRSLDVIPDVIHIGPQEFLNVTYHGHLAAHCGKVLEPMQVRDEPSVKWPSAPENYYALLMVDPDVPNAITPTHREFLHWMVLNIPGNLLALGDVRVGYMGATPLKGTGTHRFVFLLYKQRDYTKFDFPKLPKHSVKGRSGFETKRFAKKYRFGHPVAGNFFTSQWSPDVPSLIKAISHNARQVAHF

SEQ ID NO: 26416 - DNA, 3051 bp, DROSOPHILA
ttttcacaaaaatgttttaactatggtcttaaatatgtttacacttcttacattgaatattttaataagttttttaataaaaaactcaaattgagcttgatttttcaaaataatagtttatttaatttacgcgaatgccaaacgccgatagttagctttgaaattcagggctggtcgagtgcaaacgtcctcagagctggtaacactgcaaaaaaaacgaagccgcgctgaatacttttgccaacaataaacgcagaaaaccaactgagaagcgaaacaagaagactatcaacatcatttaacaagccatagttataatccgctatgtaagtatcccggggcagatgggacaaaccatcggaaatggcgtaactggcagcggcatgtgcgccggcattttgcattgttagcaccacgctcgagttgtgggtgaaatactaatgtactgtgttctctgcagggctcttgtgaaaccgaaatcggagctgaccccggaggagctggcgcggcaggaggaggaggagtttaacaccggcccgctgtccgtgctcacgcagtccgtgaagaacaacacccaggtgctcatcaactgccgcaacaacaagaagctgctgggcagggtaaaggccttcgatcggcactgcaacatggtactggaaaacgtgaaggagatgtggacggagctgccgcggaccggtaagggcaagaagaaggtgaagcccgtgaacaaggatcggttcatatcgaagatgttcctgcgaggcgattctgtcatcctggtcctaaggaatcccctggccacggcggccggcaagtagtctaccatagcgatagcgtacagcaaccaatatccatcaacttcagttaataaatccgtaaatcaaccaaataagttctgtggaccaaaatgtgccattaattaaaagtgtgagctataatttacgacggaaaatatcccatcccagtaacatatcccattataaatttgtataacgaaagtacaatccgtaatcgcaatttcttatattttgattaacatcttttaatcgatttttcctaaagtatctgtttaagattaaaacggaatcaattctccgaaagttgcttgtgcagttttggaacatagtcgtcgtactgggcttggtagaaagttccagcaatgggattgcccaactcgtgattgatggcaaacttggcggcactgaatttggggcgatccttgcgggatctcttgctcacgcgctcctcgtcgaactcaagtttgccggactgcttgtacagcaggaagacgtagcgatgcagacccgtgccctggggcgggccggagccaatgtactcggcgatgggctcaccacttgccaagtcgttgccggcgatgttggccagaatccagtgcttgaactcgcggaacttgggctccgctcggctgggggcatcgggatccgtcataatgagcgtgtagaactccccgggctgcgcgtcccactccacgactggctgatccttaacctgggtgggcgttagctccactccatccttggccaccaggttgttgctgtacgtgaccttgaataggaacgatttcacagttatttgcttgatttttacattgttgcgatctatcagctactttactttaagttagctaccttctgacctttgatcagaaagttgtgacgagatatttatctagatttctattaagctcgggtgttaaatgtttgaaatattttaacctggtctgcaagcacgtagttgagtacatactattcggatccaatttattaagacaaagatatcctctatatatttggatctttttagtgtgcttttgttagtggccccacctttaacaactggttcggcggctcgggaataacgtcgggtaccacctggtgggatctgaaaacctcctccacggagccagcttgaacggccagtaggcagcccaccaatggcagtagcactcgcagcatctttgtggagagattattcggtagacgataagatcttgagaaaaccaatatataggagctccgctttcgaataaggttggtctgcaactgaaaccagtttgccatgatgccatacttttaaagcgaagctcgaagctttttgtttagtaaacagctgggaaaaaatatactcaataattaaagttatctttgtttaaagtttcgcttcggagattatagattattattatacattatatttattatacatttattcatattatttgcaaattataccagttggtaatagagtaattaaagggactggatttgaaaaaaaatattttttaaatatatattatagatatttagaaatttatctgtttttacatgattctttttctttacagcatgctttgtagggatttgggagcctaattatgaggagaaagatactacttcttgccagatagttgcttgtataacttgggcacatagtcgtcccactgtgcctgaaaaaagtttccggcaatgggatctcccagcttgtacttgctcatgaacttggaggtgctgaaattggctcgcttgtcgccgctcgtttttgggattttgggctcgttgcaagtgagcttttggggctgtttgaagaccaggaagacgtaacgatgaagccccgtgccttgcggcggacctgcacccacatattcggtcaaaactacgccgttctcgacttggttccctggaatattgaccaccagccagtggtgccactcgcggaacttgggctccttgcgactgggcgcatccggatcggtcaggaggagcgtgtaaaaggcattcggatctgcatcccatttcacctttggctggctctgcacttgcgtgggtgtcaattcaccgcctacatccaccacctgtccaccaccataagtcacctggaacaacaaaatgacatggacgattgtaggcgctatttgtattagcttaccgtaagcaaagtggcaggacacgtcttcaggatatccggcacgatcttgtgcttagagaagcacacggtggaatcggacatttttagctgagtgggcaacaacta

SEQ ID NO: 26417 - DNA, 770 bp, DROSOPHILA
cttattcgaaagcggagctcctatatattggttttctcaagatcttatcgtctaccgaataatctctccacaaagatgctgcgagtgctactgccattggtgggctgcctactggccgttcaagctggctccgtggaggaggttttcagatcccaccaggtggtacccgacgttattcccgagccgccgaaccagttgttaaaggtcacgtacagcaacaacctggtggccaaggatggagtggagctaacgcccacccaggttaaggatcagccagtcgtggagtgggacgcgcagcccggggagttctacacgctcattatgacggatcccgatgcccccagccgagcggagcccaagttccgcgagttcaagcactggattctggccaacatcgccggcaacgacttggcaagtggtgagcccatcgccgagtacattggctccggcccgccccagggcacgggtctgcatcgctacgtcttcctgctgtacaagcagtccggcaaacttgagttcgacgaggagcgcgtgagcaagagatcccgcaaggatcgccccaaattcagtgccgccaagtttgccatcaatcacgagttgggcaatcccattgctggaactttctaccaagcccagtacgacgactatgttccaaaactgcacaagcaactttcggagaattgattccgttttaatcttaaacagatactttaggaaaaatcgattaaaagatgttaatcaaaatataagaaattgcgattacggattgt

SEQ ID NO: 26418 - protein, 202 aa, DROSOPHILA
MLRVLLPLVGCLLAVQAGSVEEVFRSHQVVPDVIPEPPNQLLKVTYSNNLVAKDGVELTPTQVKDQPVVEWDAQPGEFYTLIMTDPDAPSRAEPKFREFKHWILANIAGNDLASGEPIAEYIGSGPPQGTGLHRYVFLLYKQSGKLEFDEERVSKRSRKDRPKFSAAKFAINHELGNPIAGTFYQAQYDDYVPKLHKQLSEN

SEQ ID NO: 26419 - DNA, 7592 bp, DROSOPHILA
agttcttaaggtataatccatttgtggaattatttttttagttttttatttagttttagcaaactacgagaaacagtgctacttttgttaccgcctaattttttttttgttttaccaattatttttaaaatatccattagatacgttacaaatttttttattttaattgaaaatcattgtactatttaagtttagtaagtaaaatgatgaaaaagtgtccgaaaatagaaacgctgagacaaacacgaaatatgcttatggtgctattattgttatacaactgtatatatataagtttaagtttgtttgataaaatctaaggaaaaaatctacggataaaatctaaggataaaataagtatttgcgtaacgcctttacaatggaagattgcttaacattaaggtactcataccgtactatgatacccacaaatcgtgaaaaactaacactaaacattaatttttaattgtgtgtttcagagaagagaaaatatgttgagcttatttaataagcccttttaattaagataaattaaatttgatataactttaaactgcattaaaataataacgcttcatttatatttcctgattttaaaatataaatataggaatattccatttttcctttaacccgttactcaactagtgagtaaatagaaatgtgagtgactaaaatggtccaaaagtgtgggcgtcacagttgtggccggttttagggcgttagaggggcatggcagaaagttttgcaagtcgatagaaatttacaagagtaataaaattatgaaaaagctcgataaatggttcaaaaatgtgggcgtgtcagttttgggcggttttagggcgttagggcaaagtttttctttttaaatcgatagaaatttataggactaataaaaacgtgacaaaatatccaacaatttttcaaaagtgtgggcgtggcagttttgtaacgggtatagatattaaaggactttgtaatactttaagattagtcgtacattacctgtatattataatatttgtggggagtttgccattccttttacgatacatttttaatgcaatttcaaaagatgcagagagcccattaacaatttcttcacgttttgtttgtacaacagctttactgtaccactgtgaatacgacgaatttatggaggccacaaatgctgcaaaattataaaaacaatgtatcggttacagctaagcagaaagtgaagcagattttttattaatcttgtaaaaaactatcgttttgcccaaaaacttttggacacatgattttacttcgtttcattgtttgtcttcccaaattctatcggtataccaaaaacaccttggtcacttcccttacacctacaaaacgcataaaacttttaaaaaatgttcaaattttttttatcgatgccccagaaaatgatgaaatttctcgatcacattcccattagctaagtaactgatagtcgaggagctcaaccataacattctctcttgttttaattatatgaagctaatacgttttattatttcttagttacagtgctgccatgggagcatggtttccactgcgcttggagataatcgatgtagaatataaaccaatattatgcccaaaaagaatatcctagtccaaccattagccttttccgcaactccgtctgccggagccaaatcctgtgatgttccttcgttatagctccgctgacatttgagcttattgcctttttagtgccttattgcattttttttttttgcaatatgttttaaattttttttttttttatatatacttttatgagaggaaacgcttccttctgcctgttacatacttttcaccgaatatagtataaactttcactatacgagtaacgggtataataagaaaaaagggcccatgggaattaggcttccctcacgtaaccaaaccactgcatcatcctcttccacttctttgtcttctttaaaactataacattagtcttataattccctatccaattgcaagaggctgcttgctaaattgtattctgatcgcctttcatcatttggattattatgtattacattatcctattattgtgtttacagagacttggttaaagctggtgaaacttaactctaaagttttcctaggtatgtacacagtatacaggcatgatcgtcctatcagacccttagggggagtcttaattgccgttaggtctaccctcaagtcggaagaagtactttttcctgacgagacccgtaacccattaaatgcctttatatgtctttttccgatagctctgtttatattgcgtactctttcaattcgaagtcttctgaattccttgtttcctaatgcgctttcgcatgggctcgatcccgactaattcacggcccactagtacaaactttcgagaggcagtattttttgggcaagcgataaaaatttagaaggctaataaaattataaaaaaaaaattctcaaacgcttgggtgtgtcagtttttggcggttttgcggcgttagagtgggagtggaaaagcttttacaagactaacaacataatgaaaaaatatccatacatttttcaaacgcgtgggcgtggcagatttgggcgttagagtgggcatggcaaaaaattgtttggcaaatcgttagaaatttacaagactaataaaattataaaaaacgaattacaataagtaaccgaataaatataataaattataacgaatctagtatacccttttactctacgagtaacgggcataattacacggggagagcctgtctcataacgaagaaatatgtttatgtgatttccacaaaggcgatccatttggaactagggttgtgataatgtatcaaaatatcgacatgtcaatatttttctaggaagttcattagtttgatggggtttatgtcaacaactttccggtaaaatattgattagagatattttaatatattatcaacgaccctatttggaaaccacctccgatcatacaactgagaaattcatagtggccttttctcgtttcgtagcgaggcgcatttgtcctcagcgtgtccattcagataatggcaaggcctttgtggggcagcaactttacttttcctacacgtcatcaaagagtctgtgactgacgcatatagccatcagggactcgtgttgcggttcataccacccggggcttcaaatatggggtctgtgggaagcggggtgaaaaaatgtaaaacccctttctataaatatacatacgaccgcaagtacacgtttggtgacacttctcgcttagatcgaggcttggctcaattctagacccatctatctgatgtccaaagaacccttagatttgctggccctcacactaggccatttccttattggaggcccgctgctttcagcggctgagcccgagataaagagcgaagccaagtcgatattaaatcatctcaaggctaaacataagcagtttagagctcggtggaaagggtagtatcttaaagaacttcagaagcgaagtaactggcaatttccgaccaggaatctccaagtcgacgatatggttgtcgtcaagaagggcaatcttccatcgaacgaatggtggctcggcagcatcgtttctgcattccccggaggcgatgatcgcattggagtcgttgagatacgtacgtctcgcggcacaataaagcaccctgtccacaaggtcattctctaccgttcctacagattagagctcttccccctttccagagtgttgtctgcccattctgccagttttgctttttttattgaaatacaaaattttctgaattggctcctcgtcctcgtgcctaccagtccttggagcgcagacgaactcgaggtattcaatcctaccgctaccgagtctgaccagaattgcatcctcttcggaagagcaagaggtttaacaaactgagcactgaaaagcaccatctagcagtacttattcaagtgaagtgaagctaccccgacgtcttcttcttttcgggacttctagggacaacaacagcagcctccaatcacccacctccgcccgcagcatccaacggatcgcgacaacatccaccggacgtaataattgtaattatcctccctctccatttcagacggcttgcttgctcggctcattgttgtcgcaaggtaattatattaacttggtaaatatattcgaaacttggtcgattattggatctatgattatcgcaacgccaactttctaaaacgtagtcaattaagatctcgctttaattgatccgattatcattactcattactcctgctatattatgacagatgccacaaataataaacctcattgattaaatagagactttataacaaatttaaaaatatcggttctcattctattccttttaaatatttaagtgctcagaactgagaactttttaaaccgttgtaagttccagttcgtacagttttataaattcgttaacactaactggaaaaaaatgtctcacccttcaacgctatttttttaaaaatactacggtcggatcaggcaatagccgggtctatttacatgactcaggaatgcctggtgggcgggtaaattcctaaatattggcttaatattgtagcgacgaggttcgtggcggcggacttgtccaagcaatatagattttttcgatttcagtgtaaatttacccggggtacatgacggggtgggacaaatgacgaaataattatcattgctcgaatctgaactttcaaactcattatttattaattccacgcagatatacatcaattaaagttgcctcgcaacctgatggttgtcagtatggctgcgattgaggtatgatttcatatttcatatttcatgctttacgccatattctcaatcctctcccgccttgggtcatttgacataacccaggccatttaggagaaatcgcagagcgaacagggattattcaatcgggcagatcgctcaacaggattcccaaaagggtacgccaccacctatcgataaagtcgatgataacatcgactccaactgcaacaaattctttatcggtttggtagcgctgcaccgccacaggttgggcctggctcactcaccccaggtggtgcttttgttgtttcgcactcgctatctgacaatagctatgataacttggttaatttctgactctggggaaaaacacagcggaagtaaagtgccgaaaggaataaaatgcacttgagtaaaaaatgtcggtaaaaacgataaaactctagctggcaacagtaggatgcagtaggcacaacagtgatcaagtgaaaacgatgattcctaacaaagtgcagcagttatcatcaccagccagacagcatcgtaaaagcatttagacagtgacaaaataagtaagaatacatcggtaaagcttcacgctgagctagacaaagttaacccactttcagatacccgttactcagcttgtgggaatgcaagcataccaacaattcatcgatagatattggggaatacaattagagtggcaaaatgggataacagacttgcgttaggtgcaacgctaaaatctgaattcttaatctcaaccttctagcttttatagttcctgagatctcgacaattatacagacagccgcatatggccaaatcgactcggctattgatcctagtcaagaatatatatattttatataagtggtgttcgtactttcgcgagtaaaaagcctgtagtttgagagttatttgcaattaattattgcaaatgtttcatgccggaaagcacgtgtttcgaggcggtcttttggatcagcttttaaaaagctgcgctacatgttattggtggttgtaactgctacggtctgtgtcttgggacggttcagtgctgtcagaccgatggattgtagatttgatcgacggaaggagccaccatcggagtaattccgatggataacgacagtgcctcgaggaaacccaaacgaggcgggcctagaagccatctggcctctaagagctcggttccaacgcaggcagacgcgttggacagtgttggtgcggaagcagtgcctcgatgaaacccaaacgaggcaggcgtagaaaatatctggcctggcagttcggctccaacgcaggcaggcgcgttggagagggttggtgccaagaggcttgccctggcggccagcgactgcccccatgatgccaccgtacccgctgccaccgctacccccacagtccctgcagagccacaggaagccaggcctggtgatcccgctcttgccaccgcccccgccgcgaggagatgctcatcatgggaccttgttggcggcacgcccacgattctggccgcgatttcgagcatccagctcggagacaaaggcgctgtggtccgggcaggggtggatcccgaggcggcaaacgctgttttcgctgcgttgcagaggtatgataagctcatcatgtctcttactgtgcgtaacgcgttccttgagtccagggggtttttcggaggaccgaaagtaggcgatggcgctggacgacccggacgaagatcaggagaagtaggaggacgaggatctggattgctgtcaaaggagcccgctttcgctcctatccatatattgtatataatatataatatataatatataatatataatatatatatatatagttaaatagtttttaattgagccgaacaaatgatccgtatttaaactaagatcaacgctgaaagttaaatagtttttatttttttaagtcgaacaaatgatccgtatttaaactaggatcaactccgaaataaattaaacactgaataaattcggttttgttttttattaaatatcggtttaagacttattgaactttacggtctaactttcaacttaagagtgattacaaatgtgagtgagaattgaggaggggcctctatgggttacagaaataaagaataggaaaaaaaacggaatatctcccaaggttgtgaagtgaagtaataacgatcgacacgcagataacgcagaaaatagctttaaacggtaaaatcatgtgatgttcttggatgtttacgttgaggagagcttgggaatccgtttacaagagcggcccagtttgggtggcgcgaatattcaattaactgagcgtgatgagttggcgtgaatacgtcactatatatatataatatataataatatatataatataatataatatatatatatatatataatatataatatataataatatatataatataatataatatatatataatatataataatatatataatataatataatatatatataatatataattatatatatattatttatattatattatttatattataatatatataattatatatatattatatatatatataatcttgaacctttaatggtagggcctaagtgctggtaggtgttcccagtaggacagacgtttttcttcctccagtgactttagtaaggcccgtaccctgtgggtagggttcggacccaattagagggttctctgcccctttcctggctaggttgtccgctagctcatttacttacagctcctagtttgtctagggctgtcctcact

SEQ ID NO: 26420 - DNA, 567 bp, DROSOPHILA
cgaaagcgggctcctttgacagcaatccagatcctcgtcctcctacttctcctgatcttcgtccgggtcgtccagcgccatcgcctactttcggtcctccgaaaaaccccctggactcaaggaacgcgttacgcacagtaagagacatgatgagcttatcatacctctgcaacgcagcgaaaacagcgtttgccgcctcgggatccacccctgcccggaccacagcgcctttgtctccgagctggatgctcgaaatcgcggccagaatcgtgggcgtgccgccaacaaggtcccatgatgagcatctcctcgcggcgggggcggtggcaagagcgggatcaccaggcctggcttcctgtggctctgcagggactgtgggggtagcggtggcagcggcatttgtggcctccataaattcgtcgtattcacagtggtacagtaaagctgttgtacaaacaaaacgtgaagaaattgttaatgggctctctgcatcttttgaaattgcattaaaaatgtatcgtaaaaggaatggcaaactccccacaaatattataatatacaggtaat

SEQ ID NO: 26421 - protein, 139 aa, DROSOPHILA
MMSLSYLCNAAKTAFAASGSTPARTTAPLSPSWMLEIAARIVGVPPTRSHDEHLLAAGAVARAGSPGLASCGSAGTVGVAVAAAFVASINSSYSQWYSKAVVQTKREEIVNGLSASFEIALKMYRKRNGKLPTNIIIYR

SEQ ID NO: 26422 - DNA, 7299 bp, DROSOPHILA
gtcctataaatatatatactacaatatataggatgaaccatagcttaccttccgaaaacgtgccatgctggtcattgtgttgaccgacctgccagcggataagttcagtgtcagcgaagagttcagggtcgttagcctgtaattaagaaggggaaagtaacgagtttagcctagtgcgtgttgcacacggcgtatgattaatgtgctcagtggacacgcaaatcgcagtgcacttgaccctatcgagtgttatctactcagcttattcattttgcctgttcatacgctctacgcactattgatttttccagctgttgcaacttgtagtgcgcaacattcgtgctcccattgttggctcttctttgggtgctgataagaagagccaacaggtggttgaaaattggtgaaaagttcacctggacctctacaggtatttaattgacacctaagtgtttgctcttatttaactctcttatgagatgtgtcgttagcactagctctaaactcaccttcactactattaggctaaacttattttttcggcaaaggacctctatcctgagcacacagtcaccagccgtcgatgcagaggaagataaactggtcagcgaagtgcggtacatttgtttcgttagtccaaacaattttaacgcaggcgctctttgcttgattcagatacagtggtgcaaaagctattgaaagttatccaaaactaaaaaaacctttcatcaggcgaatgtattcaacacctaaaaaaaactgctcaaatgagcttacattaaaatcaatcctaacatattatatttaaataactcatttcataattccataatatatatgctttcattatataattaataatcatttcccaaaacaccaaagaaaattcaatccaatgttttgagttttcagaatttttttatatatttttttttttaatattccattcagctctacattcacaattacatatttgtaatattgtttttttttttgttttcctttttaaattacataatatatatatttaaatatatatttatgtatacggtttaaaatgtatgtatatatatatataactttttgctctcgaatcgagggactcaaaattcaaataacttgacgcgatcgaaagttgctaaagggggtcgcggggaatccccccatcgggggcagtgggctgtatgtgtttttgggagtagtgtcatacatatagttacatttatacgtacaaacctagaatataaagaacagatgactggaaataatgtttgtgtgatccttcacatctttaacttagtctttatgatttatgctgtgtgttggcatgtgtgtgtgtgtatccgtgtgtgtttgcatgtttatggatttggtgcatatttaaagatttaaggtcttaattcggtttttctttgtttttttttcatatttttttttttggtttttaattaggtttttttcttggttttcattttgtgggttttttttgtcacttaaaaaattacattaataaaatgtattttaaaacttatgcagaaaaacgttgcccattgcgatggatgcaaccgtgtctactcgctctcgtcctcctcctcctcctcggaggactctttcttcttggccttcttggctggcttggcggccgccttctttcgcttcttgggcgctcccgaatcggtgccgccattggcctcgtactcctttaccgccttgttgtactcctccttcattttgatggccttctgctcccactcctgcgaaaagttgcgaaaatgcccagcaattagtaatcagtaaagagtattgccagctgaactggccgtttggctctacttacggtcttatccttcagtccgcgccagagttctccgccccgcttggcgatgtctgtcaccttgctgccgggattatccttcttgatctgttcgcgggtctcgttgagccacagcatgtaggcggaaaggggacgcttcgggcgatctccactcattattctggtttaatttaacttctctcgaggaatatatataaaggctgagcacttaagcagctgaaacgagaaaaaaatattcattaaaatcaatattaaatttgataaaaagatatatctgttactaatttaaaatactaatttaaaacgcccaggagcaaacgaataaatgtgcttaatttgaatcacaggcacctgcatatgtttttcttttgcttctgactcagccgattgaatattcaataattgcattttgggctatgggcaaacaggcattgattaaatatgccggtcgcggtcaaacgacccctggctttagccccgccccttttgccgcccagatgccaacgtaaatgaaatacttttgataaataatccttgcggctttatataacaccccccccccccacacataatggctatttatggcagcaatatttccaattaattgcgggtgtcgatttcatgtacatatgtactcgatggcccaccatataagccttgcatttatataacacagaggtcaatggccacaaagagtgactttttgcaccggactttaaagagcccgtgcgccttagcaaatcagctgggagatgggcatgcaaatgaggcgacaacgatgacgacgacactctgccccccaaaacaacagccatgagccatggactgccatgcacttgacccaaatccaggaattcagcgcaaaatgcacgacaacgagacatcggcatcgacatccacatcagaggcagggcagaggggagacgacggttggttgctgcagacggaggagcataacgacgtgaattgggttaacaaacgactcgaaagcgaaggaatctgcggcctgaggagtcaagtgggaggcagaaggtggctggacgagtggcgcatcaatcaggcagccgccatctcacattgcagattgcacaacaccattattttgccaacggctgggggatattcccactccacagatgcatcatacatatacatacatattcgtatctgcgtatcctgtgtccgggagcaacaggaaaacggcggcaaaattgttgctagttcaacgcggacacagacacagatacacgcatccaccagatagacggatgatgcctggcgaggcttcgcatattgcggcaacacgtgatgcagccaggatgccacctacctacatagtcttcccctcactacctatatacatatatacatatatattttccttttccagtgggggtccacctagaaaatcgaaagcgaaaaccatttcccattggtgcgagtgtatgtgcttagttggttgcgtaaatatacatatatctgtatctgttgttctgcagtgcgaaagcattttcgagttataacaaagcataaatgctgttgttgttagccgcaggatttaccctaagacgttttaaatttattttctagaatcaaagtttatcgaaaggataacgataactaaatacatcatgaataaaatatttatttttcataaattgggctcacaatttcgatagttgactggcaacgcattcatgttgttccattattcagcgacattacgcatacgcaacgttggcaacatggcacattacgcatacgcaacgtgttgcggccgccccttgtgcatgtggcataatgaagccccagactaacgacaaacagaacccacacaaaaggcgcacaaagcatattaaacggaattcaaaataaggaaggagctggtaaaaaaaacgcaaatccttttcagtggaaaatacggcacaactgtcatttttgccgatctaaaaattgaaaagcagtacgtcgacagaggcagcggcttcgacagcgacaacagcagcgacagcgactgaagcagcaaatgaggcagcgccgttgacgtcaactgagagacaactgacaacgcttatctggtcgactctatgtgtttatggcgtgtgtttttaatgccacccggccgaaggagagactttccgtgcagcaccaccagtccaaatagcaaccaccgtgccaccgaaccaccgaaccaccgagtccattagaaaccacccaaaaccgcccagcaaaaatccaacgaagtattgtcttgcctgcagcaggaagcttgtgcgcagaaccagcattttagggtagatactttcccagggatttgcgcactggatggcactctatgtgtttttcgcatggagagcgtggaacgcacagtggtgacttttaaacgagcggatacataaggccgataatgccctcggttaatggggtttccttctttctgtcacgccggtttcgctcagtgtacggtacagtcgtggcacaaatcaaagggtaggtaggtcaataagatagcgaagctgattgaaagtggaacgctagatggcgccatggttatattcatgaattattcatgttaataattgcaagggcatgattcattcatcacaaaaattattaaaaaatatatttttactacaaatttttttttagtgatgaaaaccgaaatcttaaaatcttttaatgcatagatgcaaaattgacaagaaaatcgtaagttaggatcataaaagtagttaacttttggaggtttagttcttcgaaactaacagcgatagcgctgcacacaatgtgatatctcaaatcagagaaaagtgggtatgatcgccggtgggtgactttgaggtacatcaaaacaacgaccgctatctgcgtaagattagcccgtagtcgtattcgattaggaaacatgaaccagcgcaaaagtggcgcgaaaagagcttcgtaactgtaaatgccccctagaagctcagcggctatggctatatcgcgctcgcccgctctctccttatcggtgtgttggtttttttttttctgcttgtgtgagtcagtggggggactgaataacaaaacttttggcgccatttttagtctgcactcgagagtgcagcacgcaaagcgctagaaaataacaacaagacaggcacgcggaagaaaaaaaaaacaaactaattcggcaaatagcaatcaaattaccaatcgaaataggtgaaatttgtccaggatcagcgaggatcctggacggccctgcattagaaactacatggcaagcattaaacgcgaattaatcctgtgacatgccgcgagaaaagcaaaattccagcctgactactgcggaaaaacaggattagccttgcaggaccaagtggaaaagtgcaaaagccaaggcaaaagggctcagaccaagagaagccgcagatggcgacaggtgggtggacagcgggtggccaattcccgaaggcgagacccaaagccgatcagaaatcaagagccccaacaagcaggtgcgactgaaagtgacttgcactggggaacgctccgcagacagcaacaaactacactggccaaaccgaacctagatcgaagtatgcacttgcacaatatatcacagctgttgttaatcaaaaaaattcagcgcctaactaattcgtttctttcagtgtgctatttataaaaatataaaggtaagccacctgctaaaattaacaaattattaagccaatcgcgtataagctgtaatcagcattttcacattcaccctgcaaaacactgactaactcaatataattgtggttaaatgaatctacctcacatatcagcattaatttgcatgtcagcgtcgatttaatcaattaaacttttagctttatctttaagttcgttttcgcactaaagtcgaaactgaaaaattgtttttcaattctaataacataaaaaccaaagcgaatattcaactaattttcagctaattgttctcaattataaacaagatagttatttcatcacgaaacagccattagttgtgattaattatttaaatacgaaaacgcactgcaaactatcaactagcacatttaaaatttaaattcattcaaaggcctcaaaaacccaacgaagccttgtaaacggcaattaattagttaaatacataaccgaataaatatatttgcgcgcacatgatttcacttgattcgaagattaatgcctggccgactaatttgacgacgagtgtaaatgcgctcttggccagcaaagtgcaaaaatcgtatgaaaaatgcccatatctacgtacgtactttgccttgtcgctgtgcttctgcttcactcttcttggcccgaaacgttgttcagatacttgtactggatactgaatactggatagtggatactgggctctgctgcctgtgaaaattgccttgcacgaactgaactgagactgaaactgaacaaaatgtactgggctggctgcctgcctgctactgctactgcgagcgtctataggcaagcgaactgaactgaaattcaactgaagcagctgtaccaggcaatggccatacatacgagctgtacagaaacccaaccaaaccgaaccgaaaccgaaacagaaacacacatagaggcgagcggcagagagagagggggcatacacagcacacacagcacagcacagcacagcacagcagaagcaaaagcaaaagcaaggcagcaacggcgacgaacgacgaacagcgagaccatcaaatagcacggagtacgtacgtacaggcaggccaaagcaaaagtatctgtatctgagaggcgagcaacccggccagccaaccaacaagcagggcacatcgggggtaggcgactgtatgcgcacagtggcgggccttcggttgtgtacggctcacgcgaggcgactcatttgcgtggtcgcacactggcgggccctccgattagaggaacagcgcatgcacagtacaggcacggaatattgaaagtgcatgctttggagtattacaagaaactaagatatttctgcgaggcttataaaagaacattttaaagctgccacagaagaaaagtttttttttattctaaactaaaaaacaaaaaattaatttcttttaaaaacaccatctgtacgaaccctactaatgtttatctcaaagcaagcaccctaaaatttaatgagacgcgcatgttccgactatttttgccgcgactgtaccctgtttgttcatataaaaagcatggagctgtgagaacgaacttccagtagtatttggcggcgccgctttcccctctccgcacaccccaccccccctgaccgacccatttaataccccagagctcgtccaaaacgtcgtcactgccaccccccccccccacctgtaccgcccacctcgtcccgcaaaaattaaaaaataaagcactcctatttcagcacttccaattacacatcgccatcgccatcgccatcgcta

SEQ ID NO: 26423 - DNA, 1140 bp, DROSOPHILA
gcagccagcccagtacattttgttcagtttcagtctcagttcagttcgtgcaaggcaattttcacaggcagcagagcccagtatccactatccagtattcagtatccagtacaagtatctgaacaacgtttcgggccaagaagagtgaagcagaagcacagcgacaaggcaaactgcttaagtgctcagcctttatatatattcctcgagagaagttaaattaaaccagaataatgagtggagatcgcccgaagcgtcccctttccgcctacatgctgtggctcaacgagacccgcgaacagatcaagaaggataatcccggcagcaaggtgacagacatcgccaagcggggcggagaactctggcgcggactgaaggataagaccgagtgggagcagaaggccatcaaaatgaaggaggagtacaacaaggcggtaaaggagtacgaggccaatggcggcaccgattcgggagcgcccaagaagcgaaagaaggcggccgccaagccagccaagaaggccaagaagaaagagtcctccgaggaggaggaggaggacgagagcgagtagacacggttgcatccatcgcaatgggcaacgtttttctgcataagttttaaaatacattttattaatgtaattttttaagtgacaaaaaaaacccacaaaatgaaaaccaagaaaaaaacctaattaaaaaccaaaaaaaaaaatatgaaaaaaaaacaaagaaaaaccgaattaagaccttaaatctttaaatatgcaccaaatccataaacatgcaaacacacacggatacacacacacacatgccaacacacagcataaatcataaagactaagttaaagatgtgaaggatcacacaaacattatttccagtcatctgttctttatattctaggtttgtacgtataaatgtaactatatgtatgacactactcccaaaaacacatacagcccactgcccccgatggggggattccccgcgaccccctttagcaactttcgatcgcgtcaagttatttgaattttgagtccctcgattcgagagcaaaaagttatatatatatatacatacattttaaaccgtatacataaatatatatttaaatatatatattatgtaatttaaaaagg

SEQ ID NO: 26424 - protein, 111 aa, DROSOPHILA
MSGDRPKRPLSAYMLWLNETREQIKKDNPGSKVTDIAKRGGELWRGLKDKTEWEQKAIKMKEEYNKAVKEYEANGGTDSGAPKKRKKAAAKPAKKAKKKESSEEEEEDESE

SEQ ID NO: 26425 - DNA, 5692 bp, DROSOPHILA
tggtgcgggcctgggaccttgagaagccgctgctctttgcacctgcgatgaatacccgtatgtacgaccatccaataactcgggagcagatcgacaagctgaccagttggggctacaaggagataccctgcatatccaagactctgatgtgcggtgatactggcaacggcgccatggcggaggtacccacaattgtggaagcggtgttatccgcctttcagccgattaaatagttatgcacacaaagtttatatcgcagaatattttgttacaatagttagacaaataatatggaattggctatgaaatcttagagatccaccaccttcatgtcctccagggaattgtttgccgattggctgatcagcgccttctccgagtccgtgaggttgataaacttgtgcttagacttcagctcttgctgtatggaagatagcaaatctggcgaacatcgtcctgtctttaagcccttttgatcttgcgtctcggcagcgcctgtcacctccatcttgggctcaacaatggtctccatctgcacggactggcgcttgcggcgcatcctcttcgaacctctcgtgatgagcaccacggcgggcgattcaaacggcagcgcctggataactgtctgcagaagtttgggcgccgtctctggtgttttgggattgccgataaccacatctgcctggagggcgctgcgtgctcgctctcgctcctcttcccgctctctggctgcattttttcgcattagctgacgagcacgctttttgagaatcgcctgggccgtgggatagtaggcaatgacctcgtttaaatccgatttggacagcacgaacaggttggagtagcccttggatcggacatctgctgttctgcgatcggctccatttattcccagcagactgatctccccgaacacggaaccttcggttagagtggccagcactacatcgctactaggaccacccatcacttgaacctgtcccagtttcacgatatacatctctctgcccacttcgcctttgcggcaaacgaaatctcctggcaaaaatgtgactgcccttagttttagaaccagatctctgagtaaagcctcctcgcaatcagcaaagagttgcaccttggagagcgtttggatgtgcacggagatggcgatatcggttttcaaattgatgggcaaagcatccaatatgttggattcatctgcaaaatttaatcttattttgatattgcatataacatatattagaagtttacaaacccaaagtgcgctgctgctcccatgtaaactggaaccacattttgaccctcgactgcacctcctgcgagagattgaggcgtcgcatgtactccagtgtctcatcctccagctggcgatactcatgcttattccgagtggctgtcgagatgatatccctgatctgaccgataagcagagcgaacacaaagacgcccattagccaggccaccgtcatgaagacgtactctccctgacgttccggcttggggttttttcctatcgaagttgccgtcttggtggcaaaagcaaagcaccttacatagggatgccctttgccgctgaagacccaacgattctgtcccagaccctggtagtcactataggcgtagtacagagcagccgtgatgtggatcatgtagagcatgtaggttagggttttggccactcgaacctataatattgaaattgtatgttaataaacagggcatagtttaagtaattagtatatcttacaaagtgcggagaagatatgactcgatccaaaaggcgaaacacttcccagaagctctgaatcttaaagaaccttggaaaacgcaaccaaaccgcctgtgttccgagtttaaagtacaatagctccagcggaagaagggccagcagatccagctgaaacattttaagttaagttgtacaattctaaatgaaattgtaagttaactcaccttaaactgcagttttcgcatgtagttctttctggtgaggttcttgtttttcacccagaatccctcaaaaaggtacataacccgatgtttaaagaagaccacatccagtagatatatgatgtcagcgcaaaagtcgcaggccagccagatattggtgttctccttggtttgaaagggaaacgaggcacgcagcgggattacccaggcgttatagagaaacgatagcgatacaacgcatagccaggagatgtagatcttgccctggggatccagggttcgctcatcattgttggcgccgcacaaactggaacagagccacacattggaccttggagtatccgcttcgaagagtcttccacgatggggtgattgaccagccggcaccagacgcaccttgtgctgcggcgaagggtgcagactcttggtcggaggcggagatggtgaactgaccgtgctgctggacgaaggagtcggaggcagctcgatccgggacttcaccttgttggctctggctgtaaagcgacgaaccaaatgacgaacctgatcgcggaggaactgctgaccctgggagtccaagctaccagcgctgcttggcttgcggtgatccacatccgagttcatttccgtgtccggttcatcgacggccactatctcgctctcgtttattgagggtgtcctctgggttcgctcatttcgatcctcattttggagctcgggcgattcgttgtaacagatctgcacatcctgttcgtcctcgtcaacgtctggttgggattccacttgatgcagtggcgaactcttctcctcctcctcctcctctttgggcaaaacgacctggccagtggctgcggccagttcctccgcccgctgaatggcaattggatcgggtacgatttcaggaacagctcctggtagtggaaccatttcgaagctgtcctgctcgagcactctcctcacactatccggactcactaggggcttctcatggtgcagtatgtgcttgaccagagcatgagtggcgcccacattgttctgatgctccgtggagtcgacacatccaatttttccattcctaaagtacaatctggagtggtagaatcgtggacttccaggacgatgtcttcgaggcggcgccttgtaggcgtttattttatatgtaaccctcttcaccggactggggcacttattctccttgttggagtacatcatctgctcctgttccttctccctctgcatgagctcctcggtggcactaacgaactgctcgatttccttcagatccttggtgatctcctccaggctgcgccgcacctgggcctccttttcgccaggagtcgagtagcggcgtgtgctctccggctgctgattaatgacattccgcatgaaggcatgtcgctccagggtgtcgcagaacttaggctccgctttacgcgtagacgatgtggaagaggagctgctctgggagccggattgggcgacgggtgtggtggccatccgctttagaagcgggtgattggtttgtattggctgaaactcgtcgtaggcaaagttctccaatatattcggggatgattttagcaacgatgcactcgcctccggttcgagcttctcactttggcgattcacctgcaaatgagcgaatcgagcccgcacgttcagtcgattgagggtcggttttagaaatacacgcaaataaaaacaaggcgaaccagcacgcaaatgcaataaaaacaacaaaaacggggtatagtgtgtgtgattcgcatggtaattgctggagacacccgcacaaaggcgacggcggagtcgctgtaacgtcacaagctcatccatcgaactattcggctaatatggaagcagaagaagtatgaacccaaagggtcgtggactcttcttttcaacatccttgaacggaagtcctgcctagggattttcaacttgctcgggttgattatattggaagttaaggtcacagtaaaaatatcttttgtgttttactatcaataaaaggacattaagttataaactgaatacatcttgtgttttttgctattcctatttttaactgagattatcatacgttggactgagagtatcattcaagaatcatttggatcagtcataaagatatacatagtcctataaatatatatactacaatatataggatgaaccatagcttaccttccgaaaacgtgccatgctggtcattgtgttgaccgacctgccagcggataagttcagtgtcagcgaagagttcagggtcgttagcctgtaattaagaaggggaaagtaacgagtttagcctagtgcgtgttgcacacggcgtatgattaatgtgctcagtggacacgcaaatcgcagtgcacttgaccctatcgagtgttatctactcagcttattcattttgcctgttcatacgctctacgcactattgatttttccagctgttgcaacttgtagtgcgcaacattcgtgctcccattgttggctcttctttgggtgctgataagaagagccaacaggtggttgaaaattggtgaaaagttcacctggacctctacaggtatttaattgacacctaagtgtttgctcttatttaactctcttatgagatgtgtcgttagcactagctctaaactcaccttcactactattaggctaaacttattttttcggcaaaggacctctatcctgagcacacagtcaccagccgtcgatgcagaggaagataaactggtcagcgaagtgcggtacatttgtttcgttagtccaaacaattttaacgcaggcgctctttgcttgattcagatacagtggtgcaaaagctattgaaagttatccaaaactaaaaaaacctttcatcaggcgaatgtattcaacacctaaaaaaaactgctcaaatgagcttacattaaaatcaatcctaacatattatatttaaataactcatttcataattccataatatatatgctttcattatataattaataatcatttcccaaaacaccaaagaaaattcaatccaatgttttgagttttcagaatttttttatatatttttttttttaatattccattcagctctacattcacaattacatatttgtaatattgtttttttttttgttttcctttttaaattacataatatatatatttaaatatatatttatgtatacggtttaaaatgtatgtatatatatatataactttttgctctcgaatcgagggactcaaaattcaaataacttgacgcgatcgaaagttgctaaagggggtcgcggggaatccccccatcgggggcagtgggctgtatgtgtttttgggagtagtgtcatacatatagttacatttatacgtacaaacctagaatataaagaacagatgactggaaataatgtttgtgtgatccttcacatctttaacttagtctttatgatttatgctgtgtgttggcatgtgtgtgtgtgtatccgtgtgtgtttgcatgtttatggatttggtgcatatttaaagatttaaggtcttaattcggtttttctttgtttttttttcatatttttttttttggtttttaattaggtttttttcttggttttcattttgtgggttttttttgtcacttaaaaaattacattaataaaatgtattttaaaacttatgcagaaaaacgttgcccattgcgatggatgcaaccgtgtctactcgctctcgtcctcctcctcctcct

SEQ ID NO: 26426 - DNA, 3275 bp, DROSOPHILA
tttatcttcctctgcatcgacggctggtgactgtgtgctcaggatagaggtcctttgccgaaaaaataagtttagcctaatagtagtgaaggctaacgaccctgaactcttcgctgacactgaacttatccgctggcaggtcggtcaacacaatgaccagcatggcacgttttcggaaggtgaatcgccaaagtgagaagctcgaaccggaggcgagtgcatcgttgctaaaatcatccccgaatatattggagaactttgcctacgacgagtttcagccaatacaaaccaatcacccgcttctaaagcggatggccaccacacccgtcgcccaatccggctcccagagcagctcctcttccacatcgtctacgcgtaaagcggagcctaagttctgcgacaccctggagcgacatgccttcatgcggaatgtcattaatcagcagccggagagcacacgccgctactcgactcctggcgaaaaggaggcccaggtgcggcgcagcctggaggagatcaccaaggatctgaaggaaatcgagcagttcgttagtgccaccgaggagctcatgcagagggagaaggaacaggagcagatgatgtactccaacaaggagaataagtgccccagtccggtgaagagggttacatataaaataaacgcctacaaggcgccgcctcgaagacatcgtcctggaagtccacgattctaccactccagattgtactttaggaatggaaaaattggatgtgtcgactccacggagcatcagaacaatgtgggcgccactcatgctctggtcaagcacatactgcaccatgagaagcccctagtgagtccggatagtgtgaggagagtgctcgagcaggacagcttcgaaatggttccactaccaggagctgttcctgaaatcgtacccgatccaattgccattcagcgggcggaggaactggccgcagccactggccaggtcgttttgcccaaagaggaggaggaggaggagaagagttcgccactgcatcaagtggaatcccaaccagacgttgacgaggacgaacaggatgtgcagatctgttacaacgaatcgcccgagctccaaaatgaggatcgaaatgagcgaacccagaggacaccctcaataaacgagagcgagatagtggccgtcgatgaaccggacacggaaatgaactcggatgtggatcaccgcaagccaagcagcgctggtagcttggactcccagggtcagcagttcctccgcgatcaggttcgtcatttggttcgtcgctttacagccagagccaacaaggtgaagtcccggatcgagctgcctccgactccttcgtccagcagcacggtcagttcaccatctccgcctccgaccaagagtctgcacccttcgccgcagcacaaggtgcgtctggtgccggctggtcaatcaccccatcgtggaagactcttcgaagcggatactccaaggtccaatgtgtggctctgttccagtttgtgcggcgccaacaatgatgagcgaaccctggatccccagggcaagatctacatctcctggctatgcgttgtatcgctatcgtttctctataacgcctgggtaatcccgctgcgtgcctcgtttccctttcaaaccaaggagaacaccaatatctggctggcctgcgacttttgcgctgacatcatatatctactggatgtggtcttctttaaacatcgggttatgtacctttttgagggattctgggtgaaaaacaagaacctcaccagaaagaactacatgcgaaaactgcagtttaagctggatctgctggcccttcttccgctggagctattgtactttaaactcggaacacaggcggtttggttgcgttttccaaggttctttaagattcagagcttctgggaagtgtttcgccttttggatcgagtcatatcttctccgcactttgttcgagtggccaaaaccctaacctacatgctctacatgatccacatcacggctgctctgtactacgcctatagtgactaccagggtctgggacagaatcgttgggtcttcagcggcaaagggcatccctatgtaaggtgctttgcttttgccaccaagacggcaacttcgataggaaaaaaccccaagccggaacgtcagggagagtacgtcttcatgacggtggcctggctaatgggcgtctttgtgttcgctctgcttatcggtcagatcagggatatcatctcgacagccactcggaataagcatgagtatcgccagctggaggatgagacactggagtacatgcgacgcctcaatctctcgcaggaggtgcagtcgagggtcaaaatgtggttccagtttacatgggagcagcagcgcactttggatgaatccaacatattggatgctttgcccatcaatttgaaaaccgatatcgccatctccgtgcacatccaaacgctctccaaggtgcaactctttgctgattgcgaggaggctttactcagagatctggttctaaaactaagggcagtcacatttttgccaggagatttcgtttgccgcaaaggcgaagtgggcagagagatgtatatcgtgaaactgggacaggttcaagtgatgggtggtcctagtagcgatgtagtgctggccactctaaccgaaggttccgtgttcggggagatcagtctgctgggaataaatggagccgatcgcagaacagcagatgtccgatccaagggctactccaacctgttcgtgctgtccaaatcggatttaaacgaggtcattgcctactatcccacggcccaggcgattctcaaaaagcgtgctcgtcagctaatgcgaaaaaatgcagccagagagcgggaagaggagcgagagcgagcacgcagcgccctccaggcagatgtggttatcggcaatcccaaaacaccagagacggcgcccaaacttctgcagacagttatccaggcgctgccgtttgaatcgcccgccgtggtgctcatcacgagaggttcgaagaggatgcgccgcaagcgccagtccgtgcagatggagaccattgttgagcccaagatggaggtgacaggcgctgccgagacgcaagatcaaaagggcttaaagacaggacgatgttcgccagatttgctatcttccatacagcaagagctgaagtctaagcacaagtttatcaacctcacggactcggagaaggcgctgatcagccaatcggcaaacaattccctggaggacatgaaggtggtggatctctaa

SEQ ID NO: 26427 - protein, 1037 aa, DROSOPHILA
MARFRKVNRQSEKLEPEASASLLKSSPNILENFAYDEFQPIQTNHPLLKRMATTPVAQSGSQSSSSSTSSTRKAEPKFCDTLERHAFMRNVINQQPESTRRYSTPGEKEAQVRRSLEEITKDLKEIEQFVSATEELMQREKEQEQMMYSNKENKCPSPVKRVTYKINAYKAPPRRHRPGSPRFYHSRLYFRNGKIGCVDSTEHQNNVGATHALVKHILHHEKPLVSPDSVRRVLEQDSFEMVPLPGAVPEIVPDPIAIQRAEELAAATGQVVLPKEEEEEEKSSPLHQVESQPDVDEDEQDVQICYNESPELQNEDRNERTQRTPSINESEIVAVDEPDTEMNSDVDHRKPSSAGSLDSQGQQFLRDQVRHLVRRFTARANKVKSRIELPPTPSSSSTVSSPSPPPTKSLHPSPQHKVRLVPAGQSPHRGRLFEADTPRSNVWLCSSLCGANNDERTLDPQGKIYISWLCVVSLSFLYNAWVIPLRASFPFQTKENTNIWLACDFCADIIYLLDVVFFKHRVMYLFEGFWVKNKNLTRKNYMRKLQFKLDLLALLPLELLYFKLGTQAVWLRFPRFFKIQSFWEVFRLLDRVISSPHFVRVAKTLTYMLYMIHITAALYYAYSDYQGLGQNRWVFSGKGHPYVRCFAFATKTATSIGKNPKPERQGEYVFMTVAWLMGVFVFALLIGQIRDIISTATRNKHEYRQLEDETLEYMRRLNLSQEVQSRVKMWFQFTWEQQRTLDESNILDALPINLKTDIAISVHIQTLSKVQLFADCEEALLRDLVLKLRAVTFLPGDFVCRKGEVGREMYIVKLGQVQVMGGPSSDVVLATLTEGSVFGEISLLGINGADRRTADVRSKGYSNLFVLSKSDLNEVIAYYPTAQAILKKRARQLMRKNAAREREEERERARSALQADVVIGNPKTPETAPKLLQTVIQALPFESPAVVLITRGSKRMRRKRQSVQMETIVEPKMEVTGAAETQDQKGLKTGRCSPDLLSSIQQELKSKHKFINLTDSEKALISQSANNSLEDMKVVDL

SEQ ID NO: 26428 - DNA, 5516 bp, DROSOPHILA
attattatattattatattattatattattatattattatattattatattattatattattatattattatattattatattattatattattatattattatattattatattattatattattatattattatattattatattattatattattatattattatattattatattattatattattatattattatattattatattattatattattatattattatattattatattattatattattatattattatattattatattattatattattatattattatattattatattattatattattatattattatattattatattattatattattatattagaatttactaagtacttctatgaatggaattattattggaaactctacaatatttaatcacttataccaatctaccaacctagtaaatgctcttttaatttacttaacataggtgtaacgattccgttcactctctctacgtgccaattggcttgagttaaacctgtatccccattgatatgtagtgtgcgattatacttggtttccggaactgagagtaatatacacgttaaacaacttcatatacgatttcatactttactctttatagctaggaatcaatagtttcttatgtattaagtgaacttgcattattttcagcgaaactcgccgtactaaagtaataatggtaataataatgaataatatatcttctacgactaataaaccaactttataagcttgttcataaaaatatgcactgcactcgatttttgcaaaaatgaatacatatgttttgtttttaaaatttttgtttaacattttttttaaactatatatttaacttttccttttttattgtatcaatatagcatagctcttttaatcaaataaaactagaaacagtaaaaggatgccaccaaaaaaaaaaaataaggaacacaaaattaatggaaaagaaaagaaaaaagatattcagtcttttaaaaaggatgtggaaactgacaatcataaaatacctgtagacgaactgttagagcgcttaaaaacagatcctaacatggtatgattatttataataatataataatataatatatataatataataataatattttttataggggttgtcttttgttgaggccaagttaagattggaaataaatggccctaacatacttaccccgcagcctccaacaccaaaatggatagttttcttaaaaaccatgtttggtggattcgctatactactttgggcaggatcatttctttgtttcgtcggatatcttatacaattacaaacccagcacgaaccaccagatgacaatctctatcttggcattgcattgaccgttttggtaatagtcactggattatttacttattttcaggtaaataaatgaatatgtcaaataaatatttctaaatattacaattatccttattgaagttaagtctaagtttgattttgttcctttttttgatattcagagatccgtttctgttattattctctagagtaagggtatactggattcgtcgataatttttttctcattttatttcccaatatctatcgatatcccagaaaaaattatgaaatttcgcatttccactagttgagtaacggatatctgacagtcggggaactcgactgttgtattctctcttgttgtaatacaaaaattctttagtatacaaataatttttaacattattgtgagttataataattatttacttattaggttcataaatcgtcttctataatggattcatttaaaaaccttgttccacaatacgctacagttatacgagaaggggaaataaacacggttacttcagacgaaatagtaaaaggagatattgtggaagttaaatttggtgatagggtaccagctgacattcgaatattagaagctcatggacttaaagtggataactcttccttgactggagagtccgagcctcaagtgaggtctacagaatttacacatgaaaacccattggaaacaaagaacttggcttttttttctacaaacgtacttgaaggtacctgccgaggtgttgtcatagcaactggggacagtacagtaatgggacgtatagcgaacttagctgcaggactggacgatgttcaatcacccatttcccgggaaatacaactttttattcggtttattacaatattcgcaataatactgggattatctttttttgcaataagtttaacattaggttatgaatttattgatgcagttgtgtttcttattggcattatagtcgcaaacgtcccagaaggcttactcgtaactgtaaccgtatgtttaacccttactgcaaagcgtatggcatccaaaaattgtttggttaagaacttggaagctgtcgagactttaggttcgacatcaacaatttgttcagataaaaccggaaccctaacacaaaatcgaatgactgttgctcacttatggtacgatcaaataattgttgaatctgacactactgaatcttttcgaggatcccattttaaaattgaggataaatcttttaatgctctttttatgtgtgccgcactttgcaattcagctgaatttaaaggtgggcaagatgatatacccgtatttaaaaaagatgtcaatggcaacgcatcagaggcagctcttttaaaattcaccgaaacaatttttgcaggtattggtgcttttcgccaaaagcatataaaattgactgaaattccctttaattcaacggaaaagtatcaagtttctgttcacgaatttaattcaagcgatggatactttatagttgagatgaaaggagctccagagagaatattggatcgctgtagtacgataataattcaaggactgtctgtagaacttacacctacattaaaattggaattcgaagaagcttatttggaaatgggcggtatgggtgaaagagtattgggatttgctgaccttctacttcccatgtctaaatatccaatttcctacgagttcagcgcagatcctccaaattttccattagaaaatcttcgttttctgggactaatatcattaatagacccgccaagagcagctgtcccagacgcagttgcaaaatgccgttcagcaggagtacgtgtaattatggtaactggagatcaccccattacagctaaagccatagcccgcagtgttggcattattacaacgcctactgcagaggacattgccaaacaacgtggcgttacagtactcgacatcgattcccgacaagctactgctattgtggtccacggtggtgagcttcgggagatgaaagctgaagaattagacgcagtaatttactatcataatgaaattgttttcgcccgaacatctccacagcaaaaacttataatagtagaagcttgccagagacgtggtgaaattgttgctgttactggcgatggtgtgaatgactctccggcattaaaaagagccgatattggcgttgcaatgggtatttctggatctgacgtttctaagcaggcggcagatatgattctattggatgacaactttgcatcaattgttgttggtattgaagaggggcggattattttcgataatcttaaaaagtccatcgcatataccttgacttcaaatcttcctgaaatagtgccgtttttattttttgtgatatttgatatacctttagctctgggcactatagcaattctatgcatcgatatcggcactgatatgcttccggcaatatcgctagcttatgaaaaagctgaatctgatataatggcgcgtatgccaagagatccgtttgaagaccgtttggtaaataaaaagtaagtgtatagtttatttcgtagatcaagagtgttcctatatctattttccttacattttttaagaaatatttatatgcttaggatgtaactggtatctgatataaagtttttaagagtttacatatttttaggcaaagtatactcctaaaaattactttttccgagcatcccccatatacccgtaaaaacatttttttcccagatcatttggccctgaagccgcgcagcttaatcgcgttttactcaaattcccgaatggcggtttgacattagacccgcgctttaaaactcaaaaattaatacattttttttttaattttttttcgcatattaacatttacatagtgctttgccaaaggtgttttaaaaatatgtagtttggttatatgttgtttaaaacaaaacaaaatataaaatttttgcaaaaatgcttattgatatgtacttaccctctgaagttagttatgattaacatgtttggtatccctaaatcatcaggttaattctaatggcttatttgcaaattggagttatacaaacagtagcatgtttttttactttttttgctataatggcagaacatggattccccccctccagacttaaaggaattcgagaagactgggactcaaaaaatgtagaagaccttgaagatggctacggacaagaatgggtaactgtattgtgttctattttgcctattcgtattctgtttaacgtaattgaatggtttctagacctacagggaacgtaaagttcttgaatatacagcaggcaccgggttttttgtgtcgattgttgtaacacaggtttttgaccttttaatatgcaaaactcgtcgaaactcaatattgcaacaaggtatgggcaatcatgtacttaactttgctttggttcttgaattcatcattgcctgtctactttgctatgttccagtatttgaaaaaacattgagaatgtattccatcaagtaagtacaaattaatatgaaaaaacggtttaaacctaatgtttttccagatttatttggtggatatatgcgttcccttttggtctattaattttcttttttgatgaaagtcgtcgatttctaataagaagaaatccaggtggatgggtggaacaagaaacttattattaattacagctatgtatccagttacaccaataaatttccgtcgccgtacttgttagtcttaataatactcgtactcgtagagtaaaagggtatgctagatttgttgaaaagtatgtaataggtagaagaaagcgttttcgaccatatcaagtatatatatatttttgataaggattaatagccgagtcgaagtggccatgccatagacgcatagaagcatagacgcagcgtagagatccatgtttcccactataacgcccacaaaccgcccaaaataaaatcgaaatgtttcgatttttctttgttttattgtttgccttgtcaatttctatgtattttatacccaaaacactttggccaaggccaagatgtaaggaagcatctacaacacgcttttgaacacatcttttaatatcgcagataaatgatgaaatttctcgttcacatttccactaccattccccggctcaggggaaactcaaccatagcattctctcttgctttgacttcagcatagtgacga

SEQ ID NO: 26429 - DNA, 3045 bp, DROSOPHILA
aaacagtaaaaggatgccaccaaaaaaaaaaaataaggaacacaaaattaatggaaaagaaaagaaaaaagatattcagtcttttaaaaaggatgtggaaactgacaatcataaaatacctgtagacgaactgttagagcgcttaaaaacagatcctaacatggggttgtcttttgttgaggccaagttaagattggaaataaatggccctaacatacttaccccgcagcctccaacaccaaaatggatagttttcttaaaaaccatgtttggtggattcgctatactactttgggcaggatcatttctttgtttcgtcggatatcttatacaattacaaacccagcacgaaccaccagatgacaatctctatcttggcattgcattgaccgttttggtaatagtcactggattatttacttattttcaggttcataaatcgtcttctataatggattcatttaaaaaccttgttccacaatacgctacagttatacgagaaggggaaataaacacggttacttcagacgaaatagtaaaaggagatattgtggaagttaaatttggtgatagggtaccagctgacattcgaatattagaagctcatggacttaaagtggataactcttccttgactggagagtccgagcctcaagtgaggtctacagaatttacacatgaaaacccattggaaacaaagaacttggcttttttttctacaaacgtacttgaaggtacctgccgaggtgttgtcatagcaactggggacagtacagtaatgggacgtatagcgaacttagctgcaggactggacgatgttcaatcacccatttcccgggaaatacaactttttattcggtttattacaatattcgcaataatactgggattatctttttttgcaataagtttaacattaggttatgaatttattgatgcagttgtgtttcttattggcattatagtcgcaaacgtcccagaaggcttactcgtaactgtaaccgtatgtttaacccttactgcaaagcgtatggcatccaaaaattgtttggttaagaacttggaagctgtcgagactttaggttcgacatcaacaatttgttcagataaaaccggaaccctaacacaaaatcgaatgactgttgctcacttatggtacgatcaaataattgttgaatctgacactactgaatcttttcgaggatcccattttaaaattgaggataaatcttttaatgctctttttatgtgtgccgcactttgcaattcagctgaatttaaaggtgggcaagatgatatacccgtatttaaaaaagatgtcaatggcaacgcatcagaggcagctcttttaaaattcaccgaaacaatttttgcaggtattggtgcttttcgccaaaagcatataaaattgactgaaattccctttaattcaacggaaaagtatcaagtttctgttcacgaatttaattcaagcgatggatactttatagttgagatgaaaggagctccagagagaatattggatcgctgtagtacgataataattcaaggactgtctgtagaacttacacctacattaaaattggaattcgaagaagcttatttggaaatgggcggtatgggtgaaagagtattgggatttgctgaccttctacttcccatgtctaaatatccaatttcctacgagttcagcgcagatcctccaaattttccattagaaaatcttcgttttctgggactaatatcattaatagacccgccaagagcagctgtcccagacgcagttgcaaaatgccgttcagcaggagtacgtgtaattatggtaactggagatcaccccattacagctaaagccatagcccgcagtgttggcattattacaacgcctactgcagaggacattgccaaacaacgtggcgttacagtactcgacatcgattcccgacaagctactgctattgtggtccacggtggtgagcttcgggagatgaaagctgaagaattagacgcagtaatttactatcataatgaaattgttttcgcccgaacatctccacagcaaaaacttataatagtagaagcttgccagagacgtggtgaaattgttgctgttactggcgatggtgtgaatgactctccggcattaaaaagagccgatattggcgttgcaatgggtatttctggatctgacgtttctaagcaggcggcagatatgattctattggatgacaactttgcatcaattgttgttggtattgaagaggggcggattattttcgataatcttaaaaagtccatcgcatataccttgacttcaaatcttcctgaaatagtgccgtttttattttttgtgatatttgatatacctttagctctgggcactatagcaattctatgcatcgatatcggcactgatatgcttccggcaatatcgctagcttatgaaaaagctgaatctgatataatggcgcgtatgccaagagatccgtttgaagaccgtttggtaaataaaaagttaattctaatggcttatttgcaaattggagttatacaaacagtagcatgtttttttactttttttgctataatggcagaacatggattccccccctccagacttaaaggaattcgagaagactgggactcaaaaaatgtagaagaccttgaagatggctacggacaagaatggacctacagggaacgtaaagttcttgaatatacagcaggcaccgggttttttgtgtcgattgttgtaacacaggtttttgaccttttaatatgcaaaactcgtcgaaactcaatattgcaacaaggtatgggcaatcatgtacttaactttgctttggttcttgaattcatcattgcctgtctactttgctatgttccagtatttgaaaaaacattgagaatgtattccatcaaatttatttggtggatatatgcgttcccttttggtctattaattttcttttttgatgaaagtcgtcgatttctaataagaagaaatccaggtggatgggtggaacaagaaacttattattaatt

SEQ ID NO: 26430 - protein, 1009 aa, DROSOPHILA
MPPKKKNKEHKINGKEKKKDIQSFKKDVETDNHKIPVDELLERLKTDPNMGLSFVEAKLRLEINGPNILTPQPPTPKWIVFLKTMFGGFAILLWAGSFLCFVGYLIQLQTQHEPPDDNLYLGIALTVLVIVTGLFTYFQVHKSSSIMDSFKNLVPQYATVIREGEINTVTSDEIVKGDIVEVKFGDRVPADIRILEAHGLKVDNSSLTGESEPQVRSTEFTHENPLETKNLAFFSTNVLEGTCRGVVIATGDSTVMGRIANLAAGLDDVQSPISREIQLFIRFITIFAIILGLSFFAISLTLGYEFIDAVVFLIGIIVANVPEGLLVTVTVCLTLTAKRMASKNCLVKNLEAVETLGSTSTICSDKTGTLTQNRMTVAHLWYDQIIVESDTTESFRGSHFKIEDKSFNALFMCAALCNSAEFKGGQDDIPVFKKDVNGNASEAALLKFTETIFAGIGAFRQKHIKLTEIPFNSTEKYQVSVHEFNSSDGYFIVEMKGAPERILDRCSTIIIQGLSVELTPTLKLEFEEAYLEMGGMGERVLGFADLLLPMSKYPISYEFSADPPNFPLENLRFLGLISLIDPPRAAVPDAVAKCRSAGVRVIMVTGDHPITAKAIARSVGIITTPTAEDIAKQRGVTVLDIDSRQATAIVVHGGELREMKAEELDAVIYYHNEIVFARTSPQQKLIIVEACQRRGEIVAVTGDGVNDSPALKRADIGVAMGISGSDVSKQAADMILLDDNFASIVVGIEEGRIIFDNLKKSIAYTLTSNLPEIVPFLFFVIFDIPLALGTIAILCIDIGTDMLPAISLAYEKAESDIMARMPRDPFEDRLVNKKLILMAYLQIGVIQTVACFFTFFAIMAEHGFPPSRLKGIREDWDSKNVEDLEDGYGQEWTYRERKVLEYTAGTGFFVSIVVTQVFDLLICKTRRNSILQQGMGNHVLNFALVLEFIIACLLCYVPVFEKTLRMYSIKFIWWIYAFPFGLLIFFFDESRRFLIRRNPGGWVEQETYY

SEQ ID NO: 26431 - DNA, 3491 bp, DROSOPHILA
tactgcgtggtggcgacgctctcgacgttgaaattaacatgaacctacacacacacatacacactgcgtaatcgcgacgtcctcgtctagactcgctatctagaactaacgggatcaaaagcactgctgcttgcccgtgcgtatacattaagaataaagctttcatcattcttgatcttgacaccaaaccgagcagttgatttatttaaagtggcaaatatatataacctacatataagtacacaataaagtcattattgactcccatcacatcagcctgggcagcaactaactaagagtagagaaaggaggacccccgatccaacggaggcacccgtaactctcgcgcctccaacgtaacgattcacctgcccagatcccaagacctactgccatttagtacaactttataattaagtgagtggattaagatttgtaaacttattgttagtttctatatacctagagaagattcaataaaatttcaccacccctaaaaaaacctctcccccgaaacccccacgagcagtgacccatatatggaaagttcaacccgtacatagagcaacaaactaggaaagtcatcaaccaggattcagaattcgcagcagcaataaattgtacactgtacactatgctaatctggaagtattttgacagatccagttgatcaaggaaagactcttttcgatttaatttaaaacaaaaacctcaaagaactaccaggattgtaattgccacccctcgcaagatgttagtcttgcgcttaagtatactaatttgaaacgcctctctcacaaactttagaacatttttctattttagtattttcgattttagtattttccaatttcaaccgacataccaagagaattttttatttctgcttcccactacaactacctgttttataaaattcttaccaggggttagtgcaccttcgtgttttttaatttttttattaattcaaaatatatcaatatcggttatcaatttatagtgcttcatggaagaggttaaggaacacccatacgtcttagaatgtgaagccgctaagccactgatcgttgacacctttaaatttatgtacgacctggactttttgaatcctcaggcagacgaggtattgttaattttttcactttctaccaatacaacactacatttttttatttaacccaagcttaccactccaccactggcaatgccaaggctaccgcacgaagtcatctttgccataggcggctggagcggtggcacctcaaaaggttgcatcgagacttatgacacgagggcagatagatgggtaaccattaacgcagaggatcctgctggtccccgtgcgtatcatggaaccgcagtgctgggtttcaaaatattctcgattggcggatatgatggcgtagagtatttcaacacatgccgagtttttgacgcggtaaaaaaaaaatggaacgaaatcgcaccgatgcattgcaggcgctgctacgtaagtgtaacagagttaaatggaatgatatatgcaatcggcggctacgacgggcataaccggctgaacactgtggagcggtataatccaaggaccaaccaatggtccgttatcccaccaatgaacatgcaacgctctgatgccagcgcctgtactttgcaagaacgcatatatgctacagggggatttaacggccaggaatgcctagacagcgccgagtattatgaccctgtaaccaacgtttggactagaatacctaacatgaatcatcgtcggtctggagtgagctgcgtggcctttagaaaccagctttacgttatcggcggctttaacggcacagcgcgtctatctaccggagaacgctttgatccggacacgcaaacttggcacttcattcgtgaaatgaaccactcccgcagtaacttcgggctagagattattgacgatatgatcttcgctataggcggctttaacggcgtctcgacgatctctcatacggaatgctatgtagccgaaacagacgaatggatggaagccacagatatgaatattgttcgttccgccttgtctgccaataacatagctgggcttccaaacaagcgagactatatacacaaagagcgggatcgcctgatggaggagcggcgtcagcgtcttatggcaaccgccatggctcgggagaatgtaggacacggcaatgcctcgcagatgttagtggaacacaatgacggagccatggacgactacgaaagtcctgatgaagtagatgagactgatgagcaagagcaatcagcacgcataagccggactataccaccctctgtagggcttccaaacccagcagttgctgctgaaacgatacgagatcaatctcaattggtgtccactgctcaacttaatagagtaatggaggatcgcggtatggacaacaataggagcaatcgtgtgcaactgcgtaatcaacgccatggctcgcatcatgaaattcgtcgtcgtacataggagttagcgtcaaaatctggatcggataccaaaaaaaaacatattcttcataagagtgcagataaagcgttagcgtgtggcaagatttcttcatccttataaacccacgtccgttaaacccatttttcgaaacatttacacgaagaaaaaaacacaaggttaagtgtgcttttgccaatttaccaaattaacaatataagactcggaaatttcaattttaaattaaattatcaagaaattacacaatcaaaataactcaagttcacatctaaatttaacgcaatattttaaataaagcattactaatttgcagaaaaccactatgcacacaaaatattttattatttctttgttttcaccgttagcgatttgatatatctgacaccgaaaaagtattggtctgtaaaaaacaaaaaggtaaatgtccgcctatactttctccaatgaccgaaaatgatcttgctaaacatttaggttcgagacatgaaaaaagaaacaaagggaaatgaaatgatttctttcatttgtggctgtgcagctagaacaggcttttcccagggcatagttttccccgtgccacacagttagcaagcatcgataactatcgacgtcttacgaccgtacatacctacgatttctaataagcatgtggtgcgttcccttgtttaagtaaacgtaaatataattatggactaattctaacattgattgtcgtgtgcttttggaatagtcaaattagaatgtttaggaagcctctaaggtctagcaaacaccgtggtgactttccccgcaattggcggtgcttatgaagactgcactacatggacgtatttacatgcattgggttacctaatcctgaggagaaaagacgggatgtgcgaaccaaacgtgagtgtttcttgtatttccaacataccttttgcgacccaaatctagcggcagttaagctgcccgacgacgacaattcgggctctcggtttactccggcttgtttgacaag

SEQ ID NO: 26432 - DNA, 1431 bp, DROSOPHILA
tgcttcatggaagaggttaaggaacacccatacgtcttagaatgtgaagccgctaagccactgatcgttgacacctttaaatttatgtacgacctggactttttgaatcctcaggcagacgagcttaccactccaccactggcaatgccaaggctaccgcacgaagtcatctttgccataggcggctggagcggtggcacctcaaaaggttgcatcgagacttatgacacgagggcagatagatgggtaaccattaacgcagaggatcctgctggtccccgtgcgtatcatggaaccgcagtgctgggtttcaaaatattctcgattggcggatatgatggcgtagagtatttcaacacatgccgagtttttgacgcggtaaaaaaaaaatggaacgaaatcgcaccgatgcattgcaggcgctgctacgtaagtgtaacagagttaaatggaatgatatatgcaatcggcggctacgacgggcataaccggctgaacactgtggagcggtataatccaaggaccaaccaatggtccgttatcccaccaatgaacatgcaacgctctgatgccagcgcctgtactttgcaagaacgcatatatgctacagggggatttaacggccaggaatgcctagacagcgccgagtattatgaccctgtaaccaacgtttggactagaatacctaacatgaatcatcgtcggtctggagtgagctgcgtggcctttagaaaccagctttacgttatcggcggctttaacggcacagcgcgtctatctaccggagaacgctttgatccggacacgcaaacttggcacttcattcgtgaaatgaaccactcccgcagtaacttcgggctagagattattgacgatatgatcttcgctataggcggctttaacggcgtctcgacgatctctcatacggaatgctatgtagccgaaacagacgaatggatggaagccacagatatgaatattgttcgttccgccttgtctgccaataacatagctgggcttccaaacaagcgagactatatacacaaagagcgggatcgcctgatggaggagcggcgtcagcgtcttatggcaaccgccatggctcgggagaatgtaggacacggcaatgcctcgcagatgttagtggaacacaatgacggagccatggacgactacgaaagtcctgatgaagtagatgagactgatgagcaagagcaatcagcacgcataagccggactataccaccctctgtagggcttccaaacccagcagttgctgctgaaacgatacgagatcaatctcaattggtgtccactgctcaacttaatagagtaatggaggatcgcggtatggacaacaataggagcaatcgtgtgcaactgcgtaatcaacgccatggctcgcatcatgaaattcgtcgtcgtacatag

SEQ ID NO: 26433 - protein, 474 aa, DROSOPHILA
MEEVKEHPYVLECEAAKPLIVDTFKFMYDLDFLNPQADELTTPPLAMPRLPHEVIFAIGGWSGGTSKGCIETYDTRADRWVTINAEDPAGPRAYHGTAVLGFKIFSIGGYDGVEYFNTCRVFDAVKKKWNEIAPMHCRRCYVSVTELNGMIYAIGGYDGHNRLNTVERYNPRTNQWSVIPPMNMQRSDASACTLQERIYATGGFNGQECLDSAEYYDPVTNVWTRIPNMNHRRSGVSCVAFRNQLYVIGGFNGTARLSTGERFDPDTQTWHFIREMNHSRSNFGLEIIDDMIFAIGGFNGVSTISHTECYVAETDEWMEATDMNIVRSALSANNIAGLPNKRDYIHKERDRLMEERRQRLMATAMARENVGHGNASQMLVEHNDGAMDDYESPDEVDETDEQEQSARISRTIPPSVGLPNPAVAAETIRDQSQLVSTAQLNRVMEDRGMDNNRSNRVQLRNQRHGSHHEIRRRT

SEQ ID NO: 26434 - DNA, 9194 bp, DROSOPHILA
ttccaggatttcgtcggagtcctgcttctcgatgaagtgaggaatctcaccgcgatccgacttgggtgaggcttttagcttcataatcttctgctgctcgccgagaacgattttctcgtccttcttcagggtgatcctcttaatgttcagccgtttcttctggcgctcggccagactcttcagcttcttcatgatgtcgaatccttgcttgggtttgctggacttcggaggcttatcggcgttgggaattagggatcccggcggcggggctagttcgtgaacgctgctctgtcgactgggattagcggagttgccgggcagtgactgggcgtcctcgtgggtgcgtccgctgcgcctgcgccgtatgaggtcacggatgtgggccagccgattcgtcttacgtggtcgggcgtgtcctccaaccgctagcacggagtcggaaacacaggagatgcactcactcagagcgtcttcgttgtgctgatcacgttccgattcggtctctgaatcggaggactcttcgctgctgtcgtcggtggttgtggctaccgcctcgtcctcggaaaggtcctgtatgtagcgttcggtctccttcaccaacacctgctcgtcgtagcgtacctttttcagggacttgggagactcggacttgaaacgcagttcctgggactttcgcaggagcagcacaatttccggctgctcatcgggtcccagtgggcgtttgtacaaatgtgtccagggatagccgccctgtggagaaacaacaattagttataaaactgtgaccatgaaatcttggcatttgtctatttcaattaaacgaaatccttaaatgtcactttcctacattcaaatattttatagctttgatacggaatttttctgttcgaaaaagaaaagcgccaaaagtttcgaaacctcaaaaataaatttacttgtaccatatttctaaaattattttgcatgagtaatgctgttttatgaaacgtagaaaagaacacaaaaattgtattcaggaaatcataaattgtttttcagggtcttgaatttacaagtggatcgtttttccatcacgaaccgcattggataaaaaattctttcatttaaaaaaaaattaaatccatctttataactcacccgttccttggctcgtttgaggtcctcccagcgatatgtttgcagtggcactggcggcttctcctggctgctgtgcaggaggtacttcttcagcgattggtagtactccctcttgcagtctgccgatagtttttgagcatccgtctcctcggatccactgactccctgcaggcgattctgctcgatttggggcagtgagtcgatgaactccttgcgttcctgttcctcagcctcagttttgggagtgggtacctccacgagcttcagttcactgggagcagcgacaaatggcttcggcttctgctcctcctcctcctccgccggcagttccaagacaatctccgcctggggcttgtttttaaggataccggtcagctcattcaactggacttcgacctgttgagtgagtgcgctgatctcgtcgcgatctcgctggacctgatcctcgtgcacgcgctgcgcctcgtctacatcccggctgagtgcctggatcagctcctgttcgatctcatccaccagctgctcggcagtgcgacgtacttcctccgacggagtggccgtctcgtcaacctcggcgatttgatgtgccggcggtgagatttccacaggctgtttggtcctaacaccagctggttctacctctatgactgggtctgtgtcattggtgcccgccttggaggtgccccgctgcaattcttgctcgaacggagttagttccctgatcccaacgccactggcctcgtcggcaatgctctcgatgagatgcgactcgaagtccaggagatgcgagccacccggagtggtgggaacttggtgtggctgggctggtgctggtgctgttgcctcgctgttgttgttatcgagagctaactttaaggcggctgctttggactgcttatcctctagctgggaatcgctggcgatgccgttgatcagtagtatggtcggctgctcagtggggccagttccagcgccaggtagcgacactacataaaaaaaaaatggggtggaagtaacaggtggaaaggtgagtaaatgaggtgtttacactttgccagcaacaggtgctaaaaataagcgcaatcggcggacactagacaagacacaattacataagtcgcaaatcgagaaatgtgggagacaacacacaacatcgcgatgtggtggacatataaacattctcatgaagaatacgctctatttcgatttcgaaagctgcaattacgaaatacgaatataatgtagtgatgcatagcagttcctttaccacaattgatcaactagtttggtttcgattccaggcggatttcctttcgttttttttcgttggtttgttcgttttcggttgtcttttgattttcgaaaattaaaatcaatcgaatggatggattttctatacaaatatctcggttatcagcgcaattcgctcggcacacgagccgtgcattcaaattgtccggggccaactggcccgtccaaacggatttttcgcacagcaaagcccaccgagaataatacaaggaaaattgtcgagagaccaccagagaccaattttccttggcgttacgctcaattgttttgctttcaaaatacttatacttatgtttagcaaattttgtttttactattcctcgctcgcattctctcgcgattttttttttttttggcttttcctttagtttttctttggcttggcttggtccgagaaaaatagttgcgcacacacaaccagtcgtaaacaatttgcagtttttacacatatattatcgttaatttagcacaccgcagataaacaagagcacctagagaaaccaaaaccaaaaactagacccgcaaaaaccaaaagtaaatttcgttttacattcatgcgccgaacacaatactcgatgtgtttttacattcaacaacaattattgtttgcctttagttgctatatatctataaggtatgtagctatatattggtaaatatgcgatggagtctaaggtaatcacataaaaaattacaagcccacgaaacttaattgtttgtacaaaattgaaattcgccttccgttacgttaatttctggttttgcttttggatgattggggaactttatcgatatggtggggttatacaagaaaatttcattcattataatgcaatttgccatatcatgacaaatcgctttaatcatttcccatatgcggtaagtgagctaagaatcttggctaaaaaaattgttttcctttcgtgtgtgacatcatgtcaaaaataataccaatctggcaaatgtttaagtgggtaataataggaaattattaggatgccttttgcatactaagctctatgatctaagatcaaatgtttataggaaaagatggacaaataaaattattatttacaaacatcgccatattgtttacttttaaaacttacacaatcaaaactattaactataaaggaaatgtacctttattataaaataaaattgatgatgtttgtgctcggtgttaccaaagtgtttgtctattaaaatcagaagtgatatctcacttcgaagtttccccaacctaaacaacttcttgaataacaatgcctgactattccgtttgatcttttcgtattcaatcatctgtacttattcaccctggagcccattgcatatttgttcagttgtttctgtaaacaaccacgtgtgtggatggatttaccataacaattcgagcgtaactgccttggctcgtcttgctttacatggagatccactgttcgcagttgagtgagttcgatgcgttgattttcctcaaaatcaacttttcatacacaaatgaacatggacaactgcctccgggagcattcgcctcctgctgctcccccacttccatacattgggagtcaatctgtacccgtatccgaatcacggacaagttcatgaacactgtcgccgctgaactttacccatgaattcgtgaacagacagataaagagctgggaaattcgaagcggggtgagttggagtagaacccgctgtgcttatgcggcgtatacgtaatgcgcgtgcggggatacatgaactctaaaaatagtcgaacctaggaaccattacactgttgtcactttattgccgaaccctgaaccatcagtaccgtcgaattgcgtaacatgcaaatcaattaagttctcgccggctgggcgggctcactcaccataattgccagcgacactgaggaaaacataaaccatagtcgtaggaactttcagttagtatcattggttgctccggttaaaaattgtattaaatttattaagaaacaaaaaaaataataatttgaaaaaaaaccgaaaagaaaagagtattatatgtgtacgccgcctgagcctcacatgttcgacgtctaatcgcgttttgaatactagcaagtaaaaaaacgcgaagctgacaacaaaactagctaaaagttgtggcagcgccgccggcagcgaacttgtcgctgacgttgaagctttgacgttgctctcgaatcgtgaaaacgtgaaatgctgattgaaatgcgagagaagagaccggggtacaccgcctcctccgccaccgactggtgctcctcctcctactcctcctcctcgaagggatccatcggcgtgttgcactttcgccactggttgcatgcgaatgcggcgacgtcaaacgctcaaggtcgcctttgcaaccgggcgctctccactatatttagaatcatttaagcgtaacgcactcaagggccaacgagccaagttattaatgagtggtttcttattgctaccaaccagagcacttagccaatcaattctttagcttagagaccgaaggaaaaggtgttcctaggatctttcaattaagaaaaaaaattggataagcttctagttgcatgttcgacaacaatttcctactcttaatttcatgtgcaatctttggaatagaatcaaatatgtataaaatatcaaaagatagtattaaaaagatacacagatatctatatttttggtaaatattagataattccaatccaatgtatccgctcatggtgttcggttgaaagcaatattttgtggccatcgctgagtgaatgttaatgaatgagcgaaaatgttgagaaactggcacacggtgcgtatgcgttatgcggattcaggtcgccgtcccggctaaatattttgtgttttttgttttttgtttttgcccggccaatttctgcttgttgtgaaaataaattctgatattctggtgacacaattgcaaattgcgagttcattggacggcctaattattccaagcgaacgcaaatcgacgaaactaaaacggaaattgccgtgcctaattgatttccagtttcagtttcagcaattcccattttccatattttcattgcactttaatggctgggccaacggcccacgcaaatgctttcggtttttgaccttgactggtcagatattgaattatttatgtatccataaatatagttcagggaaaacagtggcataaagtatatatacatatatacatacattttggctttccttcatattgacgattagttccaaactgaaataaaaataaaccgacggcgagcgacaacaaaaacgaagacgacgtcaacgtcaacgaaacgaaagcgacggagcagaaatccaatcaagaagtcaaacaggcacagaatataacgtatacgtataggtggcccacatgagacagagagacagttcgaatgggttgaagaaatcacggcacaaactaagcacttaacttagaggcaaaagttaaggaacttgtgccacaacacaaacacgagcaccactcataaataatgaaagtacggacaagaatgagtagttgccacaaaaaagtgagtacaattccgatgagcctcgtcgcacaaccgatgaaaatgagatgcagactatcccgagacaatgtaaacaatggcggtgcacacaatccgggcaacatgttgccagagaaaatctcttgaactctttattttgtgaatgaaaatggttcggacagcacaagacgaggatatatatacatgtacatatatatatatatatcttatgggaaagggtggaaaatcttttaccaatcactggtgccatgcaggtcaggaagcgggtcagtgctgtgcccgtgctgggaattgccctatttgcttggggactctttgccgaagggtctgcaattaggttaaagttagttttaatactagtttttattagtctggcggtggtcatgtgatggtatgtggcttgttgctaattggaaatcaatcaaaccaccattaggcggctacttcgttttccgcaaactcctccaaccgatcaaagatcagtttctctgccaattaccggcaattttcacctattctgagtcattggttccattcgccatgctaatcaatgggcgaaatgttctatggcttatggtggttatgagatttttttactgacattttgtgttgaatattttagcacatttggcttaatagcatttcactactcgtttctctattgcatgatttatcaataaattataccaaagtagctgcaatatcaaattgaagggtaggagcttattgatttatgatttcaatacaataatcatacggtgcctgctaagaatagcagttgacttcataattgactgatgtctagagccataatgaagtattaatgcagggacacatggaaaatttactaactttgtacttcgattcagagaaaatttagtttaatatccaatattttactatatattccaatatatctaaatggttgaggggcagtttcccaagacactcaaagtgcaaagatcatggcgtcataaataatacaccagcttacgtaacaaatgctttagttatcaacaaggttgttaaatagataaaggcagcacagcagtgttttcttttttttgtcaagccctcgataagatagcgtagccatatgtttagagccccatcatcatatgaccaatgtgacgttctatgaacggtctacgtgctctggtcccagtgtgcagggatcttgaacttgggctatttgctgctttaattgccattatactaaatattcccgtcaagtggcaatcagagcagcgcagactgcattcttcagagataagaactcatttgctaggccgtctgaaaacggaaagtcaaacgggtcttgttcgcttttattgtttggcaataagcttaaaatttattgcgcttttttcactttcatcagccataataataggggccagaatagcggaaaactgcccatagatcacgttcattctctggctaaattcaatcatgatcgttgcaacggctagcggtactctacagaaaaaaacccggagatgaggtggatggggtggcgtataaccggtttgttcattcacatggccagatccacgcccattgtgcttagcaaacagaagatgccgctaacacggacccacttgatggaactcggtattcagttcgtctagtctggctatctactatctgaatgccaggcagttcacaagatgccgaaatccataagcaaacttgtgggaaaacctagatttttccaatgcagaactttatatgctcttgcgaaggtcaagtattttgactaataaaaacaatgtggtggctattgaaatagaaaattcttttcaaggatttacaagccctatttaagttaatggaaagaaatcttagcatcaacaaaatatcattatttaaacgtttcaaaacattgtgttttatatgcatttttttttgttttttgtctgttgttttagattgctagaaaaaatagaccatagaccgtagactaagtggagaacccaaagttcttttgtttttccaacgttctgcatgtcaagttgatccagctagcgttttagtactaccccaatggccagacaattgtgtgatattagtggccattgcatttgattgccgatttccgttggaatgggtctggggtctgggtgtgggaactttggagtcggtccgtgcatacgagggcatagttggggaaccgcctctacgctgcggcgccaaaacagagaacttgtcatagtttttggctgccgttcaacttggcaggcaatcataagtaatgttcttgctacccagcacatgtgtacatatgtgtactatgtagttctcggagccccacagcattcaacttgttctatattcgtcaacgactcattacaggcgatgcgacacagcgcccacgcggcgtatgcgtaatgcgcggctaatttgtggggcagatgcgaaagtgggttgcaagttgaccccagatttaccttggatggccctaccttcgtcccagggatgatggtgatgtggctgctgctcctgctgttggttagatggatgctcggactcagatggccgagatttgcgtccttttttcgagcgtttcgactccatttttgcggatgcggttgctggctaagatttactttttggctacaagacacgcgcgtaaatagaatattatatatttttatgtcgtatatcgggctgtgtgtgcgttttttatgtgctcgtggtttatcttattcagtgacgcacacacaagtgacatttggcaaacacacacaaaatcccgcactctgtcgcgttttttcgaactttgcgtattttttgtcgcttcgattacttggcgcgtccgcagcgaaacacgtatatatgtgtatatatctctttggcttcaatatatattttagatttaaaaatttcccaagttatttataatgcggtgatttaatttaacacacactcggccacttttcatattccttacttgccaaaaaatcacgagaaatggcgacagcacttgcttcacccctcagtacgatatattccaaaaaaatttaattataaaattaaattgtatgggcattacgtgacaacgcgaagtttgaattcgaggctcatggaggaggtggggtaaaagctctaactttaacgattattacggataatgatgagttttcctcccaactgccgccgttaaactgatgaactgctggacaaggaa

SEQ ID NO: 26435 - DNA, 2074 bp, DROSOPHILA
gaaaactcatcattatccgtaataatcgttaaagttagagcttttaccccacctcctccatgagcctcgaattcaaacttcgcgttgtcacgtaatgcccatacaatttaattttataattaaatttttttggaatatatcgtactgaggggtgaagcaagtgctgtcgccatttctcgtgattttttggcaaccaaaaagtaaatcttagccagcaaccgcatccgcaaaaatggagtcgaaacgctcgaaaaaaggacgcaaatctcggccatctgagtccgagcatccatctaaccaacagcaggagcagcagccacatcaccatcatccctgggacgaagacccttcggcaaagagtccccaagcaaatagggcaattcccagcacgggcacagcactgacccgcttcctgacctgcatggcaccagtgattgtgtcgctacctggcgctggaactggccccactgagcagccgaccatactactgatcaacggcatcgccagcgattcccagctagaggataagcagtccaaagcagccgccttaaagttagctctcgataacaacaacagcgaggcaacagcaccagcaccagcccagccacaccaagttcccaccactccgggtggctcgcatctcctggacttcgagtcgcatctcatcgagagcattgccgacgaggccagtggcgttgggatcagggaactaactccgttcgagcaagaattgcagcggggcacctccaaggcgggcaccaatgacacagacccagtcatagaggtagaaccagctggtgttaggaccaaacagcctgtggaaatctcaccgccggcacatcaaatcgccgaggttgacgagacggccactccgtcggaggaagtacgtcgcactgccgagcagctggtggatgagatcgaacaggagctgatccaggcactcagccgggatgtagacgaggcgcagcgcgtgcacgaggatcaggtccagcgagatcgcgacgagatcagcgcactcactcaacaggtcgaagtccagttgaatgagctgaccggtatccttaaaaacaagccccaggcggagattgtcttggaactgccggcggaggaggaggaggagcagaagccgaagccatttgtcgctgctcccagtgaactgaagctcgtggaggtacccactcccaaaactgaggctgaggaacaggaacgcaaggagttcatcgactcactgccccaaatcgagcagaatcgcctgcagggagtcagtggatccgaggagacggatgctcaaaaactatcggcagactgcaagagggagtactaccaatcgctgaagaagtacctcctgcacagcagccaggagaagccgccagtgccactgcaaacatatcgctgggaggacctcaaacgagccaaggaacggggcggctatccctggacacatttgtacaaacgcccactgggacccgatgagcagccggaaattgtgctgctcctgcgaaagtcccaggaactgcgtttcaagtccgagtctcccaagtccctgaaaaaggtacgctacgacgagcaggtgttggtgaaggagaccgaacgctacatacaggacctttccgaggacgaggcggtagccacaaccaccgacgacagcagcgaagagtcctccgattcagagaccgaatcggaacgtgatcagcacaacgaagacgctctgagtgagtgcatctcctgtgtttccgactccgtgctagcggttggaggacacgcccgaccacgtaagacgaatcggctggcccacatccgtgacctcatacggcgcaggcgcagcggacgcacccacgaggacgcccagtcactgcccggcaactccgctaatcccagtcgacagagcagcgttcacgaactagccccgccgccgggatccctaattcccaacgccgataagcctccgaagtccagcaaacccaagcaaggattcgacatcatgaagaagctgaagaaaggacgagaaaatcgttctcggcgagcagcagaagattatgaagctaaaagcctcacccaagtcggatcgcggtga

SEQ ID NO: 26436 - protein, 613 aa, DROSOPHILA
MESKRSKKGRKSRPSESEHPSNQQQEQQPHHHHPWDEDPSAKSPQANRAIPSTGTALTRFLTCMAPVIVSLPGAGTGPTEQPTILLINGIASDSQLEDKQSKAAALKLALDNNNSEATAPAPAQPHQVPTTPGGSHLLDFESHLIESIADEASGVGIRELTPFEQELQRGTSKAGTNDTDPVIEVEPAGVRTKQPVEISPPAHQIAEVDETATPSEEVRRTAEQLVDEIEQELIQALSRDVDEAQRVHEDQVQRDRDEISALTQQVEVQLNELTGILKNKPQAEIVLELPAEEEEEQKPKPFVAAPSELKLVEVPTPKTEAEEQERKEFIDSLPQIEQNRLQGVSGSEETDAQKLSADCKREYYQSLKKYLLHSSQEKPPVPLQTYRWEDLKRAKERGGYPWTHLYKRPLGPDEQPEIVLLLRKSQELRFKSESPKSLKKVRYDEQVLVKETERYIQDLSEDEAVATTTDDSSEESSDSETESERDQHNEDALSECISCVSDSVLAVGGHARPRKTNRLAHIRDLIRRRRSGRTHEDAQSLPGNSANPSRQSSVHELAPPPGSLIPNADKPPKSSKPKQGFDIMKKLKKGRENRSRRAAEDYEAKSLTQVGSR

SEQ ID NO: 26437 - DNA, 5516 bp, DROSOPHILA
ttccaggatttcgtcggagtcctgcttctcgatgaagtgaggaatctcaccgcgatccgacttgggtgaggcttttagcttcataatcttctgctgctcgccgagaacgattttctcgtccttcttcagggtgatcctcttaatgttcagccgtttcttctggcgctcggccagactcttcagcttcttcatgatgtcgaatccttgcttgggtttgctggacttcggaggcttatcggcgttgggaattagggatcccggcggcggggctagttcgtgaacgctgctctgtcgactgggattagcggagttgccgggcagtgactgggcgtcctcgtgggtgcgtccgctgcgcctgcgccgtatgaggtcacggatgtgggccagccgattcgtcttacgtggtcgggcgtgtcctccaaccgctagcacggagtcggaaacacaggagatgcactcactcagagcgtcttcgttgtgctgatcacgttccgattcggtctctgaatcggaggactcttcgctgctgtcgtcggtggttgtggctaccgcctcgtcctcggaaaggtcctgtatgtagcgttcggtctccttcaccaacacctgctcgtcgtagcgtacctttttcagggacttgggagactcggacttgaaacgcagttcctgggactttcgcaggagcagcacaatttccggctgctcatcgggtcccagtgggcgtttgtacaaatgtgtccagggatagccgccctgtggagaaacaacaattagttataaaactgtgaccatgaaatcttggcatttgtctatttcaattaaacgaaatccttaaatgtcactttcctacattcaaatattttatagctttgatacggaatttttctgttcgaaaaagaaaagcgccaaaagtttcgaaacctcaaaaataaatttacttgtaccatatttctaaaattattttgcatgagtaatgctgttttatgaaacgtagaaaagaacacaaaaattgtattcaggaaatcataaattgtttttcagggtcttgaatttacaagtggatcgtttttccatcacgaaccgcattggataaaaaattctttcatttaaaaaaaaattaaatccatctttataactcacccgttccttggctcgtttgaggtcctcccagcgatatgtttgcagtggcactggcggcttctcctggctgctgtgcaggaggtacttcttcagcgattggtagtactccctcttgcagtctgccgatagtttttgagcatccgtctcctcggatccactgactccctgcaggcgattctgctcgatttggggcagtgagtcgatgaactccttgcgttcctgttcctcagcctcagttttgggagtgggtacctccacgagcttcagttcactgggagcagcgacaaatggcttcggcttctgctcctcctcctcctccgccggcagttccaagacaatctccgcctggggcttgtttttaaggataccggtcagctcattcaactggacttcgacctgttgagtgagtgcgctgatctcgtcgcgatctcgctggacctgatcctcgtgcacgcgctgcgcctcgtctacatcccggctgagtgcctggatcagctcctgttcgatctcatccaccagctgctcggcagtgcgacgtacttcctccgacggagtggccgtctcgtcaacctcggcgatttgatgtgccggcggtgagatttccacaggctgtttggtcctaacaccagctggttctacctctatgactgggtctgtgtcattggtgcccgccttggaggtgccccgctgcaattcttgctcgaacggagttagttccctgatcccaacgccactggcctcgtcggcaatgctctcgatgagatgcgactcgaagtccaggagatgcgagccacccggagtggtgggaacttggtgtggctgggctggtgctggtgctgttgcctcgctgttgttgttatcgagagctaactttaaggcggctgctttggactgcttatcctctagctgggaatcgctggcgatgccgttgatcagtagtatggtcggctgctcagtggggccagttccagcgccaggtagcgacactacataaaaaaaaaatggggtggaagtaacaggtggaaaggtgagtaaatgaggtgtttacactttgccagcaacaggtgctaaaaataagcgcaatcggcggacactagacaagacacaattacataagtcgcaaatcgagaaatgtgggagacaacacacaacatcgcgatgtggtggacatataaacattctcatgaagaatacgctctatttcgatttcgaaagctgcaattacgaaatacgaatataatgtagtgatgcatagcagttcctttaccacaattgatcaactagtttggtttcgattccaggcggatttcctttcgttttttttcgttggtttgttcgttttcggttgtcttttgattttcgaaaattaaaatcaatcgaatggatggattttctatacaaatatctcggttatcagcgcaattcgctcggcacacgagccgtgcattcaaattgtccggggccaactggcccgtccaaacggatttttcgcacagcaaagcccaccgagaataatacaaggaaaattgtcgagagaccaccagagaccaattttccttggcgttacgctcaattgttttgctttcaaaatacttatacttatgtttagcaaattttgtttttactattcctcgctcgcattctctcgcgattttttttttttttggcttttcctttagtttttctttggcttggcttggtccgagaaaaatagttgcgcacacacaaccagtcgtaaacaatttgcagtttttacacatatattatcgttaatttagcacaccgcagataaacaagagcacctagagaaaccaaaaccaaaaactagacccgcaaaaaccaaaagtaaatttcgttttacattcatgcgccgaacacaatactcgatgtgtttttacattcaacaacaattattgtttgcctttagttgctatatatctataaggtatgtagctatatattggtaaatatgcgatggagtctaaggtaatcacataaaaaattacaagcccacgaaacttaattgtttgtacaaaattgaaattcgccttccgttacgttaatttctggttttgcttttggatgattggggaactttatcgatatggtggggttatacaagaaaatttcattcattataatgcaatttgccatatcatgacaaatcgctttaatcatttcccatatgcggtaagtgagctaagaatcttggctaaaaaaattgttttcctttcgtgtgtgacatcatgtcaaaaataataccaatctggcaaatgtttaagtgggtaataataggaaattattaggatgccttttgcatactaagctctatgatctaagatcaaatgtttataggaaaagatggacaaataaaattattatttacaaacatcgccatattgtttacttttaaaacttacacaatcaaaactattaactataaaggaaatgtacctttattataaaataaaattgatgatgtttgtgctcggtgttaccaaagtgtttgtctattaaaatcagaagtgatatctcacttcgaagtttccccaacctaaacaacttcttgaataacaatgcctgactattccgtttgatcttttcgtattcaatcatctgtacttattcaccctggagcccattgcatatttgttcagttgtttctgtaaacaaccacgtgtgtggatggatttaccataacaattcgagcgtaactgccttggctcgtcttgctttacatggagatccactgttcgcagttgagtgagttcgatgcgttgattttcctcaaaatcaacttttcatacacaaatgaacatggacaactgcctccgggagcattcgcctcctgctgctcccccacttccatacattgggagtcaatctgtacccgtatccgaatcacggacaagttcatgaacactgtcgccgctgaactttacccatgaattcgtgaacagacagataaagagctgggaaattcgaagcggggtgagttggagtagaacccgctgtgcttatgcggcgtatacgtaatgcgcgtgcggggatacatgaactctaaaaatagtcgaacctaggaaccattacactgttgtcactttattgccgaaccctgaaccatcagtaccgtcgaattgcgtaacatgcaaatcaattaagttctcgccggctgggcgggctcactcaccataattgccagcgacactgaggaaaacataaaccatagtcgtaggaactttcagttagtatcattggttgctccggttaaaaattgtattaaatttattaagaaacaaaaaaaataataatttgaaaaaaaaccgaaaagaaaagagtattatatgtgtacgccgcctgagcctcacatgttcgacgtctaatcgcgttttgaatactagcaagtaaaaaaacgcgaagctgacaacaaaactagctaaaagttgtggcagcgccgccggcagcgaacttgtcgctgacgttgaagctttgacgttgctctcgaatcgtgaaaacgtgaaatgctgattgaaatgcgagagaagagaccggggtacaccgcctcctccgccaccgactggtgctcctcctcctactcctcctcctcgaagggatccatcggcgtgttgcactttcgccactggttgcatgcgaatgcggcgacgtcaaacgctcaaggtcgcctttgcaaccgggcgctctccactatatttagaatcatttaagcgtaacgcactcaagggccaacgagccaagttattaatgagtggtttcttattgctaccaaccagagcacttagccaatcaattctttagcttagagaccgaaggaaaaggtgttcctaggatctttcaattaagaaaaaaaattggataagcttctagttgcatgttcgacaacaatttcctactcttaatttcatgtgcaatctttggaatagaatcaaatatgtataaaatatcaaaagatagtattaaaaagatacacagatatctatatttttggtaaatattagataattccaatccaatgtatccgctcatggtgttcggttgaaagcaatattttgtggccatcgctgagtgaatgttaatgaatgagcgaaaatgttgagaaactggcacacggtgcgtatgcgttatgcggattcaggtcgccgtcccggctaaatattttgtgttttttgttttttgtttttgcccggccaatttctgcttgttgtgaaaataaattctgatattctggtgacacaattgcaaattgcgagttcattggacggcctaattattccaagcgaacgcaaatcgacgaaactaaaacggaaattgccgtgcctaattgatttccagtttcagtttcagcaattcccattttccat

SEQ ID NO: 26438 - DNA, 1826 bp, DROSOPHILA
acgtcgaacatgtgaggctcaggcggcgtacacatataatactcttttcttttcggttttttttcaaattattattttttttgtttcttaataaatttaatacaatttttaaccggagcaaccaatgatactaactgaaagttcctacgactatggtttatgttttcctcagtgtcgctggcaattatgtgtcgctacctggcgctggaactggccccactgagcagccgaccatactactgatcaacggcatcgccagcgattcccagctagaggataagcagtccaaagcagccgccttaaagttagctctcgataacaacaacagcgaggcaacagcaccagcaccagcccagccacaccaagttcccaccactccgggtggctcgcatctcctggacttcgagtcgcatctcatcgagagcattgccgacgaggccagtggcgttgggatcagggaactaactccgttcgagcaagaattgcagcggggcacctccaaggcgggcaccaatgacacagacccagtcatagaggtagaaccagctggtgttaggaccaaacagcctgtggaaatctcaccgccggcacatcaaatcgccgaggttgacgagacggccactccgtcggaggaagtacgtcgcactgccgagcagctggtggatgagatcgaacaggagctgatccaggcactcagccgggatgtagacgaggcgcagcgcgtgcacgaggatcaggtccagcgagatcgcgacgagatcagcgcactcactcaacaggtcgaagtccagttgaatgagctgaccggtatccttaaaaacaagccccaggcggagattgtcttggaactgccggcggaggaggaggaggagcagaagccgaagccatttgtcgctgctcccagtgaactgaagctcgtggaggtacccactcccaaaactgaggctgaggaacaggaacgcaaggagttcatcgactcactgccccaaatcgagcagaatcgcctgcagggagtcagtggatccgaggagacggatgctcaaaaactatcggcagactgcaagagggagtactaccaatcgctgaagaagtacctcctgcacagcagccaggagaagccgccagtgccactgcaaacatatcgctgggaggacctcaaacgagccaaggaacggggcggctatccctggacacatttgtacaaacgcccactgggacccgatgagcagccggaaattgtgctgctcctgcgaaagtcccaggaactgcgtttcaagtccgagtctcccaagtccctgaaaaaggtacgctacgacgagcaggtgttggtgaaggagaccgaacgctacatacaggacctttccgaggacgaggcggtagccacaaccaccgacgacagcagcgaagagtcctccgattcagagaccgaatcggaacgtgatcagcacaacgaagacgctctgagtgagtgcatctcctgtgtttccgactccgtgctagcggttggaggacacgcccgaccacgtaagacgaatcggctggcccacatccgtgacctcatacggcgcaggcgcagcggacgcacccacgaggacgcccagtcactgcccggcaactccgctaatcccagtcgacagagcagcgttcacgaactagccccgccgccgggatccctaattcccaacgccgataagcctccgaagtccagcaaacccaagcaaggattcgacatcatgaagaagctgaagaaaggacgagaaaatcgttctcggcgagcagcagaagattatgaagctaaaagcctcacccaagtcggatcgcggtga

SEQ ID NO: 26439 - protein, 557 aa, DROSOPHILA
MVYVFLSVAGNYVSLPGAGTGPTEQPTILLINGIASDSQLEDKQSKAAALKLALDNNNSEATAPAPAQPHQVPTTPGGSHLLDFESHLIESIADEASGVGIRELTPFEQELQRGTSKAGTNDTDPVIEVEPAGVRTKQPVEISPPAHQIAEVDETATPSEEVRRTAEQLVDEIEQELIQALSRDVDEAQRVHEDQVQRDRDEISALTQQVEVQLNELTGILKNKPQAEIVLELPAEEEEEQKPKPFVAAPSELKLVEVPTPKTEAEEQERKEFIDSLPQIEQNRLQGVSGSEETDAQKLSADCKREYYQSLKKYLLHSSQEKPPVPLQTYRWEDLKRAKERGGYPWTHLYKRPLGPDEQPEIVLLLRKSQELRFKSESPKSLKKVRYDEQVLVKETERYIQDLSEDEAVATTTDDSSEESSDSETESERDQHNEDALSECISCVSDSVLAVGGHARPRKTNRLAHIRDLIRRRRSGRTHEDAQSLPGNSANPSRQSSVHELAPPPGSLIPNADKPPKSSKPKQGFDIMKKLKKGRENRSRRAAEDYEAKSLTQVGSR

SEQ ID NO: 26440 - DNA, 23307 bp, DROSOPHILA
ttatatggtatttgtattcggcaaacaagtataccctgcaggatccgaagacaaaaccaattagccaaatatcttaccaccaagcaaaatcatttttattctctgcaaattaaatttctttaaatgggaagtccattaatcgaatggtaatttgtatatatttttcgagaatatttggttcggcacggaagcataattatattaactatttttttcttttgcgtgcacaacatagacttccatattttcgctttttatttttcccctagcgaaaatttaggatttctctgaaactattaatttttaggctcccaaacaaaagtcaatcgaaaaagaatgctagaaaatggcaaaaggtggtatacgagttccatgtacagtgcattgaattcaatatacgacctttaatgcctgactatttatctgacgatggtacacgtataacggctaaggtgttttcatatggcttcatacatacatatattaagttgatagttttaaaaaattatgtttattttcgctttcttttctttcattataatttacaagtttgttggttgcgtataaatatgttcttccttctctcattaaatgatgctgcactagttttgtttgttgtctcttttaatatgtatataatatataaatatgctttaagtggtgtttgtgtgtttaagtttccttcagttaagagcaatagggttctgaggggtattgatagtggtagtgattttggggagctttcattccgactcccttcacaagacaccaacgggaggagctgccctggctgtgagtgattctggcttgagtcgccgtgtcgtttctagtcgttttgaattacgtttgaattttcttttcttttttatttataatagcattaattaataatataattaataattataataatttatataataaacgcaaaattggtaaataataaaaataataataaaatacaatcattacaataattaatcaaaattggtttcattttgtttgtttttactgttttttagtgtatttaatgtgtacggggttcatttgttttgtttttgttttgttgggtttcgtttaatattttttttgttgctttctgcattttgcatctggctttatatttatataaattacaacggaagtgtcggtgtgtttgtagttggtgttggcgtcaacatcgacgcggatggaggataacgcaacgtatgctgcgacgttgcctgctggatataatcctgactcggattattcaatacgctatcccgtgagtttgaatgtgaagtggcacgcagcagggtgactgcctcgcgttctggactacattgtacaccgtctagtcatttttggcgcgtcgatttcttcttctttcgtttaaagaaacaacaacatctggaatataaggaaccactggagacagttaaccaagggacagaaacgatacggattcggattcggatacggattcatagggggagacgtaggcataggcagaggcagtggattggtcgggggagaaagagaaagagagaacggaaaacggaagttgcgcattaaaaacgacaaagcaaaaaattctttaaatatctagtggatctgttaatcaatgtatcgatatatctattaagactgcttacgacataatctaaaacaaataacacatccacaaaagaaatgctatgaatttttttaaatttacatgtaatacgctacaatcatgtctctaaaattccctgttcttttataaagaagtttattttgtacaatgttttctctacacaaaagacaatttgttccgcaacacatctatcacttagctacatatcgatataccgattaattgatcccctgagtaacacatactttgtttcatcgaccacttcgacttccggctgctgtgtgatgggcgtgtttgagtgtccggccgtgggatcgtccggatttagttcgccattcgtcgaactcacaacctgcaaaggagtgtcaaagaaaaaagaaaaggcattgcaattgtaatattaatttccattcgttattaacttttgtactaaacatatagtacgagtatgtacaataagaagtgattatacaatataacgatttaaaccgcttttttaattactaatcaaaaaagaaccagtttaagtacagtcgatttaaaagtatcgattggattggcagtacagacatcacacagaacaaaactgttatacaaacaacgactttcttggcagcactacaaagccaagtagactacgaatgaaaaatttgtaattttgaaatttcaatagaaagaatttataaatatgtagacctatttcggagattgcccggattgtcaggacgtttggcagatcacacatttagatgatgaatgggtacagaacaagatcagaggactaggacagacaagttatatttcaaataccttggaaagcctattttaaaggaaagtaaacagggtttgtcttatgtcttatgtcgtttaaatttaaaaagaagctgtagatgtggtatttgggagaatagtagaagtgttggtggttcgttggtgtcctatttcttagggtcgtcttcgggatcgcttttctcatagtaagcatcaaaggggctatcatcatccgagcttgaatcttcaggcaatctctgtaataagttgggttttggtttcgaatttgattcgatgcatcaaaattggtcttttcggcttgaaataaatgccaatgatttcactttatgaaaaatgaatttcctccagccgaatctatttattgttataacactgcggatatgtaaagtgatccatgcgtctctagaatagtgtaatgtattgtgtggcatgcagtcaataacatatactgctaagaagttgtgttggttaatgcactgttaaaacttgcattagtaccgtgcacaagtagagaaaggctacgtttcttctttgttattcatgcagattttataaggatcctctagcatcaatcttttcaataaaaggaatacttaatacttcaaaaataaaagaggaagatccgagaaaaacacccaagaagaaactaacaaaacgtgttggaaaaaccaaatcaaacgtaacgcaagtgaaataaactatagtggagaggagtaggaataacacacgttgggaggagagattattgttcagtaccttgttgagctaatgtagagtaaatcaagtgaaaacattagaattgaaaaggccaaaaatataacagtctgcgatagataatgtttcgttgtaatagttatagaaaatatatttaggcaattatgtacagaatcacagtcgaacaagaattcaataacgtaatgaggcgaatacaaatgtcttttatttatatgtatgctatgtcttgccaaggagctgaagtttgctaagtttagattatgtatgcacaaatacagactgaagactgagcgggcgaacgagcgacataacagaaataaaacggaaacggaagaaaagaaaaatcttttgtacaacactggccggttgtcgcaacttacctgtactgaaccatgccgatcggccggcgttagattgcccagtgttgcccccggctttggcacatcaggccacgcagcaacacctcctttggcatttgtctgtggttgggttatggtggtggtggttgaagtggtggtgaaggatttggacagttggttttgattatttttgttttaattcggtacagttcagttcggtttgcgatcaggcaattggtggaaacggatttatgcaatttgttcaataattaatttcaagtttaaaaaaaagttgttatttctgtacaacatagagacagacagctctaatattatatgctatttataatttagggattgtaagtgagtctaagtaaaactaaagcaagtcaagaatgtgctacaaaaaaaaccataaaaaatgtagtccatacaacaatcaaaggtgaattcaaatatagtaaacaagggttaagttaacagcaaagatttaaccaaaatatatttaattaatttacaaataccgttcaccgatcgattgaagcattttttaaactaggttagtcgagcatttaccatcagcttttcaatattctatatatttcaagcagacatttttaagtcttctttttcaaaatactagccttgtatattcgcacatttctcactaagaaaatgacaatgaaacccaaagcatttataaacctagcaatgtaatctacaaccagacgtatgtatgcttaaaagaagtagaagagcactttaattcacactaaccattacagagataattttcaagtctacaacgtctaacctggagtattatatattcttcattctcatcatcaacatcgtcatcaaaatcaaaataagaaacatcctaagttttatatcaaatgttgtgtgttgggaagaaaagtaggatcaaaacaaaagcgttgagcataagtagagaaagaagagcagtgaataacgaatgttaaaagtaaagaactgagtaaccaaagagaaaaaagttcggtaaagctaagtagaatcaaggataactgtttttatcttataaacatataaaataatcaatttaaattttgtctgtgatcgagtgtacaaatttgattccttttcggactactttagaaaaatgttattatatacattaccttagccgtaacattatgacgatctttatttggtgaaatgatgacttcatggccagtttgcagagatccgacgggcgttgactgttttatgtcagtgatgtgaatgcatgtattaaatttgataacatgtttatatatagatgattcagtaggttttattagcacacagagttacacgcacatgaaacggtggtgacaaccgaaaaagagaaaagagatcaaggagagaagaaaagtgctgttataaatggcttcacttttttgtacttaacatatgatagcttaaccacctaaagcgacgagcttacacactgacaacaagcattgaccagcactgaaagtgatctagcgtcatacgtaacgatgcagtactgatttagctatagaattcaaagatatatttcgccatttgggtttcttttttgtaccttgtcagacttatttttggccaaatgcgatggtggtgcattctttatgaccttcatttggtccagctgttccttggtcttaaaatcgaaacatgaaagggctttaataccaataccactaaattttggggaaacacttttaaatattaaaacatcatttttcggagttgagtatgggtctttactgtttatattgcgctttaatttaagattctctcttggatgtgggtaagggcactttataaaaatatatatatcattcaattcgttgaaggcggtaaagataacacatgtcgttgggaacaggaatcaaactaagaacaaactgagcccaatcttctttgcagcagcggcgggtggcggaaaactgatagcgcgacagcaaggatcctgccatgttagtagtttgttacattgacgtcatacaaaccgacgattccatgcggctttcattcatatttgggtgaattaaaatcattcttagtgggtttggaggacaatgcggttggcggttggctcagtcaatatcaaatatcatgcttgattcttccatcatttgaaatgattgttcagttacatgagtattaacttaaaatatttttagatttcggaacgttatggatatcaatttatatatttctaattgcttgcaattcactatgtctcctatgaattagatattaggggtcaggttttagaattcggtggaatgttttttgggagtcttaatgcgtaagaacgtgtaattttaatggggtagacgaatatatagctcaccattgtcttccctgtccagtcgaactcgccctcgtcggtgtatcccttacgatcgaataagtcttgaaacagtcttcgcagaaaatcatagtcgggagtttcgaaaaaatctaaccgccgtacataacgcaaatatgtcgcaaactcttccggatgtccatcacaaagcacctgcgtgttagaaataagacgttagttcaatgtttaatgagattaaaggaatttgtggggtatatttcacctcgatgggcgttgctcgtttcgtatcaccgattttttgatatctctccttgagtgtatcagcctttaggccttgccacggcagtgaaccccttaagaaatacataaacatatgccccaatgcctccagatcatcgcgtcgcgactgctcacgccccatgtgcgtgttgattgacatataacgtgccgttccagttagggatttatgctcccgatatggtatatgcctatttgtatctaaatcaatgtattctttggccaaaccgaaatctgttgataatattatgttagaacttgcaatacgcttaacatttcattaaggatcttaccaattatatgtataattttttcacgttttgttgacgttctgccaatgagaaagttctctggtttcacatccctatatattaagtgccgactatgaacatattcgatccggtggagctatatttttatatttggacgggttttttgggaatattaaaagaaaaattagttaattatttaaattttaaaaagagcattgtataggcatttttgcttatgaaatgctctttttcgcttttaatttacaaaataataatctatttaaacagttttctgtagtgtctcaactagctgtttatgttttcaactgtaaatttgttctctttgatggcaacggtttttattattaatcgctggtaaatcataaatataaaaaactcagaaatatctatattgagctacaaattgatgtgtgcatgcaaatttattttaattacaatgaacgtttgtttcttcctgtttagataatttttttattttaaaatataatttttttttttgctaaggaagtatttttagtgaatgatgcctcgtaatgaatgcaaaataagttgttacaaataaaacctcaaccaggtggctatgattatgacagaaatagtgagtcgaagagagtcaaaatagggaggcagcgacctattggtatcttgttagtaatgaacaataaataaatagtaaataaaagagtttaaagtataagctagtaaaaacaagcaaatctaataaaaacgcatatacacaccccaacccacacacacgcaaaacaaacaaaaggtgtttcgatcttgatcttagtactagtgttggttaatttggacctcggctaccagtgttgtaaatgtgattatgtgcagaattatgcgcgtgctcaaggaaaactttgcgattgcaacatctgttgttttatgcttcgttgtttaactttgtttttggtggatttttttgtggtagtacttactaattgtatagctatcagaagtacgctcttcaaagtgaaacgtctgccgcaaatatcgaataaatcttcaagtgatggaccaagcaactccataacaagagcattgtatttgccgcatgggccgaagtaatatacttctggtacaccctctgctatcgattgatcgatcgattaattgattgattggtcgattttattgttgattgttcggttgggtcgacatagaattttgtttggaggaagcgagcgagtgtttattatttattcgagtgttggacaacgcacaaaagttttttggttgatcgatttgtagtttgttgttgtttttgttgtatttttgcaaacaattcgtgggcaagagataaaaaagagagatgggagagagaagaaaaaaagatgagatacaaactagattttttttaaataagtccttgttcttttaagctgcatttcaattgatatgacggtttgggcacaaaaaaagtaaagaaacagagtgggaaagtgatgtgtagagagcgatggatttggctcatgttctggaggttagtgtagcgcgtcttacgatattaccacctttcatttgacagagatcgagcgaaggtataaatactttttcgggcaactgtgctaaacacaacaagaacaacaaaaatagaaattctcgaagcatatacacaaggaaatgactgccggaagaccaacctggagacgggaactcacctaccaactcatcctcctcctccgaacgttatttgacctaaccagtagaaacgtcaactcggatataacagagttttgtgtgtgcttacaaaataatcttagaactaaaatagtttccatggcggtgtgtgtggtgtgtataacaggttttggtattctctgaattctgataaacagttcgatagatctttttgcaactgtgttagtagttttggttaaattatatacattgcactttaatgtcaaagagaaaagagagactacaaaaggcagttttgataaatgataaattaagtaaaaaaaaacgtattaacaagttcaacaacgaaattgttatactaatgacttaatttcttgggtttatgtacaattagtttgtgtttgattaaattattaatttttaaacgacgcattacatgctttaaagggattgctttttagtgttataagttcattgcagatccgttaaacgatattgaaagttgcaacataaaagtattattacctttactacagtttcaacatatctacagtaaactaaaaagttgactaacgttcattgcatagactctaaaacgtactaaattaagaaaacaaaaataaaacctatatattagccgttgagacacttttgaacccaaactaaaaaaaaaattggttcatggacgagatgctggcggatttcacaagatatgactgttatacaggacacttcaaaatttaatatttaatttaatttcctggaaaagagttttatgagggaggcagaaacgtaaattgcgttcttttaaaaatctagcatttcacaacttttctggaatagcaaatggttttccccacgcaatattattacaattttttttttaatcaagtgaaacccgctttactttcgtctacaacacctttttggtgatcttttcgttcgtggtggatgccacacttacaagttgtttcgctatcatcaatacagtcttaagtgaaaatttacgggcgcaaatattgaagagatcttctaatgataatcccaataactctaaaaccatggcattgtaacggccaccgcaagtgcccaaatgataaatgcgtggtatgccatctggggcgttatcggctgcatttcgatattgattccgatgtcgcatttatttgtatttcgttcaggatcagaaaaaatcccattccaattccaatttggggtccgatttagtggtggggatggtggtgaggggttggttcatagcattatattatagcaacatggcatcacaatgtaatatgcaacagttgattgttgttggttggttgtaggttggttcaattcagttcataatcgagttggttgtaatgttgtggtagattgcagcagacacggggagaaatatatagatagatagagagcagcgcatgatgattcggattcgggtttaaattttaatttagcggtgttttttgttcaataattcatagtaaatatttggggtatttggtgttgtagtagttgatgaataatggagtaacagagagcaagatatttaaataaacaacaaataagattaagcaacagaaaacagaggaatttagaacaaaaacaattaatgcaagttgggcaattgttgagaaatctatatatatatatatatttatatatatatactaggataaatgtatgtatgtataaagatttaattgattttcgagctgttttacattggcggttttaatagtagttgcagttgtagcctgagctgttttactactgaagtacaatagacaagggacgtggtgtttttacagttttcgtttttaataattttttaatttttcacttcacgcaccgaccgacctccgaaaatatgcttgagaaaatctattcatgtttttcttttcgtcgtattctttcttcgcagtgcgtttaccactactagcgaggtaccagaagtgttttacaaaaattataaatatattcgtttacatatgaatctaataaaatggtggtaacggtgcaaaactttactttcagtaattagtttgttagtaaaatatacggggagggggggggtaataaaatgtgactaggaaaacaaagaccggcttcgataatcatgtacaattcgtacgtcttcagagcaatttgaattttattccctatagaggtctttggaaatttgttgttagttcattatttagtgttaagtgggacgacagctttgggaaacgttatggatcgtagaacagacgagttgtaaagcgatagattacataccatgtgatcctaatagtttataaaacctatactctaagtgtagttgcggagcctttgacttcataggctccatttttattgctacatgttcattgttgtaaaggtttttgcctgaaataaaagaaaaattagcattatttatattttctgaagtaagttaaataaataaataaaacaacattcatttcaaatcttcaaatgccaaataggaaaagagacttgtacgcacatgtggctttacatgcgtaagactatcgccaagcacatgcattcaacgcgtttacctgccccaccgttatcagtagtgccacgcccattgcgccctccgacaccaccaccaaagcaacacattcgccgacctagccaaatgggggaaaaataatagtaagaaatacatgcaatattacagcagtccccttgttctcaatcccaacttctatattcaggtgatttattttaaaactatgaccaatttgtactttattaaattgtttactattcaaaaataatgtgttgtttttttttatgtttggctaagaacctttccaaaatatacgaattatagtgtgaaattaaaacaaatcgtccggaaatggatttgagaacaaggtcgtatataattcgagaattgcattttagataccacgacatgacggagcctcagacagaagctgagagaaaatgtcaacaacgaacagtgcgctcatgtgcgaaattatgtcatgagaaagtcggtgagagagcccgccaagaatgtgtgggtggcttgggtttggcttttatgagtttgctgggtgagtggatgggtgggacagacgttgcttatcaacagacacaacattgaaacgctgatgatagagtcggtcgtcgcacacacatatgaacgcataatacatagtagatacaacaaaatcggcgataggaagccgcatgatttcgattacatgatagaaagtaccgccagcaatgccctttttatccatccattcgcccgcctgcccgcctggccccctagaaatgttttgtttgctgaattcttagaacactcaccactatgcgagctaaggagtcaaaaatgcaaaatttacaatttcttggtctggaattttttgtctacgcagacaaaagaatgatttctggtcgatctaaaacaattttaaatttcttttgaaagtgtgcacagcaaatagcaaactttaaatttcaagtctattttatttggaagatattgtaaattactttaaataagtcaggtctattgaaagtcgtaatcattggatacaagtgtgtatccaaaaatctaaaactcatagacccaagtatacgagtattatccacaaataccgtgacctaacgcaatacacaatatttatcattgaacaactgcaaaaaattgaaaacaaacttccgagattcgttgaaataaacaataaaatagctcacagaagctaaaacaatgagagagaaaaaaaaaaattttataaagggcgtgctacgctaaacaaaaataaagcgaaagttcccaaattaaatgagaaacgcccacgcaaggcgcctataaaaatgagcaaagaaaatgggcggaaaagaatttaggttggtcgacgttctggtttcccaaatgcttttacattcatacttattctttgggtttgaaatgggcaaataacaaaaaaatcaaaacaaaattatgtcattcggaccgcatattgcaagaaaatgcccaaaatgtaaatttccttttatttaaacgtcagcactaaactaatttaacaacaaaagaaattagacaagcaaacacacactttgcaaaggttatttatagaccacaaataataaaaatgatatcataagcgaaacgaaatgggctgtgcaacgtcatagaaacgtatttaattttaattgaacataagcaaccaatacatttaaaactgtgcgattatcataatttgaaaaggcaataaaattagccaattaaatacagcttttaagtgattatctttgctttttgtcaccgcttcggcctaatgagtcatacaataaccccacaaaacaaatgcaacaaagtctcgagatgctgaggtggaaacaaagaaagagcatggctcagaccgacggaaagagacagaatgaatggctgagaaagagacctcgtgataattacagtttgagcggcatagcccactacaaccgactaagaattggctagactttatagtactacctgttggcaatgtgacaacaaatgcacaaaaggaagtggaaggccccaaaaaaataaacaacggccgaaggggcggggtcggtatgaaacaactttataaaagcgcatttagcaaacaaagccaaaatgacgacaacgacgacgatgccaagaaaacagatggcggaatggaatggcgttttgtgttgtattgtgcactcttcgccgccggtgaaaaggagcggggaaccactgttcccattgtggttaacagacttggaaaggaatgcccgtcgaaaggaagtggccaacaaaaaaaaaaaaggtgcaaaaaaaataaaacaccgaaggtcccaaacgcgacattatttgcatgccaacaggcaaaaattcggggagagaatgggtcaatggggtggcggacggtacgcagtatgggactttgaatcgtaaaaaaaatttcgaattatttaagcggaagtcttttctcaaacgtagtgcgttctggatcctctgttatttaaaataaaatgtttcaatactccttccaaactttccaatgaaagttggtgaaacgtaaaatacaattagcatatcatcttttaaactttttcgtaacaccactttattttattataagtcgtcttggtatatagcatatatagcgtcttggtatatatcacaccacccaatatcatgtgctcagaaaaccaaatgaaaacgttcatacaagtgttagcagaataaaataatgattgattattagtgactgtgtaatttatttagacttacctaaacgcaattcgccaaaattaccacagccaatttttttaccgacacgaaaatttggtccgaccataagtacaccggtcgtggtgcttacagattggcgggtggaatacatgttattgcttgagcttttaccaccggctagggctgtggtggcatttgccacattaccagcggatggaccggcagttgtcgtttgtgggccaccgccactgcaaggaaagagaacggaaatcgattagtaacaagtttattgcaataaaaataaacattttacagcgatgcagactcggcgcaacagccacctgatgttggctttaagggtcttttagcactatattcttaaagtcgggcacaaattgagtactagtgtgcccaacaataacgacgagaaattcgtacttaattcgctatattctttggtacagtatggttattgattgcttagagctacgatattaatacatacttttcctccttgatgtttgttttttgtatgtataaatatttgcgcaacatttaattttgaacgaccaaaaaaccccgggtagacaggatctaaactattgacacacggaaatcaaggtagtaaagttcaaaaacctgcccgaccgaaacagatattgtgttattgttataggtgggcgttactatcgactcataaataagtttttattcttgtcccagtaagaaaaaaagaacccaggacaatgacacagaaactttttgcattttcaagtggccctgcacaggcaacaaaaatcgatttgaatcgacttgtgtaggccaggtgagtttctgtttacctaaacgcttgaaagagggaatagagacctagctgctggttatggccacatgtccaggagagctcgctcaggcgtaaccactcatgggcagagcagggcagttggggcagagaattcgaatcgactccagtcgagtcgagtggattgtagtggagtgactcatggccaccagacaagggaaatatgtttgattaagacaaaaggttttgctttgttgcagctcgggtgggtgtggcctgtgtaagatctcatattttcccatgcctttcattgttgcaaaatttagttcaaagtcgtcggtttaatcggtacgtaaactagtcagcagttgcttaattaagttaaaggtagcacgtgggcttctgtaaatacgggtctcgtttaccaaagaatgtaaaccaaatgagtcacccgaaaatgaagccaatgtgacaaaaaaataaaagcaaataaaattaggaaaaattaggtgctatcacaattcttcatgatttttaagatgcaaaatctcaaaaaaaaaaaatgggcatttgcgaattaataaaactttatttgcttaaaatacatagttacgaaaattaaaaaaaaaaacaccaattactaatcgcgccactggatcatcaaagtaaatagaagactatttttatttcaagttacaacgtctgattggccggcatttaagttaatgacgctgatcacatacaataccgaatagcacacggccgtattaaattggttaactggtggaaaggaaagcctgaatcttggttaccgttccgcccaagacgattaacaggaaataattaggtattcccactcgttttgcggtcgggttcacccccccccccctctctctttttcctaaccattgccttaatttctactttcatctaatatcagtctgcccgcccgtttgtcttcgattgcttgccagctgcgaacgggagtcggaaaatgttatctacccactagtttttttttcgccaacgacaaacgagaaggcaaaacagcatacacacaaatgatagttgtaccgttactcggggctgtaaaaaaaatcacaaaaactaaaaaccgccgataacaattaaagagtatattgctgtgggcaaaaagcaaagacgattgagcagtcgacgaaatgaatcagaaacaagttcaagttctactccgattacaagttccttcggaatcccccgccatcaactcataactagataacagaacctctttaaatgctgttaaatgcacaccacaaaaatcgttcaccaaacggttgtttcacttggtcaagttaaagaaaagatactttaataaatcgacgagaagaatgcttatgttaataaagattttaattataaacatccagtagtttttcatgttacattttccctgtaaaatcaaaacaaaacgtacctcgtccatcaatacctaattggtctggtatttctagttggttggctttcttagggtatttcattgcctcggcaagtcttatttttcatgcttttcttgttattgctttgactgtattatggcttaatatcctgggggtaaaactggttcatacacacaccagtatctgtgtttctctgtgtacatatggacgggaattaacgtataaatgcctgaatgtccaccgatcgatctccgtttgactctacttcttcggtgtttctggctccccagttaaacccatttgtatttggttggactccgcgtactgttttttttttttttttcaattttgtttttattaccttttggtgtcggtttggtttcttagctttctacgccttttgcttctggcctggtatgaaaacgggttcgcattttgtcgctcccggttgttcttaaagatagcctgttttttcatgaatcacaatgtaacaaaggctctttgctgtatattgcacctggggttttacacgaggttaccgaatttccatgggttaaaaaaaagtaagcacagctctgtaagcactcgactattgaaattatgtattcaggtttaaaattaatccaagactgtaaaatgtagttttacggcatatcagttattagaattggtcaaattatctgagtttttaaagactccaaagaaaacggtttgaaaaaatttattttcattaatgaaagttgggagcgaaaatttgcatttctttgtaagaaaacagtgtgacataacattcccatcaacaaattaacacttgttgcaaaaccagatgggtttcctgagtaataaaatgacaataagcccgtttttaagaaaaatggttgagaaaataaataaataaaaaaagatcacacatgttcttaatattctatattttgtttgttgcgtttgaaagcagggaaaaccaaatcgataattaaaaataaaccaagcgctataaataaaattatgcacaaggtgggttgaccaaactcactcatcaacaccaccacacagaaagggatgtgtgtgtgcaagacaattttatctgtagctgtgtgtagctcataaataaatcaagtgtaaattgaacacaaatccgaatataagaagaaagggcgaggaaaggagagaattagaccagaggaaagcgaataggaacaacagagaacttgcgctgatgacggcaatagtaaaaaccgcaaaaagcggaaaatcccaattagaatccacaacattagtaacaacaatcagaacacagaaaaaaagtgggagcaattaatttgtatgttctataagtttaattttaatttttgaattttaaaatatcaaaatatttaaacaacgtttttttttagctcgaaaagttaactaacataatgtaatgtattcaaaataggtttgcctttgttgctgtgtatccctgccagaaacagcaaggtgaaaccgcaaaagaattttgcctaattggaatattgattggaaaaaaaggtgacacagtgatttctaaactgtgactaactcaaataattgcaaatttaattaaagcccagaaaacacacttatacaggaagccccataaggcccataggtgttcactaaaaatgagggaaattacataagcaatcaaagaaaacaaacggtgcttaaaataaacaatgataaggaaaatcgagtgataagtgcgtgtgtctatacttgttacttgtgtgtttgttgggtgacttatcagctggagatttgtgagtcgcttgtatgtatttcacttttttcctcttgaagtgcattacaatatatttgttgctataatttctatttataaaaacaaacaatttcattacatttccagcacgagcaattgaattccaattatgcaaatcaattgaaaggctaacatacaaacatctgaaacggatatgcccctttgaatattttatttatatttagatacaaattagggtttcaacgttgtttgatttatatttcagtttttggagatcggttttaaaaaaaatagcatctaattttttattggccagtggccaatttaactgctttcatcggaaacatttatcaaataatatttgaagtgtacattaattgccgatgtggataagtcagctcaattgacaatatggtacaaagcgattcagcttgttgttattaatgtgatttttgttgttggcaatcaagtcgtaattgaattgatattacgcccagcataacgacatagcgtaacatgtcaatatccattttcattggcatttgacgctttgaaaggcaaagtggcagtgtgaagcacaacaaatacatacaactaaaactaaatacaatggctgcattcgcatatattcacgaagcataaatgagcgcacagtggcgctttcttcttctgggtctcccctctgcctttctcttcatgcatcacaccaaatgacctatcacactgataagcaaagagagcgcgagagccttgcacacacacacacacatagcaaaaccactcgagagccccaaacacatacacaccaaagttggctagataagcgcgccttgattagcagcgacgtcagacaatagcgagtcgaaatgaacgagtgacaagtgtgtaaaaggagagtgggaagtaggcgctgcacatcttaaaatgggaggtcagcccaaatggggaggcaggaaaaactggaaggagatggaaatagtgacggataaagagagatgcaggcgccactgcaccttgcacagtgggcggcatacggaattaattaattctttaagtcatagctctgtgtctttgatgggcataaccaattatctgtctatgacaatagttatagttactaacgtttaccaacacttaagttgttggattcgattagttgcgggagcagagtagatgtagctaggactcttcgtccgtccccttccgtccggccgtttctaagcaaactagtatactactatctgcatcgaacttcttgaagtctttattttataagtcagaacggggcggaacgttgttttgatcataaagtgtttttgttgtttttattgttttaaatatataattactgcaagggtatacaagcttcggcgaaataagaattcttgttttattatttatttgccaatgtaccccccatgcggcgttcaatttagggctgggctagcacgtcacccatcccacttccacatccaaagcagagacaacaattccattgacgacgtagtctatcaacgccacagcctctaactgaaattgcacaatgatgtccgttacgtttgtgtgtatgtgagtggatgtgtgtatgtatttatgggggcgcctcaatggccgattgacctttgcatgttagattaacattgaatatgaaatcgaatacaccacaccacctccccctcccaccatccagcagtcacatatcctggttgtggggcatctgcaccgtgtatcggtgtgtgagcttctgtggcgaatgctttaattagtttagcctcagctggaacacgtacaaaagccaagagctatgcaaatgggttctacagaggtcaaatagtatccactttctctgtgttagcataaaagctaccaacaaaccaactgtttcaactacatattggggttgaataatagcacaaaagatgtaatatgcgattgatctcttgtgagattaatttacaccccgctttttgtacaaattcaaattaatcgcccaattgaactggcttaaaaaactggcgttccccaattatttcgcttaaggcttaaagcgatcctctttccgatatacgcaacgcatatgattttaccttaagctcatttaatgttatttactcaagtgcaagtgatttttctgtcacttagcgatgcggaaatgtgaagcattctggtttaaaggaaattaagtttattaatttattattaaagcattgcttaaaaaccccaagctatttttaacgtagaggcacaaaaacaatagttaacatttaataaaaaaaatctttaatcttatctataatttgactatatgatctgacggttattatctacgccgcaaccgtatggaaattgtcggtaatttgctttctagtgttttcttccggcatgcttcaacctttcggattatttagaaggggtgagagtgaccccgagataaccccaatcccagctattctccttcacccgtgtagccccctacgtcatttacgcttgattccttccttccgcctttgggggccgtttgggaattgacgtgggcgtggctttttgacattgaaaaacctcacgtgcgtttgcgttgccaacagaagttttgtttccttcggtttttattttgtttttttttttttctttgtttttttgctgcaatgtttgcagcttcttggcgagttcaatgtcgtggccaatgcaatttaagcaatgacattttcacgttttttcttatttatctttaatcggcaggtctgtcagtcgattgccgaaccgaaggccgggaaaagtcaatacagtgcggccctgtataataaccatcatctaagtttggcgttaaagactttttcactttctcatcgactgcgtatcttcaaaaaataagaaacgtaggttatctaacatatttttgctacgtacataaactttatctagaattaattaagtaatggaaattcaaacttataccagagtggaaaatattcatctcagtttgcaaataattgcttttcaaatatggctgtttattttattcatttacggacttgctaaaacggatggcgaataaacaaatactgatttgctaacataagcgttaaagttgattattaagtaacgcagctaacagtttgaatcttctcttttactgatatggaaaataagttacatttatgtctatgctttcttcggtttcagcgacgttttctgaaagcaatatctgattaacatagaattagttgtcctgtacttataataggccacaccactttcaaaatactctggatactgacagtaattcctgcaataaacaagattgtggtcacactgctgcagtgtatctaaaatagtttcccacaacccttctgttgcatgtcattcgaaactgagcccttaacatgtgtttaacacaagtggacgatgtttggcagagtcagcaacaaacgaaaaagtaataaaaaaaaataaaatatatgaaaactaacccggtggactccgtggaacggtactttcagtgggaacgagatggcgagaagggcctcatgcatggaatcccgtgaaagacgaagaagcagagcgtcgcgggggatcgccgacgcccaatggctgtcaaactgtaagcagctgttgttgactttgaggccgttcactcttcgttgttgtgtttgttgtatttgttgccgctgctgttgatttaatgctgttgcgtttgagaacgtgttttaatttttattgccttcgttataattgtttagttggcagcttggcttggatttttcacaattttagcacttttattgcacatctggttggcttgaaaattaacaaataaactttatttttatttggctttgcaaccatatttttcaatcatttttctgctttcttctctttacactctacacatttcggtatcataattttaattacaactatatttgtgtttgctcttttcgtactattattaaatcccaactggaaaatgtttttaatttgccatatccgctgcgctttgtctttctatatgcatgtgtgtgcgatcgagcaagggagagaagtatgaacggaagggaaagatcggaaaatatgcagcaatgtatgagaaatccgctcagctttcgccacattacgaaattaatgccaaagccgaagacccaagcgcccccaacaaactgattttaaacacttttttgtttagttacttttcttttgcaggtcaaaagtctgaaaacaaaagagtgcgagagggagagagtgagagagaaagagggagaaggccgcagcagatacagataccaaaaaggcaggcaaaataaattgtggaaaaaagtcataaataactcgaaaaaccagtttatgttgccggtgtacaaacaggcagctccaaagcagcaaaagaaacagcaacagtaaacaaagtgtgcagcaaaacgaagaaaagtgcgagcgagctaagaatagtacttaacgaaaaaaaaacattaacaggaagggggaaaaccaaactcgttaaagctgtgcaggagatgaaaaagtaaagcacagacagctgactcaaaaaagtagaagatacacaaacacacacatacacaacagagcgagaagagaggatagataattttccagttgtgggcagactgtcaagtcaaaaaagattgagataagaggtgtttagcaacagtttgacagccacaactcttttctgttatgttccaggccattttttttgtccaacttttaacacacacacacagcaaagcgaataaaaaacgtggctgcactgcattgaaatttatttcaaaaggaaactggagcaaacacaatttattcaacgtcacagcgataaagcgattaacgcgtataacacaccacaagttctcacaagtatatgtactgcacacccgcagcgcagatttgcgagagagctgcgattgcaaaaacaatgatacggcggaggaggagacggaatgacaactgccgcgccaagcgatcgaaaatcaagtgagctccggcgcaaagaacacacgatgccgaagccagcggaagagaaggagagagcgcaaaattaaacccacacgtagaaaaattttagtagatcatgaagatcaatttaggataacattctcagtaacaaactaaatgctttcttttattttgtaatcggttctatgaaatgaaaatgtacattttaatttgaaagtatactggtttatgattagtaccttgactacgttaataggctgaatttttctctgtgtaagaaaaagagagatacaaagcttatgagattgagagagcggactaaaacacttgtgagcgtgtgaaaatgcggcaattgagcagtttgaatttgtatgtgattattgttcatgccgctgctggttgatgttgttgttcctgttcttgtccctgtacagagagaaaagcaacaagaacatctagctgcgagagcgagcgacaagctgataatgacgtgcaacagagacagatagcgggtcatgcgtcagaggccgagaaactatcgcgagcaaactcgttacacaaacaaaacgcacctgtcaaacactcagagacaccgaattgagttggagaatggagcacggagaacgaaaagcggaataagtgaaccaagccggtaagagagactatggtctccggctttggctcaatgggatttctttgaagcgcagtcgcaactgtgaagtttctaccaacgagagcgaatgagcgaagaggggtgtgagtgagggagtgactcatacagcagtgccatgcctgaaccgcgataagctgtatgcctggctgccgtaacagagtctgttaacagaagtccccagaaataggcacagcggactcgataaggttggacacatttatccatctttttatcttattaaggaactagttatttcttaataattagcattacatttcaacattacagctgtcaaatttaatggaaaagctgtaaaaatctggataaatc

SEQ ID NO: 26441 - DNA, 2153 bp, DROSOPHILA
ttggcgcggcagttgtcattccgtctcctcctccgccgtatcattgtttttgcaatcgcagctctctcgcaaatctgcgctgcgggtgtgcagtacatatacttgtgagaacttgtggtccaaccagatgtgcaataaaagtgctaaaattgtgaaaaatccaagccaagctgccaactaaacaattataacgaaggcaataaaaattaaaacacgttctcaaacgcaacagcattaaatcaacagcagcggcaacaaatacaacaaacacaacaacgaagagtgaacggcctcaaagtcaacaacagctgcttacagtttgacagccattgggcgtcggcgatcccccgcgacgctctgcttcttcgtctttcacgggattccatgcatgaggcccttctcgccatctcgttcccactgaaagtaccgttccacggagtccaccggtggcggtggcccacaaacgacaactgccggtccatccgctggtaatgtggcaaatgccaccacagccctagccggtggtaaaagctcaagcaataacatgtattccacccgccaatctgtaagcaccacgaccggtgtacttatggtcggaccaaattttcgtgtcggtaaaaaaattggctgtggtaattttggcgaattgcgtttaggcaaaaacctttacaacaatgaacatgtagcaataaaaatggagcctatgaagtcaaaggctccgcaactacacttagagtataggttttataaactattaggatcacatgcagagggtgtaccagaagtatattacttcggcccatgcggcaaatacaatgctcttgttatggagttgcttggtccatcacttgaagatttattcgatatttgcggcagacgtttcactttgaagagcgtacttctgatagctatacaattactccaccggatcgaatatgttcatagtcggcacttaatatatagggatgtgaaaccagagaactttctcattggcagaacgtcaacaaaacgtgaaaaaattatacatataattgatttcggtttggccaaagaatacattgatttagatacaaataggcatataccatatcgggagcataaatccctaactggaacggcacgttatatgtcaatcaacacgcacatggggcgtgagcagtcgcgacgcgatgatctggaggcattggggcatatgtttatgtatttcttaaggggttcactgccgtggcaaggcctaaaggctgatacactcaaggagagatatcaaaaaatcggtgatacgaaacgagcaacgcccatcgaggtgctttgtgatggacatccggaagagtttgcgacatatttgcgttatgtacggcggttagattttttcgaaactcccgactatgattttctgcgaagactgtttcaagacttattcgatcgtaagggatacaccgacgagggcgagttcgactggacagggaagacaatgtcaacgcccgtcggatctctgcaaactggccatgaagtcatcatttcaccaaataaagatcgtcataatgttacggctaagacaaatgccaaaggaggtgttgctgcgtggcctgatgtgccaaagccgggggcaacactgggcaatctaacgccggccgatcggcatggttcagtacaggttgtgagttcgacgaatggcgaactaaatccggacgatcccacggccggacactcaaacacgcccatcacacagcagccggaagtcgaagtggtcgatgaaacaaaatgttgttgtttctttaaacgaaagaagaagaaatcgacgcgccaaaaatgactagacggtgtacaatgtagtccagaacgcgaggcagtcaccctgctgcgtgccacttcacattcaaactcacgggatagcgtattgaataatccgagtcaggattatatccagcaggcaacgtcgcagcatacgttgcgttatcctccatccgcgtcgatgttgacgccaacaccaactacaaacacaccgacacttccgttgtaatttatataaatataaagccagatgcaaaatgcagaaagcaacaaaaaaaatattaaacgaaacccaacaaaacaaaaacaaaacaaatgaaccccgtacacattaaatacactaaaaaacagtaaaaacaaac

SEQ ID NO: 26442 - protein, 422 aa, DROSOPHILA
MYSTRQSVSTTTGVLMVGPNFRVGKKIGCGNFGELRLGKNLYNNEHVAIKMEPMKSKAPQLHLEYRFYKLLGSHAEGVPEVYYFGPCGKYNALVMELLGPSLEDLFDICGRRFTLKSVLLIAIQLLHRIEYVHSRHLIYRDVKPENFLIGRTSTKREKIIHIIDFGLAKEYIDLDTNRHIPYREHKSLTGTARYMSINTHMGREQSRRDDLEALGHMFMYFLRGSLPWQGLKADTLKERYQKIGDTKRATPIEVLCDGHPEEFATYLRYVRRLDFFETPDYDFLRRLFQDLFDRKGYTDEGEFDWTGKTMSTPVGSLQTGHEVIISPNKDRHNVTAKTNAKGGVAAWPDVPKPGATLGNLTPADRHGSVQVVSSTNGELNPDDPTAGHSNTPITQQPEVEVVDETKCCCFFKRKKKKSTRQK

SEQ ID NO: 26443 - DNA, 3646 bp, DROSOPHILA
aaagagaagggtagctgtttttaaagtatattttggttattcataaaattatttcttagttctgctgatcctacctgctgttccagattgcgtttgagtaggggttgcccatcggctgttcgattgggtggtgatgatcaccgtggttggtggtgggggcggtggtggttgttgttggcgtccattggtgatatacgtggtctgctggggtccagtggtgatgtatgtggtttgctggacgggcactggacccgcagtgacatatgtggtcgtcatagtttgctttatataataaacagcgttcaaaatttaccttgccttgcaaggagctggattgattcgttcggattggtggccaatggctgactgggcgagcttttatgaaatatttccgcgtaagtagtagctatcagcaaaaaagatatctgacaattgatatattttatcagctggtagatactcgcgttctccgctttacggtaggcctgtcgctggccgtgattcatttgaagtaagcctcgataagtcgtgataaagtcacagaaatattcaagggccatgagtccaatgttgttactcactccattgtggtgtcctggctgacttgttgtaataggtcggttgggggaggggcacaaagttcagcatgagccatcgttttgggatatacctctaaaaaaaaataagaaaccctctgaactagttaatttgcactggataagcggatgacgtgttggagatacttggaaatgtgttatcaatcccatttaattgattgatttgattaacaaatgtcaaagataacttttcgagtaaagtgctcttcggtcttgtaccaaccaaaaaaatgtaatttgtaaacaaataaaatttgtgacatataggttcctgtttttactcacaaatagtttaagcaaagtcaaattaattgccaatttattttttttatgtatcaaaggggattctttataattattaacttaattttcatttcccttaactagaataatcgtatgttctgcaatctctggaatagcttggtagcttcccgaagtgttgttttctttgtttctggtataacgatcccaaagaaaaccacgccaacaaggagaatgatacctactgacagatagtagtggtagaaaaaattctcgtaacccttgttgtatccgacaatattaatgatgtggatcgtttgttcgaagcctataatgtatcccacaaagaagggcttcacttttatgggaaaggcctcgcccagataaacggatgagctgcacacgaagagtcctgcgaatgcctgaaaagccagtcccagtctccaaacctggtacatgtagtatgtcattagtgcatttgccggatttgcataggaggcagccatgcagagcatcaggatagccatgcagagtagacccacgagtgagacgaacttgcgccccaacttgtccaagaatccttgggccactagggctcccaacaaacgcaccaatccccaaacagtcactggccaacaggaaatgaatccttcggtcagaagagcactcttgattaaggattcggacaggggcagggaaaatgagaaggcgacgaatccgcggtaaagcagtagttttataaagggcaccactgagatccgtagctcctgacaaaacgtcctcttctggctctccgctacataaagctgaatctcctcaaattcctgatccactgagtggttaaagcttcccaatagtttcgcgtggcatttgcgagccttctccttctgtttgatgcgcaaatagtagatgggcgactcaatcgagagggctgtcattccaagaccaataatagagaacacaattcctattatgccatgaacctcgttaactgatgcttccttgtcatccacccattgagtatcatagataacctgaaagattattaacacattttatacatttcttttgtaagaagtctaagaaattagaaacctggatggcaatgcccaaggccagaccacactgctccattgatccgctaaccccgcgatggttgtccgtcgccacttcggcactatggataaggaacggtacggtgattaaaccgattcctgctccagccacgtaacgagcggccagaagacatccgtaatcaaagggtttacacgtgaatataattgatccagtcaattgcattagacctccaagaacctgcataatattcgtattggatgtgtataaagtgttatcggttcactcacataaaatggcaactttggtaggaaggtcatggttaaggaggccaaggctgctccagccagaactccaatgaaccaactgcatttaaaaacttgcgtggccgtggtgtttaaggtctggttccaacccgcactgtgggcaaagtccatgccgccgtagacatacagaaagaacactgacaaaaggaagaaagtaacatcctttaattgcagaaacttcatttgcaatatccacctgcacaggcaacgttaatttgcttgttgatttgccgtacggatcctggattgctggtggatgaatttatttggatcgaaggctcccgagatggtatattcggtttgtatccttccgcgtagtccttggtgggcgaaggatccggaccagccgttacgtatgcgatagtcatgctttcttccttcctgtaacttttcggtatgatggcttttcttcgatccgctcaacttgatggacaagtgtgaacttattgagttctaaaaaccaattgtagtgccttacacattttctaagggattaaagtacggttttataagcttttaaatatagtcttatgccactttaaagtggttccgacagtaaaagtaaaacccaatgagggtcgataagaatgttgattttttatttgacaaactgctgaaactttccgccagaaacagtcgtaaataatcgaactaggatttctccattgaaatatttgtttctctatcgaaagcttctcgggttttttatgtttacaaaactacgaaaaaatatgtgtctgtgaatgctttatttcttattcgaattaaatgcttttgctataataactatcacagaaagacactttaaaaatatgtttacgaatcttattttattaacttaaattagtaagagagtaaataacaaatattagtctggagtcttagacctagtacatctgtacgtcgtaccacttctgaaaacggtggccagccttcctcagcgtcatcttctttgtctccggcatagacacggtaaagaagatcatgcccaccagcattataatgcctacggccaaaaaatactggaagaagaagtccttgttgggcacagagcttacacaggcaattaccacgatatggacgatctgctcaatgatgacaatcactccgaccaggaacgacttgacccgcatgggaaaagcctcgcccatgtatgcggatgagctgcacacgaagagacctgcgaatacctggaaggccaatgcgatattgcaggctgaggtcattaagttaaagctaattaagttggtcacgttggcatatagacccgccaatccgagcattagtccggccataacaaggaggcccaccaaggacaccgccttgcgacccaaagtgtccaggaatatcaaagccaccattactcca

SEQ ID NO: 26444 - DNA, 1428 bp, DROSOPHILA
atgactatcgcatacgtaacggctggtccggatccttcgcccaccaaggactacgcggaaggatacaaaccgaatataccatctcgggagccttcgatccaaataaattcatccaccagcaatccaggatccgtacggcaaatcaacaagcaaattaacgttgcctgtgcagtgttctttctgtatgtctacggcggcatggactttgcccacagtgcgggttggaaccagaccttaaacaccacggccacgcaagtttttaaatgcagttggttcattggagttctggctggagcagccttggcctccttaaccatgaccttcctaccaaagttgccattttatcttggaggtctaatgcaattgactggatcaattatattcacgtgtaaaccctttgattacggatgtcttctggccgctcgttacgtggctggagcaggaatcggtttaatcaccgtaccgttccttatccatagtgccgaagtggcgacggacaaccatcgcggggttagcggatcaatggagcagtgtggtctggccttgggcattgccatccaggtttctaatttcggcataataggaattgtgttctctattattggtcttggaatgacagccctctcgattgagtcgcccatctactatttgcgcatcaaacagaaggagaaggctcgcaaatgccacgcgaaactattgggaagctttaaccactcagtggatcaggaatttgaggagattcagctttatgtagcggagagccagaagaggacgttttgtcaggagctacggatctcagtggtgccctttataaaactactgctttaccgcggattcgtcgccttctcattttccctgcccctgtccgaatccttaatcaagagtgctcttctgaccgaaggattcatttcctgttggccagtgactgtttggggattggtgcgtttgttgggagccctagtggcccaaggattcttggacaagttggggcgcaagttcgtctcactcgtgggtctactctgcatggctatcctgatgctctgcatggctgcctcctatgcaaatccggcaaatgcactaatgacatactacatgtaccaggtttggagactgggactggcttttcaggcattcgcaggactcttcgtgtgcagctcatccgtttatctgggcgaggcctttcccataaaagtgaagcccttctttgtgggatacattataggcttcgaacaaacgatccacatcattaatattgtcggatacaacaagggttacgagaattttttctaccactactatctgtcagtaggtatcattctccttgttggcgtggttttctttgggatcgttataccagaaacaaagaaaacaacacttcgggaagctaccaagctattccagagattgcagaacatacgattattctag

SEQ ID NO: 26445 - protein, 475 aa, DROSOPHILA
MTIAYVTAGPDPSPTKDYAEGYKPNIPSREPSIQINSSTSNPGSVRQINKQINVACAVFFLYVYGGMDFAHSAGWNQTLNTTATQVFKCSWFIGVLAGAALASLTMTFLPKLPFYLGGLMQLTGSIIFTCKPFDYGCLLAARYVAGAGIGLITVPFLIHSAEVATDNHRGVSGSMEQCGLALGIAIQVSNFGIIGIVFSIIGLGMTALSIESPIYYLRIKQKEKARKCHAKLLGSFNHSVDQEFEEIQLYVAESQKRTFCQELRISVVPFIKLLLYRGFVAFSFSLPLSESLIKSALLTEGFISCWPVTVWGLVRLLGALVAQGFLDKLGRKFVSLVGLLCMAILMLCMAASYANPANALMTYYMYQVWRLGLAFQAFAGLFVCSSSVYLGEAFPIKVKPFFVGYIIGFEQTIHIINIVGYNKGYENFFYHYYLSVGIILLVGVVFFGIVIPETKKTTLREATKLFQRLQNIRLF

SEQ ID NO: 26446 - DNA, 3706 bp, DROSOPHILA
cgattgggcaaccaatggattcccagcttggttcgcttcgtctatttaagggcatcgccagctttttcccagtgattgcggaacatgctgcttttgctgctggcaattgtcctttattgccattccttcattaggctgccgagtctggtatggcattttaatgcaatttttatgcgcatttttgtgcgctgtaaaggccttattccctacaactcggcttccccgttgccgatggatgtgtcacttgtaagatcatttgaattgtaattcgtataattcgccgtattgttgtcttgatgggcctctgtgaccggcggcgtaagtgcctgacattcgtttctggtgagtgcaacgttgccacaattcagtcgagcctcaatttgttggccattgaaatgaatacattgttcacaagtgtatgttcataccaagaattcaaattacagctgctgctttcggccaaaatgtttaattgggcatgaaacaaaatttatccaaggaagtgcattaaaaacgcataaaccgccggcgagaagttaaacaaacatgttcggcatccgagcgaacaccacaaaagcgccatcaaagtgtcaaaaatggaacacatgtggggattagaagcgcgcagagctggcggagacataaattagcccataataaagttctaaataaagtctgctagccgcagggcatatataaatagtctccagtggctcaccgaagggggaattaaccgcattaaaaatttgagaagacataaatatgtttcaatggctagtaaaaatggcaatgcagccgccgactgcatttactcctcatgcggaagttaaatcgtaggaaaacaagagagaaagctgtagtagagttcctcgactatcagataccttctatctcctccaaattgccttccaattttgtacagtgtatgaaatatttaaaaactactgcatcagttatttaaggtcaacagtttattggacaaacaataaatagaagccacctagtaggccatgacatcgtggacccggcggaatcgttcgcctgcctgtcttagcgtcaatcctcgggtttctggcattagaacggcaaaagctacgaggcctattaccataataattccgacagcgacaaagtacgtgtaatagaactctgcggtgggaacaaacttgacgatcacaatgatatgtatcacctgctccaaacacacgatcaggccaatcaagaagggtttcactctcatcggaaaagcctcgcccagataagcggatgagctgcagatgaagaaaccggcgaagaactggaatgccatgcccagacggcacacttgccacataaagtaatcgtcgaagatgtgcccgtagtccccgtagactccggccatgcccagcattaatccagccatgcacatgagtccaagtagtgagacaaatttccggcccacggtgtccagaacggcgaaggtgatcagggcaccgatcagacgaagaagtccaaatataatcgtgggccaggagtgcagggtgccctccaccagctccgtggttgtcagtattgaatatgacagtggcaccgagaaggtgaaagcaacgaagcagcggaagagcagcagcttgagaaagggcatcatagactctcccagctgctcgcctactccttgggcgctgccttccaccacgtatagctttgcctcgtcgtaggctcgatctccagcctctcgagtccaataggatcccattagctgcttcacactggcacgtgccttctgctcctggttctggcggatatagaagatcggcgagtcgatcgtgatggctacacttcccagcgcaatggccgtaaaaacgattccaaaaattccgtgtactcgattgatggtcatgcccaatccctgagaccactgtgagtcgtagattacttgaatggccactcccaatgccagaccatattgctccaatgcacagcaggttcctctgttggtactcgaagcgatctctgcgctgtggattaggaatggcacagtgattaacccaatgcccactcctcccacatatcgggcggccaggatcgactcgtactcatatggagcactcacaaagataatggcgtcaattaggttcatcacaccacccagaccctgcgaattaacattgatattagtcttggaaatcttcttaaatcaaccattttcgactcacataaaatactattttgggcagaaatgctgatgtaatggcggacaccacagctccgataataacgccaataaaccaactgtactggaactccagggtgttggcggaaacggcagtcaagttccaaccaagaccttgggccatgtccataccagcatacacaaagagaagggtagctgtttttaaagtatattttggttattcataaaattatttcttagttctgctgatcctacctgctgttccagattgcgtttgagtaggggttgcccatcggctgttcgattgggtggtgatgatcaccgtggttggtggtgggggcggtggtggttgttgttggcgtccattggtgatatacgtggtctgctggggtccagtggtgatgtatgtggtttgctggacgggcactggacccgcagtgacatatgtggtcgtcatagtttgctttatataataaacagcgttcaaaatttaccttgccttgcaaggagctggattgattcgttcggattggtggccaatggctgactgggcgagcttttatgaaatatttccgcgtaagtagtagctatcagcaaaaaagatatctgacaattgatatattttatcagctggtagatactcgcgttctccgctttacggtaggcctgtcgctggccgtgattcatttgaagtaagcctcgataagtcgtgataaagtcacagaaatattcaagggccatgagtccaatgttgttactcactccattgtggtgtcctggctgacttgttgtaataggtcggttgggggaggggcacaaagttcagcatgagccatcgttttgggatatacctctaaaaaaaaataagaaaccctctgaactagttaatttgcactggataagcggatgacgtgttggagatacttggaaatgtgttatcaatcccatttaattgattgatttgattaacaaatgtcaaagataacttttcgagtaaagtgctcttcggtcttgtaccaaccaaaaaaatgtaatttgtaaacaaataaaatttgtgacatataggttcctgtttttactcacaaatagtttaagcaaagtcaaattaattgccaatttattttttttatgtatcaaaggggattctttataattattaacttaattttcatttcccttaactagaataatcgtatgttctgcaatctctggaatagcttggtagcttcccgaagtgttgttttctttgtttctggtataacgatcccaaagaaaaccacgccaacaaggagaatgatacctactgacagatagtagtggtagaaaaaattctcgtaacccttgttgtatccgacaatattaatgatgtggatcgtttgttcgaagcctataatgtatcccacaaagaagggcttcacttttatgggaaaggcctcgcccagataaacggatgagctgcacacgaagagtcctgcgaatgcctgaaaagccagtcccagtctccaaacctggtacatgtagtatgtcattagt

SEQ ID NO: 26447 - DNA, 1585 bp, DROSOPHILA
ccaatccgaacgaatcaatccagctccttgcaaggcaaggtaaattttgaacgctgtttattatataaagcaaactatgacgaccacatatgtcactgcgggtccagtgcccgtccagcaaaccacatacatcaccactggaccccagcagaccacgtatatcaccaatggacgccaacaacaaccaccaccgcccccaccaccaaccacggtgatcatcaccacccaatcgaacagccgatgggcaacccctactcaaacgcaatctggaacagcagctacccttctctttgtgtatgctggtatggacatggcccaaggtcttggttggaacttgactgccgtttccgccaacaccctggagttccagtacagttggtttattggcgttattatcggagctgtggtgtccgccattacatcagcatttctgcccaaaatagtattttatggtctgggtggtgtgatgaacctaattgacgccattatctttgtgagtgctccatatgagtacgagtcgatcctggccgcccgatatgtgggaggagtgggcattgggttaatcactgtgccattcctaatccacagcgcagagatcgcttcgagtaccaacagaggaacctgctgtgcattggagcaatatggtctggcattgggagtggccattcaagtaatctacgactcacagtggtctcagggattgggcatgaccatcaatcgagtacacggaatttttggaatcgtttttacggccattgcgctgggaagtgtagccatcacgatcgactcgccgatcttctatatccgccagaaccaggagcagaaggcacgtgccagtgtgaagcagctaatgggatcctattggactcgagaggctggagatcgagcctacgacgaggcaaagctatacgtggtggaaggcagcgcccaaggagtaggcgagcagctgggagagtctatgatgccctttctcaagctgctgctcttccgctgcttcgttgctttcaccttctcggtgccactgtcatattcaatactgacaaccacggagctggtggagggcaccctgcactcctggcccacgattatatttggacttcttcgtctgatcggtgccctgatcaccttcgccgttctggacaccgtgggccggaaatttgtctcactacttggactcatgtgcatggctggattaatgctgggcatggccggagtctacggggactacgggcacatcttcgacgattactttatgtggcaagtgtgccgtctgggcatggcattccagttcttcgccggtttcttcatctgcagctcatccgcttatctgggcgaggcttttccgatgagagtgaaacccttcttgattggcctgatcgtgtgtttggagcaggtgatacatatcattgtgatcgtcaagtttgttcccaccgcagagttctattacacgtactttgtcgctgtcggaattattatggtaataggcctcgtagcttttgccgttctaatgccagaaacccgaggattgacgctaagacaggcaggcgaacgattccgccgggtccacgatgtcatggcctactag

SEQ ID NO: 26448 - protein, 502 aa, DROSOPHILA
MTTTYVTAGPVPVQQTTYITTGPQQTTYITNGRQQQPPPPPPPTTVIITTQSNSRWATPTQTQSGTAATLLFVYAGMDMAQGLGWNLTAVSANTLEFQYSWFIGVIIGAVVSAITSAFLPKIVFYGLGGVMNLIDAIIFVSAPYEYESILAARYVGGVGIGLITVPFLIHSAEIASSTNRGTCCALEQYGLALGVAIQVIYDSQWSQGLGMTINRVHGIFGIVFTAIALGSVAITIDSPIFYIRQNQEQKARASVKQLMGSYWTREAGDRAYDEAKLYVVEGSAQGVGEQLGESMMPFLKLLLFRCFVAFTFSVPLSYSILTTTELVEGTLHSWPTIIFGLLRLIGALITFAVLDTVGRKFVSLLGLMCMAGLMLGMAGVYGDYGHIFDDYFMWQVCRLGMAFQFFAGFFICSSSAYLGEAFPMRVKPFLIGLIVCLEQVIHIIVIVKFVPTAEFYYTYFVAVGIIMVIGLVAFAVLMPETRGLTLRQAGERFRRVHDVMAY

SEQ ID NO: 26449 - DNA, 3751 bp, DROSOPHILA
ctttaagctgatgtcatgcaccttacacaacgtgacagttaatgaaatagcaacaatgattcccagacctagaacaacactcgctcaacaggttgcttgagcatttccatgttctcccacagcgaataattttatttttagaggcctcccgctcggttttttctcttctctcgagaactatctcatcgggttaaattcaaatcggatcgaattcaattctcagtgattcgaacggcgtcgaggcagcgcgtgccgaacgcgtattgttttccaaattatttctttattattcgaatggctcctatgggtgtctctatatagacgaggtatttaaatatctatcatagttgttgtgttaaaagtcatcaagagagagcgaaaattgatgaaataatagttaacctacaagttgacattgacaatgcgacaaggttgcactttaacctaagtaattgcagccgaaacattttaaaaataggcacaagttttcttttaaaaaaccgcatttttccgggtttcaggaattcatatattacgaataaaattatttgtatgtttaattttatgcgtaatatatataaaccaatgaacatcaattatattatattataattatttaataatgaccaaataattgtacatatacaaataattagtcttggaaatatacaaattacaagagaatgtgtcgattttcgtcataatttagattataaaagtttttagattataaaatattttgttaaatcatatcgatttgaaagaaagaactttaatcgcagatagaagacaacgtgttcccctcgtagtaaatgattacgaaatttttaataaaatgtatgctactaaatagcaatacacatgcatttgcagattaaacgatcgaagatatcttatcagtccgccgttatcgcccgaaacccattgtgtataagatagtcgccggctgcttggaaccatatcagtttccattcgtacttggacttgaacggagcgagtcatgacacaaaaccggagcacatggattggatgcagcttgggcggcctgttggtcgctctattggccctgcaaacgatgccacagggcactgaaggagccaacatcctgggcgtcttcaccagccacagtccgtcgcatttcattgtgcacatgtccatcatgaagacgctggcggagaagggtcacaatgtgaccgtcgtctcctccgttccacctaaagtcacccacaagagcattaaccacattgtggtgccaatgagtgccgaagatgagaaagtgctcaacgatggtatggctggaatggtgaaggagaagccttcgatttggaatacgatgaaatcgatcttcagctcgttagccctgctcattgataagcaggtggacgttttggaggatccgcgcttccaggaactctatctgaacaagggcaacaaattcgacgtggtcttcgtgggattcttcttcaacacgtaccaggtggcgttgggtgcccggtttaattgccccgttataatatcctggtcgggcccacccatgatgatggtcaacgaggtgctgggtaatcccgagctatccagtgttccccaaatgcacatttccgcgcctcccggtcagcctatgaatttccagcagcgaatgcagaactttgccagcactttgggattcaatgctctcaacatcttcctgaatcacaaatacaacaagttctatgagtgagtacttatcaattgactgactgaacaagatgtttaaaaatataattaaatctaattccaatattttgtttttcagccgtctttggagcaaagacaagtcaatgcccacttttgcgcaggccaagaggaatgtctctttggcgttttgcaatggccatggcatcagcgaaggtcccattcgtccgaatgtgcctggagtaatcgaaattggaggcatccaggtgaagagcaagcccgatcccctgccagaggacatacaggagtttctggagaagggcaagcacggagccattctcttcagtttgggttccaacttaaagggcgaacatatccagcccgaagtggtaaagaccatattcaagggattgagcagccttaagcagcaggtgatctggaagtgggaggatcccaagaacacgcccggcaagtcggctaatatactctacaagaagtggctgccccaggacgatatcctggcgcatcccaagctcaagctgttcatcacgcatgcgggcaagggaggagtggctgaggcacagtatcatggagtgcccatgctggcgctacccgtgtttgccgatcagccgggtaatgccgataagctggtggccagtggatatggcctgcagctgccattggccaccctggatgtggatgaattcaaggcagccattaaggaggtcatcgaaaatcccaagtacgcaaagacattgaagagcttctcacagctctatcgcgatcgtcctttgagtcctcaagaatcggtcgtctactggacggagtatgtgatccgtcatcatggtgccgctcacatgcagagtcccttggtgcacatgaatttcattgccagcaataatttggacatatatatcatcgccgccctggtgctctacattgtcttcatcatcaacaagatcgtgtggaaatttgtgtggcgcaagttatttggcaaatcgaacaaagtttccaagggaaagaaggtgaagaagcagtaggttggaaatatagaaattttaactaatttatacttaaaagattaaaaaaaaaaaaatagtaaaaccacaaaaatgtcttaagttatttgttaaatagctgagttaagcactccttctgtgcacgaaattcggttatcaataaccagctcataatcaccattaactgcctatcttatccgtaaactattcttatcaccgttaaaccagttaagtacaagcaacgtcattgaattgaattatatcaaattgtagtgttgtagaaacagtggcaacaaattacagttgtttgttgtctagtgtgacaaaatctcactgaaaacgattagatatgaaactatgtttgataacaatttcaaattccaaattcaccacagcctaccacaatttttggtaaagctgtttaagcagtggtgaatttgatcactactttatagcctagacacgaaccacttaaaagccatatttcactctttagacgcagagcgattcgttacaacgcaaagttatcaacttaattaaaatttatttttgctcgttgagcattgtcgatttctttaaaaacatcataatccgatcatgaaattagtgttatgacacaccctaaatttcaatgccgcatcaatcaatgatgtttgacctggtctttcacctcctgccgattgatatccaaacttcttccacccatgctgatatcctccaccacccggcacgtctcgctggccagctcctcgggatccttgactatatcctgaacattctcgatctgcttttgcagatctgaaacctcgttgcgattggcgaattcaccgactcccagttcggcgtgaatggtgtccatcagattggccagcagcagactctcgttgtgactgaagtcatcgctctccgtgctgcccttcagaatacagttccgcacttcctccgcctcgtagcacatgcccagtcgattgtggtagtgggtgggtggcaattgatcgccacccggcagcgggaactcgtagtccacctcctcggtgatcagacgcgttggacaccagtaa

SEQ ID NO: 26450 - DNA, 1672 bp, DROSOPHILA
atgacacaaaaccggagcacatggattggatgcagcttgggcggcctgttggtcgctctattggccctgcaaacgatgccacagggcactgaaggagccaacatcctgggcgtcttcaccagccacagtccgtcgcatttcattgtgcacatgtccatcatgaagacgctggcggagaagggtcacaatgtgaccgtcgtctcctccgttccacctaaagtcacccacaagagcattaaccacattgtggtgccaatgagtgccgaagatgagaaagtgctcaacgatggtatggctggaatggtgaaggagaagccttcgatttggaatacgatgaaatcgatcttcagctcgttagccctgctcattgataagcaggtggacgttttggaggatccgcgcttccaggaactctatctgaacaagggcaacaaattcgacgtggtcttcgtgggattcttcttcaacacgtaccaggtggcgttgggtgcccggtttaattgccccgttataatatcctggtcgggcccacccatgatgatggtcaacgaggtgctgggtaatcccgagctatccagtgttccccaaatgcacatttccgcgcctcccggtcagcctatgaatttccagcagcgaatgcagaactttgccagcactttgggattcaatgctctcaacatcttcctgaatcacaaatacaacaagttctatgaccgtctttggagcaaagacaagtcaatgcccacttttgcgcaggccaagaggaatgtctctttggcgttttgcaatggccatggcatcagcgaaggtcccattcgtccgaatgtgcctggagtaatcgaaattggaggcatccaggtgaagagcaagcccgatcccctgccagaggacatacaggagtttctggagaagggcaagcacggagccattctcttcagtttgggttccaacttaaagggcgaacatatccagcccgaagtggtaaagaccatattcaagggattgagcagccttaagcagcaggtgatctggaagtgggaggatcccaagaacacgcccggcaagtcggctaatatactctacaagaagtggctgccccaggacgatatcctggcgcatcccaagctcaagctgttcatcacgcatgcgggcaagggaggagtggctgaggcacagtatcatggagtgcccatgctggcgctacccgtgtttgccgatcagccgggtaatgccgataagctggtggccagtggatatggcctgcagctgccattggccaccctggatgtggatgaattcaaggcagccattaaggaggtcatcgaaaatcccaagtacgcaaagacattgaagagcttctcacagctctatcgcgatcgtcctttgagtcctcaagaatcggtcgtctactggacggagtatgtgatccgtcatcatggtgccgctcacatgcagagtcccttggtgcacatgaatttcattgccagcaataatttggacatatatatcatcgccgccctggtgctctacattgtcttcatcatcaacaagatcgtgtggaaatttgtgtggcgcaagttatttggcaaatcgaacaaagtttccaagggaaagaaggtgaagaagcagtaggttggaaatatagaaattttaactaatttatacttaaaag

SEQ ID NO: 26451 - protein, 543 aa, DROSOPHILA
MTQNRSTWIGCSLGGLLVALLALQTMPQGTEGANILGVFTSHSPSHFIVHMSIMKTLAEKGHNVTVVSSVPPKVTHKSINHIVVPMSAEDEKVLNDGMAGMVKEKPSIWNTMKSIFSSLALLIDKQVDVLEDPRFQELYLNKGNKFDVVFVGFFFNTYQVALGARFNCPVIISWSGPPMMMVNEVLGNPELSSVPQMHISAPPGQPMNFQQRMQNFASTLGFNALNIFLNHKYNKFYDRLWSKDKSMPTFAQAKRNVSLAFCNGHGISEGPIRPNVPGVIEIGGIQVKSKPDPLPEDIQEFLEKGKHGAILFSLGSNLKGEHIQPEVVKTIFKGLSSLKQQVIWKWEDPKNTPGKSANILYKKWLPQDDILAHPKLKLFITHAGKGGVAEAQYHGVPMLALPVFADQPGNADKLVASGYGLQLPLATLDVDEFKAAIKEVIENPKYAKTLKSFSQLYRDRPLSPQESVVYWTEYVIRHHGAAHMQSPLVHMNFIASNNLDIYIIAALVLYIVFIINKIVWKFVWRKLFGKSNKVSKGKKVKKQ

SEQ ID NO: 26452 - DNA, 2970 bp, DROSOPHILA
tatatgcaaagaatatcttttatgagttaggctaagatatttcatggggtaacctaaaaaatttgattattaactcttgatagccaatttttcacagttgttaaaattgagacaccactgaaactttcgaactcgaaatttgggcagtcacaccgtaatgatatttctgtctttatggtttttagatcaatttttcggttttttcaaaatttattcagatcagtaaaatacagtattatgggggactgcgcagatgcaaaattagttagtcgagttacggtgccaccaataccgaaacttggcgacatgcacatgtattgggtgtggcgaatgctgattaaatcatatttggatgctataggtctttggtctggaaatcacccaaaggaggtaatatatatactgttaataaatatggtggttaaatctgcacaattcgttattttaagagcgcccatacaaaatttgtgctgctgagcacgttggaaatatgggttgtaagaagggaatacgatgaaatgagcagcaggtccattttcgaagatctcgaggaacgatatgctatcactaacaatgacaaacgaggtcagttggcaatggatagatttatttaaaatcaataagatttgtttttattagactctatgtacaacttttgattgctgcctggattactactgtagtgtaataaatctcaaacttcaatatataattatatatatttataaatttggtgaaaattgtcgatctcggacggttggatattatattcatttaaaatttgtcatggtaagcatgcataaaattgtacaaaacacatcacactagcttaaatctactttcaatgaaattatattttaaatatcaaccgaagtcccgggaaatataccagctgtgctcattttgagcacaccagtgctgcccatcgattaccacgcgttagtgcctgtgcgcatctaacgcgttagtgtcttccaacttttgacacatcgttcaataaaaacaaatcaacttcgaatgctcgaaaagcagcaggaatatttaatataacgctaaacaacttaaatttactactctcaaaagtagaagtgtatcaaaattgtagctattttcagtcgagaaccaagaaggagccttaaaaatgacacgtaagtaagggcatcatgaagccattttgttaatactgcacaatgtattaaatgtgcatgtagatccacatacatatgtatatctatctattcgtctaaataacaaattaactaggattacctccagtgtcatgcaaaatcgtaatctccaaaatatgataagagaattagaatttcgacccgaaagtaatcctgggttttcgcgtatagagcaggcaaaaatcgatggacaagcagaggacatgtgaacgcctctaacctctcatagattatgtagatcacatttagcacgcgccactaaccagctgccacgtattaaccaattataatatcaccaatttaataggcggcaaccaacgagacctggcccgccagaagaaccagaagaagcaggcggatttgaccaagggaaagcgaaccgataacctcaccgtggagcaaaggaaggccaggtgagtgatttacattttcaatgtataatgtataagatataatattattaataaaccaacccataacgcagggacgctgagttaatgcgggagaagcagaaaaaaaaggaagaggccgctgcggcgggcacaagcaaatagtcaacccactggcttgatagagatctggactcccggttgcatttccggacaggttaggcttatagtcagtcgttcgtcagccaagaccccgattcgcccaaggacctaggatagttggttagaatgtacatgaagcaacatacataattcacgagaattgtatacaactacgcatagatattaccgggctgtacagcacgcgacatagcaatagcaatagcaagtgccacccaaggacttcgattctgttccggtttttgttcattttcgtttgcagtgctgctgtacgataattaagtaatcttacattttatttctccacctacctgactaaattatttactgtaatgtatatatataaattttcaaataaaacataatatgcagccgacagaaagactcaattatgtgttattgtgtttgacgaaaatatatatatagattatggcactcgataacggtcgattgctaccgaaaattaactttaactaatgaatcccttttctagcaaatatggtcgccgaagagagagatataaagattgataatcccagagcaatccccataagtatagctcaagaatgttaaatataagccttagatctttaaaatcggagtatgaatagggcgctggatacgacctactaaacttcctggtctgatttaagcatgacctaatgaggtatttaatttgcctcgagtcatgctgaaatttgcatacaatggaatatggatatttgtaaatggcacgatttgataaatatgaaagtagctgcatgccaaagcttgccccacaaaactatcgcctagatgccaataagtcgattgctagcatttaccttttacagaataaatgaccaaaaacctggccactaacgactggcagatgcacacaaaaaacatgctgctaaataaaatttcagttttagtttaattttattttatttatgtataagaaaagatatcaagaaacaacaacgaattttgcgcaagactggtaaactaagtcattgaaacttaaatactgtgacttttatcttttggaatacctatctgttttcgaatagatcttcatacattgtgccacagtgcacggtcttattcatggccaataaaggcagatggggtcatggcgtgctgatgtatcttcggctgaaatctcgagttccttcaacgaggaaaacaacacggatgtaatgagaacgtccactgatttgtttgacttggct

SEQ ID NO: 26453 - DNA, 553 bp, DROSOPHILA
aaacaaatcaacttcgaatgctcgaaaagcagcaggaatatttaatataacgctaaacaacttaaatttactactctcaaaagtagaagtgtatcaaaattgtagctattttcagtcgagaaccaagaaggagccttaaaaatgacacgcggcaaccaacgagacctggcccgccagaagaaccagaagaagcaggcggatttgaccaagggaaagcgaaccgataacctcaccgtggagcaaaggaaggccagggacgctgagttaatgcgggagaagcagaaaaaaaaggaagaggccgctgcggcgggcacaagcaaatagtcaacccactggcttgatagagatctggactcccggttgcatttccggacaggttaggcttatagtcagtcgttcgtcagccaagaccccgattcgcccaaggacctaggatagttggttagaatgtacatgaagcaacatacataattcacgagaattgtatacaactacgcatagatattaccgggctgtacagcacgcgacatagcaatagcaatagcaagtgcca

SEQ ID NO: 26454 - protein, 60 aa, DROSOPHILA
MTRGNQRDLARQKNQKKQADLTKGKRTDNLTVEQRKARDAELMREKQKKKEEAAAAGTSK

SEQ ID NO: 26455 - DNA, 2451 bp, DROSOPHILA
gctggcgggcgaatctattcccgattgcattggtcaatctataaaggactcgcggcgcattattgtcctcatgacagagaactttatgaattccacttggggtcgcctcgagttccgactggccctccacgccacctcacgcgatcggtgcaagcgtctgatagtggtgctctatccaaacgtgaagaacttcgacagtctggatagcgagctaaggacctacatggcatttaacacctatctggagagaagccatccgaacttttggaacaagctgatttactcgatgccgctactaccaagctacgttgactaggacattacattattaatttcaataagaaacaaaaatatataatttgttgtctcccacacagtttattttttgagatttacatagttcccggaagtattccgacaggtttccgggtcaactggtttagcagcaaggaccgcaaccgcaaaaactgctggtgccgccgcagcaaggtccacatcctccgcaaggaccacagcaggggccacacccaccacagcaggggccacatccaccacagggtccgcatccgccgcaggggccacagcaggggccctgataaatcatattaaaagtattcactcgacttacgagaccgataaatacataccccaaccaaaacgtaattcgggttgacgtacatgtacatgattttgtttcttaaaagatatttcccaaccggaatcgaaaggaaccgaaaatttaggtgttaactattgaaggtggaacggagaactgactgaatgtgatccaaattagccgaagcttcatttgacagcagtcatgagaatttcaaggctaatatgatccgacaaattatattcattattattattatattctggtatcccaaaacccataatctagttagctatggatattttcgacagttgtcaaattcatataccaacttgtgagtcaggtttccatcattcttattttggttctcggcctgtaatcatcgaaatattttttcgtcctaagttatttctttgttaggttcaaagtgagtatttctcaaagtgtaagcatgcgaagttttaacaaaatttttcttagaactttacggaaccatcatgtgttgcggaccccttggattctgcggaccctgtagcccgtgcggcggtccttgcggaccttgcggaccctgtggtccttgcggttcctgctgtagtccttgtggatcttgctgtgcgccttgcggcccttgcggtccttgcggtccttgctgcgggggctgtggtccatgcgggccttgtggaccttgctgtggaccttgtaggccatattgcgggtgctgaacaacaaccacaacatgtaaaatatctttttcctgtgaaccacaaagtggaacttaggactgaatgcggataaactcttcttagctcgcgggcctagtcaataaaataagaatttcaaaataccttttccgatggtttttctcttctaaatggtgcaacctttgtcttagctatggataccaaatgcgtgacaataataatttatgtaatataattgcgaaaattaaaattgtcaattcttggtggattgcgatcgttagagggggcggaggaacatcctacgttcatatcgactaggcttgtgatccagctcaagaataaataaccttttcttctattcactatagcatagctattactctacgagtggcgggtataaaacctgcaaccgtgaatttaaacctcattcaataatagtatttgtctgcaaacggacaaatgtccgataacaataattctataacaataataactatttttaaccatcaaccgctgtacataaacataattcgaattcatagtaggctatggaaatcgttcttgacctgtcagacccacctaaccttgtaagttcggaaaatatatcattctcatctcgacccttgtgctgctcgcatcaaaattttgttgttttgtcccaaatacttgttttttttttttggcttctaaagaccgttggtaaaaatgtttattgtaaagttaaaatagtatacatatttatttcgtttattttagacttctcgaattaatcatgtgctgtggaccttgtggatcgtgctgcggatattactgctgtggtccctgctgtggaccttgtggaccccgatgtgggccgtgcggatcctgctgtggaccctgtggaccctgtggaccttgttgcggaccatttggcagttgttgcggtggctgttggtgctaaatgctcgcaattggcagccgaatcgatttgtgaaaccataccacaatcccaccatggttaaactaacacctgaaagttaaaagccacaaatatatatatatgtatcttaatgcagatccatgttatcattgggatagttcaccattgctcttactcggcgttactcgttgacataataggaatgcgtttcgtaa

SEQ ID NO: 26456 - DNA, 398 bp, DROSOPHILA
gaaatattttttcgtcctaagttatttctttgttaggttcaaaaactttacggaaccatcatgtgttgcggaccccttggattctgcggaccctgtagcccgtgcggcggtccttgcggaccttgcggaccctgtggtccttgcggttcctgctgtagtccttgtggatcttgctgtgcgccttgcggcccttgcggtccttgcggtccttgctgcgggggctgtggtccatgcgggccttgtggaccttgctgtggaccttgtaggccatattgcgggtgctgaacaacaaccacaacatgtaaaatatctttttcctgtgaaccacaaagtggaacttaggactgaatgcggataaactcttcttagctcgcgggcctagtcaataaaataagaat

SEQ ID NO: 26457 - protein, 74 aa, DROSOPHILA
MCCGPLGFCGPCSPCGGPCGPCGPCGPCGSCCSPCGSCCAPCGPCGPCGPCCGGCGPCGPCGPCCGPCRPYCGC

SEQ ID NO: 26458 - DNA, 2397 bp, DROSOPHILA
tgacctgtcagacccacctaaccttgtaagttcggaaaatatatcattctcatctcgacccttgtgctgctcgcatcaaaattttgttgttttgtcccaaatacttgttttttttttttggcttctaaagaccgttggtaaaaatgtttattgtaaagttaaaatagtatacatatttatttcgtttattttagacttctcgaattaatcatgtgctgtggaccttgtggatcgtgctgcggatattactgctgtggtccctgctgtggaccttgtggaccccgatgtgggccgtgcggatcctgctgtggaccctgtggaccctgtggaccttgttgcggaccatttggcagttgttgcggtggctgttggtgctaaatgctcgcaattggcagccgaatcgatttgtgaaaccataccacaatcccaccatggttaaactaacacctgaaagttaaaagccacaaatatatatatatgtatcttaatgcagatccatgttatcattgggatagttcaccattgctcttactcggcgttactcgttgacataataggaatgcgtttcgtaatatgtatgtgggtgtaggtttcttgatcaggaacactagccggatactaagcgagcagattgtattgcgctgcgagcacaagttgctatatggaaatggttgagacgttcttggtaataccattttattttacacgaatgacgtctcaaggtgattgattctgccttccgacgagcttcactaggacgttctttgttgttcccatctggatcagttgtactgcttgctacggcaggacattttcttaagcacgttattgtaaaattcactaaagaacaaaattaaattccttttagggcattgatataaaatttttattaattttgcatttgtttattttaaatctagaaggctttgaatctatattctactttcctgtgcaagttctatgtaagcaaacatcagttttcatctttcccttaacccaagaacatcaaaatttgagctcttttccaagctttttaggttcagcactttgtacgtagttttttatttaagaaaattgttggtataatagcttttcttttagttctcagaaattaaaaaaaaacatgggctgtgcaccgggcggaccttgctgcggaccctgtggaccgtgttgcggaccctgttgtggaccctgttgtggaccctgttgtggaccctgttgtggaccttgcgggccctgctgtggcccctgtggacctcgttgtggcccttgcggaccctgtggaccgtgctgtggcactatggaaaaacgaaatggccttcagcggtgctgtcctttttagctgtgatttcccgaataagcaaccaaactgtgtccaaaaaaagatttcattagtctattgtgacaaataaaggggaactatgaaaactatcaaattaatggatcttagcagggagccaatgtaatcattgcaatttcattcattcacactccgtacaagaactataaagattactgcttttcctctgctacctttgcttcacaagccgatgacgaatgacaagccaatccaaaaaggcagtagctgaagagagaagcaatctccataggacaatcaccataggacaatagaccaggctaacactgaagcctgcggcaatacattcacacacgtaatagttgcattgggcttaaaaggagcagttggtttatgccaacatgctcaggtaattgggacgatgcagttggaaaataaaaagtaatcctgcccttgcagcaattaaattagccaaataggggatgttaattagtgtcaagtaccttgaagtaaatggtgccaaaagaggcgtggccgaggccaatcaaaatgatttccaagcaatgttactcatacgccccatgtagctggtcccagtcaattattaatggctgctcggcgcgagtgcagactgctgacatctcaattcaggcgaattgtttatagtatgcaagcaataggatgccagaggaatatctggggaactgattttcatcattcatttcgccagtcgacttttccactttccacgctgaataatgaaggcagccattttaagtgtgcgcctgcgaggcactggctctcccgatgacgcagttaagggaattctcggatatgtaagcttctagcatttaggcctcatacaaatgtatagcgcatcctgttatatgagtagcagacgagcaggataatcaagttccggaaggggtcgaattagagctgcctgccagaatcgcagtcgaaacgcttaatcagtgctatatgcaagtgtaatcctagaactcgcatatgccgcagccgactattgctgtactcagggaattcggggtcaatccctgcagaaatgttcgtaccaattc

SEQ ID NO: 26459 - DNA, 345 bp, DROSOPHILA
gaacatcaaaatttgagctcttttccaagctttttaggttcagcactttttctcagaaattaaaaaaaaacatgggctgtgcaccgggcggaccttgctgcggaccctgtggaccgtgttgcggaccctgttgtggaccctgttgtggaccctgttgtggaccctgttgtggaccttgcgggccctgctgtggcccctgtggacctcgttgtggcccttgcggaccctgtggaccgtgctgtggcactatggaaaaacgaaatggccttcagcggtgctgtcctttttagctgtgatttcccgaataagcaaccaaactgtgtccaaaaaaagatttcattagtc

SEQ ID NO: 26460 - protein, 72 aa, DROSOPHILA
MGCAPGGPCCGPCGPCCGPCCGPCCGPCCGPCCGPCGPCCGPCGPRCGPCGPCGPCCGTMEKRNGLQRCCPF

SEQ ID NO: 26461 - DNA, 2689 bp, DROSOPHILA
acgtaatagttgcattgggcttaaaaggagcagttggtttatgccaacatgctcaggtaattgggacgatgcagttggaaaataaaaagtaatcctgcccttgcagcaattaaattagccaaataggggatgttaattagtgtcaagtaccttgaagtaaatggtgccaaaagaggcgtggccgaggccaatcaaaatgatttccaagcaatgttactcatacgccccatgtagctggtcccagtcaattattaatggctgctcggcgcgagtgcagactgctgacatctcaattcaggcgaattgtttatagtatgcaagcaataggatgccagaggaatatctggggaactgattttcatcattcatttcgccagtcgacttttccactttccacgctgaataatgaaggcagccattttaagtgtgcgcctgcgaggcactggctctcccgatgacgcagttaagggaattctcggatatgtaagcttctagcatttaggcctcatacaaatgtatagcgcatcctgttatatgagtagcagacgagcaggataatcaagttccggaaggggtcgaattagagctgcctgccagaatcgcagtcgaaacgcttaatcagtgctatatgcaagtgtaatcctagaactcgcatatgccgcagccgactattgctgtactcagggaattcggggtcaatccctgcagaaatgttcgtaccaattcagaatatatgtagaagttaaaaatctgcggttttgatactttaatactttctcaatatactagagcactatataagtcctaactcctcatacagatatatatattttggatcatgtgaaaagtttgtaaagtttaaatataaagttgagaaatattttgtaaatgccttgaaataacactttgaaatatattttctaatctcagttagccagtttagtggacagttgaattgtcccacccaaaattttttgtttccatcagctgtgtaaggcccggtcatcggacttcgatcaccagaaatttccgcggctatgagcgaagaaatcagaacaaatcctccgagaatgtggagcaggtctagtccgtcccgcgtcgtagaagccgcgatgattggggatggtccgcatgtgttactaccacgtcaaaacaacccaaatcagccaatttcgacggcagcaaatcaacgtccccgaacatcaacgtcccgacgattgaagtttctgagaaaaatggcgttcagcaacaaaataaggagctttggaggacctgcatccaggtttggttccctttcgcactcggatttcggaatgagacgagaactgcgaggcgatttccattggccgatgatagagagctggcttgagtttcccacctataataatgaggtagacgaggatagtggtgagctccacgaaagtagattgttcacagatcgacgccactggggacgggctcaactgtacttccagcagtatctagggatccagcaccgccatcaccacgatccgagatcattctccctgaaactcggtctaagccccgcacacataaagtccatttacgacgcgctgtatggcatgggtctcaaagagaccttgaggctggccttcaacgagttgctacacttgcactagctttggggacttttttgttccaactatcggtaataaaatttaaggctaactttttattcttaatgtggcaacttgctcctgaattgttcccactggaaaaccctttaaaaaatagcactcagccgccggcaagttttttagccaagatatttggccaagaaaatcgcgatgttgtgcatttatggaaatcgtatgccgctgtgtgttcgccagtacaatgcgagtgtttgcagggcttgaggtaactttgcgacaaaaactaaacgaaacgagtggaattttaaatacccttatttacatcccatatgacttagcactttctttcacaatatgcccttgttttgaatttctctggggaaatgatgtataatatccccgtctgactgggctggtatccacatatgccgcaactcttgcacagcgctcccgaaataacaagcaatgaacagcgcgcccagcacgcatgtatgtgaatcccgcacttatacacgcacactctccaccttcacacactcgcacccacaaacacatgcacaaaagacgctctgcgttcattttgcgccttatctgcggtcgcaagtgttgcgccatcgcagcccgagtgcctgaaattatgctaattccttcgtttttatgcagccaacatggagcagcagcgggaatctgcattctcatggccgaatctcctccagctcctccagctgctgcgtgttggttgttggttgtcggtcgccggttgttgcttgttggctcttgctgctccggctgcgcattttgcggtcgaggcactggcaaaacggacaccgaattctaggtaatatcacccgcatatcgatacgatactaggattaattatgaatgaagtagttttaaccttaaaaacaccttttcattattcttgaaatataatatatttcactaattaaagtggcctaatttgtatgtaaaactcttcctgtacggtatgcaagtttttttttacagtgcatgggtagtacgatgaattttacggcatagaagggacggcctgctgataacgcaacattaat

SEQ ID NO: 26462 - DNA, 580 bp, DROSOPHILA
ggtcatcggacttcgatcaccagaaatttccgcggctatgagcgaagaaatcagaacaaatcctccgagaatgtggagcaggtctagtccgtcccgcgtcgtagaagccgcgatgattggggatggtccgcatgtgttactaccacgtcaaaacaacccaaatcagccaatttcgacggcagcaaatcaacgtccccgaacatcaacgtcccgacgattgaagtttctgagaaaaatggcgttcagcaacaaaataaggagctttggaggacctgcatccaggtttggttccctttcgcactcggatttcggaatgagacgagaactgcgaggcgatttccattggccgatgatagagagctggcttgagtttcccacctataataatgaggtagacgaggatagtgatcattctccctgaaactcggtctaagccccgcacacataaagtccatttacgacgcgctgtatggcatgggtctcaaagagaccttgaggctggccttcaacgagttgctacacttgcactagctttggggacttttttgttccaactatcggtaataaaatttaaggctaa

SEQ ID NO: 26463 - protein, 127 aa, DROSOPHILA
MSEEIRTNPPRMWSRSSPSRVVEAAMIGDGPHVLLPRQNNPNQPISTAANQRPRTSTSRRLKFLRKMAFSNKIRSFGGPASRFGSLSHSDFGMRRELRGDFHWPMIESWLEFPTYNNEVDEDSDHSP

SEQ ID NO: 26464 - DNA, 3670 bp, DROSOPHILA
gagagagagagagagagagtgcgcaatcaagtgggagaaaatttccctttttgagtccaagtctctccgagaagaaccggttttcgagtgggttttcgaatgacattggagtgagttcgggtgcagtgcatttgttccactttctgagcaggatatttttggcacgtttttgtgtcgtcggagccttttgtgcattgagtttttgccacactgccggcttatggtcagcatgagcagaaatgaagcgtgctgtgggtcgaatccccttcctgattttttgttgttttgtaccccattttagcctttttggaagcaacagcaactgctggcagcaggaagcattgcggtatcctgacgctcgagggactcataatggtcgagattttgagttctggttacagtttgggctctgggctactttaaagccagtgaaaactgggttagtttaagatggctaaaagctagacgtcacataatttccataaattcttcatggcccaaacaaaacttttagctggccataattcttcgtttgatttggcgcaaacttcgcgctcaggcttatcaaatgcctcagaacccctttttgcctttcattaaaatcagcacagactgaaactttgccacaaagcaatttgctggaaaaacacaagaccgaaaagcgttggaaaaactttaaacaacgaacgtgaccgaggtgaagttttcccttcttaacagcgtttttttctctggttttcgtacggaaaatatagtttttggtcaaactaggtcagctggagagcaaaaaataaggcagggagaaggcgaaaggacgtcaaacatttaaaaacataaaagacatgccagaaattgcatgcttctttaagcaaggacttgacttgatttcttgagtgcctcgcccacgactcactcaagagcgagtgaatcgagaaaatgagtgagtggaatggcaaatttcccgcatggcatggcattctcagcgacccgatgtaggtattatgctctgccagctagcagtcagtcaacttatagccgctccagcgaacggacgcaccgaaaatcgagctatagaaactctacggcaaataaaaaacccgaaatcgaacccatgacttatatatagagccaaacgatttgtttacgtgtcgtgacgcgagtgtgccagcagttgtgtgcgtgtgccagacgcaagcagaaaataaagtttacaaattaaaataaatcaaaggcaatcaccatgattagcaccacggattatccaacagtggagaccaccacaactgccgaagagctctatgcggagtacatatccgcgccggccagcagcatgagtcccgctgcaattgccgagcacctgcagcagaatcagatcaccttcgagatacccagtgcccacgatctgcgacacatcgacgccctcaactccttcaacgccctgctccagaggattggcaacgcagcggtgtcctacgatcccgctccacccagcggctggtctccggatggcagcatcagcaccgagcagctctccaagtcggtggttctggatctggccgacttgcgggataggtccgaggaatcgggcgaatcctcgtggtggagccagatcttcggggatgccgacatgcatgtgatcatcaattatctgtggatcggagtggtcagctcgctggtcattctgtcgctggtcttcatcctcttcagctgctacttctacaggaagttccgcacttggaaaaaatgcaataaggacatacgtgcccagatccatgcggccagtgactcgtactcctcgcacctggttggttgcgatgccagcagactgctgttgcaccagcagatgcagcatccacatcatcggagcagcgaggctgggttctaccaaatcgaatcgccgccctgctacacaatcgccaccggattgcccagctacgatgaggcactgcatcatcagcctcggcactttgcctacggcatgaagttcgtttatccctcgttggcggccgtgcatcatcatcaccattgcatttccaattgggagaagcaggagccgctgaataagctgcaaaagtgcaagctgtcagcggcagcggcagtggaggaggataaagccgactcctcatcgtccacgtctgcatccgcgtcgccatcctcttcggaatccagcaacttggccacagcaacgcctgccatttgcattaacatgccaagtgggcggcaggatgaggaggtggataattcagattccgattccgcaattgcagttgcagtggcagtagcacaaagtttacagccggcggcgcctgccgacgatgattgcgcctcattggtcgttgttgttgccgcgtgattgcccacccaggggtcagaggtcagggaataaggggtcagtcgagggtttagggccgggagtagcagcccaattgcttagtcacttgtaaatagttgcatcgtctgctaatgttgtttgccccatgtaataacatatatctccgagaatgtaccctctccctccctctaagaaaatttagttttggtttttagttatctgttatatattattgtattacgcaagactgagtattatttattgtactatgtataaaaccgaattgtctatcgattaagccctaatatctaagcgagagttgaagaaaaaatataaaactcgaatgaacacattgcaaactaaattgaaattttcgttttcatttccttatcagtttttcagttgcgcccaatgccaaataaaatcatatccaatgctaggcgacttccactcccattgttgaccttgctggcagtgcacgaatcctaatctctcagatatccgtactttgggcagagcaaatatcagatgccgtttggggtttcggatttggttttgttctgaaattatgtacgtgacttggatgcgcctggtcgagattaggtcagcagaaatgcagtgcagctggggaatgctccacgaacgtgcactgctgaaaggatttttcagcatccgttttaagtgttacttaaggatttggccaaataacggattaagtcagaaaagtttatagagaaaataaagctgattacacaagcgcatgtcttaaaaaatggtcagttaattaaatgattgtgatcttctggcatcaatatttgtctacgattcatttaagatatccattgatatttgatatccccgctttttcccttgtaaagatacaacttcaatttccaacataaaaaatgttgtccaaccttaagacatcattgttcaataactaacaaacacagacagtttcttaaagttgcagttactacgattaaatagaaacattaactagcgtaaaatctaaagctaaagctcacaaaacaaacaaccggaataaatattgtatactatggaaaggagaaagggaagaaattaattatgcaaaaatatatatgaaaagatattatcaaaccaaaaaaaaaaaaaaaagagaacaaaatcttgaaattttatttgcctgtctgggatgatttcagctcctcaggcgatgaacctaattgggtgtacagaagacccaaggaacctaacggccaacaaagcagcactaaaaacacgagttaaagcttcgtgcgagcataaataatttcatgtcaaatttgacacttttgttgaagcttctgcgtcttt

SEQ ID NO: 26465 - DNA, 1670 bp, DROSOPHILA
tatgctctgccagctagcagtcagtcaacttatagccgctccagcgaacggacgcaccgaaaatcgagctatagaaactctacggcaaataaaaaacccgaaatcgaacccatgacttatatatagagccaaacgatttgtttacgtgtcgtgacgcgagtgtgccagcagttgtgtgcgtgtgccagacgcaagcagaaaataaagtttacaaattaaaataaatcaaaggcaatcaccatgattagcaccacggattatccaacagtggagaccaccacaactgccgaagagctctatgcggagtacatatccgcgccggccagcagcatgagtcccgctgcaattgccgagcacctgcagcagaatcagatcaccttcgagatacccagtgcccacgatctgcgacacatcgacgccctcaactccttcaacgccctgctccagaggattggcaacgcagcggtgtcctacgatcccgctccacccagcggctggtctccggatggcagcatcagcaccgagcagctctccaagtcggtggttctggatctggccgacttgcgggataggtccgaggaatcgggcgaatcctcgtggtggagccagatcttcggggatgccgacatgcatgtgatcatcaattatctgtggatcggagtggtcagctcgctggtcattctgtcgctggtcttcatcctcttcagctgctacttctacaggaagttccgcacttggaaaaaatgcaataaggacatacgtgcccagatccatgcggccagtgactcgtactcctcgcacctggttggttgcgatgccagcagactgctgttgcaccagcagatgcagcatccacatcatcggagcagcgaggctgggttctaccaaatcgaatcgccgccctgctacacaatcgccaccggattgcccagctacgatgaggcactgcatcatcagcctcggcactttgcctacggcatgaagttcgtttatccctcgttggcggccgtgcatcatcatcaccattgcatttccaattgggagaagcaggagccgctgaataagctgcaaaagtgcaagctgtcagcggcagcggcagtggaggaggataaagccgactcctcatcgtccacgtctgcatccgcgtcgccatcctcttcggaatccagcaacttggccacagcaacgcctgccatttgcattaacatgccaagtgggcggcaggatgaggaggtggataattcagattccgattccgcaattgcagttgcagtggcagtagcacaaagtttacagccggcggcgcctgccgacgatgattgcgcctcattggtcgttgttgttgccgcgtgattgcccacccaggggtcagaggtcagggaataaggggtcagtcgagggtttagggccgggagtagcagcccaattgcttagtcacttgtaaatagttgcatcgtctgctaatgttgtttgccccatgtaataacatatatctccgagaatgtaccctctccctccctctaagaaaatttagttttggtttttagttatctgttatatattattgtattacgcaagactgagtattatttattgtactatgtataaaaccgaattgtctatcgattaagccctaatatctaagcgagagttgaagaaaaaatataaaa

SEQ ID NO: 26466 - protein, 370 aa, DROSOPHILA
MISTTDYPTVETTTTAEELYAEYISAPASSMSPAAIAEHLQQNQITFEIPSAHDLRHIDALNSFNALLQRIGNAAVSYDPAPPSGWSPDGSISTEQLSKSVVLDLADLRDRSEESGESSWWSQIFGDADMHVIINYLWIGVVSSLVILSLVFILFSCYFYRKFRTWKKCNKDIRAQIHAASDSYSSHLVGCDASRLLLHQQMQHPHHRSSEAGFYQIESPPCYTIATGLPSYDEALHHQPRHFAYGMKFVYPSLAAVHHHHHCISNWEKQEPLNKLQKCKLSAAAAVEEDKADSSSSTSASASPSSSESSNLATATPAICINMPSGRQDEEVDNSDSDSAIAVAVAVAQSLQPAAPADDDCASLVVVVAA

SEQ ID NO: 26467 - DNA, 2168 bp, DROSOPHILA
ttcttagaactttacggaaccatcatgtgttgcggaccccttggattctgcggaccctgtagcccgtgcggcggtccttgcggaccttgcggaccctgtggtccttgcggttcctgctgtagtccttgtggatcttgctgtgcgccttgcggcccttgcggtccttgcggtccttgctgcgggggctgtggtccatgcgggccttgtggaccttgctgtggaccttgtaggccatattgcgggtgctgaacaacaaccacaacatgtaaaatatctttttcctgtgaaccacaaagtggaacttaggactgaatgcggataaactcttcttagctcgcgggcctagtcaataaaataagaatttcaaaataccttttccgatggtttttctcttctaaatggtgcaacctttgtcttagctatggataccaaatgcgtgacaataataatttatgtaatataattgcgaaaattaaaattgtcaattcttggtggattgcgatcgttagagggggcggaggaacatcctacgttcatatcgactaggcttgtgatccagctcaagaataaataaccttttcttctattcactatagcatagctattactctacgagtggcgggtataaaacctgcaaccgtgaatttaaacctcattcaataatagtatttgtctgcaaacggacaaatgtccgataacaataattctataacaataataactatttttaaccatcaaccgctgtacataaacataattcgaattcatagtaggctatggaaatcgttcttgacctgtcagacccacctaaccttgtaagttcggaaaatatatcattctcatctcgacccttgtgctgctcgcatcaaaattttgttgttttgtcccaaatacttgttttttttttttggcttctaaagaccgttggtaaaaatgtttattgtaaagttaaaatagtatacatatttatttcgtttattttagacttctcgaattaatcatgtgctgtggaccttgtggatcgtgctgcggatattactgctgtggtccctgctgtggaccttgtggaccccgatgtgggccgtgcggatcctgctgtggaccctgtggaccctgtggaccttgttgcggaccatttggcagttgttgcggtggctgttggtgctaaatgctcgcaattggcagccgaatcgatttgtgaaaccataccacaatcccaccatggttaaactaacacctgaaagttaaaagccacaaatatatatatatgtatcttaatgcagatccatgttatcattgggatagttcaccattgctcttactcggcgttactcgttgacataataggaatgcgtttcgtaatatgtatgtgggtgtaggtttcttgatcaggaacactagccggatactaagcgagcagattgtattgcgctgcgagcacaagttgctatatggaaatggttgagacgttcttggtaataccattttattttacacgaatgacgtctcaaggtgattgattctgccttccgacgagcttcactaggacgttctttgttgttcccatctggatcagttgtactgcttgctacggcaggacattttcttaagcacgttattgtaaaattcactaaagaacaaaattaaattccttttagggcattgatataaaatttttattaattttgcatttgtttattttaaatctagaaggctttgaatctatattctactttcctgtgcaagttctatgtaagcaaacatcagttttcatctttcccttaacccaagaacatcaaaatttgagctcttttccaagctttttaggttcagcactttgtacgtagttttttatttaagaaaattgttggtataatagcttttcttttagttctcagaaattaaaaaaaaacatgggctgtgcaccgggcggaccttgctgcggaccctgtggaccgtgttgcggaccctgttgtggaccctgttgtggaccctgttgtggaccctgttgtggaccttgcgggccctgctgtggcccctgtggacctcgttgtggcccttgcggaccctgtggaccgtgctgtggcactatggaaaaacgaaatggccttcagcggtgctgtcctttttagctgtgatttcccgaataagcaaccaaactgtgtcca

SEQ ID NO: 26468 - DNA, 168 bp, DROSOPHILA
atgtgctgtggaccttgtggatcgtgctgcggatattactgctgtggtccctgctgtggaccttgtggaccccgatgtgggccgtgcggatcctgctgtggaccctgtggaccctgtggaccttgttgcggaccatttggcagttgttgcggtggctgttggtgctaa

SEQ ID NO: 26469 - protein, 55 aa, DROSOPHILA
MCCGPCGSCCGYYCCGPCCGPCGPRCGPCGSCCGPCGPCGPCCGPFGSCCGGCWC

SEQ ID NO: 26470 - DNA, 2374 bp, DROSOPHILA
gtccagatgtttgtgtctgctgcttggataacttgacatggccatcatttattgtcgattgcagaggagaaggacttctacagatgccttcactttcaagcagggttacctatgtggacctaaggaataacaaccttacggccctgtcacagaagaatcgttcttctatcgagaacagatcgttaaagctgcatttgcttgacaatccctggtcttgttcttgcaacgatatagaaaagataaatttcatgaagagtgtgtcttcaagtatagtagacttcactgagataaagtgcagtaatggtgagaagctagtctcgattaatcagcatattgtgtgtccatctgacctcttttattatttggcactcgcgatctccctagtggccacgatcattgccttaaactttttgatatggttcagacaaccggtcctggtctggttctatgagcacggtgtgtgtctcagtctgtcagccaagcgggaacttgataaggacaaaaggttcgatgcctttctggcgtttacccataaggacgaggctctgctggaggagttcgtggataggctggaacgtggtaggcccaggttccaactctgcttctacctgcgagactggctggcgggcgaatctattcccgattgcattggtcaatctataaaggactcgcggcgcattattgtcctcatgacagagaactttatgaattccacttggggtcgcctcgagttccgactggccctccacgccacctcacgcgatcggtgcaagcgtctgatagtggtgctctatccaaacgtgaagaacttcgacagtctggatagcgagctaaggacctacatggcatttaacacctatctggagagaagccatccgaacttttggaacaagctgatttactcgatgccgctactaccaagctacgttgactaggacattacattattaatttcaataagaaacaaaaatatataatttgttgtctcccacacagtttattttttgagatttacatagttcccggaagtattccgacaggtttccgggtcaactggtttagcagcaaggaccgcaaccgcaaaaactgctggtgccgccgcagcaaggtccacatcctccgcaaggaccacagcaggggccacacccaccacagcaggggccacatccaccacagggtccgcatccgccgcaggggccacagcaggggccctgataaatcatattaaaagtattcactcgacttacgagaccgataaatacataccccaaccaaaacgtaattcgggttgacgtacatgtacatgattttgtttcttaaaagatatttcccaaccggaatcgaaaggaaccgaaaatttaggtgttaactattgaaggtggaacggagaactgactgaatgtgatccaaattagccgaagcttcatttgacagcagtcatgagaatttcaaggctaatatgatccgacaaattatattcattattattattatattctggtatcccaaaacccataatctagttagctatggatattttcgacagttgtcaaattcatataccaacttgtgagtcaggtttccatcattcttattttggttctcggcctgtaatcatcgaaatattttttcgtcctaagttatttctttgttaggttcaaagtgagtatttctcaaagtgtaagcatgcgaagttttaacaaaatttttcttagaactttacggaaccatcatgtgttgcggaccccttggattctgcggaccctgtagcccgtgcggcggtccttgcggaccttgcggaccctgtggtccttgcggttcctgctgtagtccttgtggatcttgctgtgcgccttgcggcccttgcggtccttgcggtccttgctgcgggggctgtggtccatgcgggccttgtggaccttgctgtggaccttgtaggccatattgcgggtgctgaacaacaaccacaacatgtaaaatatctttttcctgtgaaccacaaagtggaacttaggactgaatgcggataaactcttcttagctcgcgggcctagtcaataaaataagaatttcaaaataccttttccgatggtttttctcttctaaatggtgcaacctttgtcttagctatggataccaaatgcgtgacaataataatttatgtaatataattgcgaaaattaaaattgtcaattcttggtggattgcgatcgttagagggggcggaggaacatcctacgttcatatcgactaggcttgtgatccagctcaagaataaataaccttttcttctattcactatagcatagctattactctacgagtggcgggtataaaacctgcaaccgtgaatttaaacctcattcaataatag

SEQ ID NO: 26471 - DNA, 319 bp, DROSOPHILA
aatagttaacacctaaattttcggttcctttcgattccggttgggaaatatcttttaagaaacaaaatcatgtacatgtacgtcaacccgaattacgttttggttgggggcccctgctgtggcccctgcggcggatgcggaccctgtggtggatgtggcccctgctgtggtgggtgtggcccctgctgtggtccttgcggaggatgtggaccttgctgcggcggcaccagcagtttttgcggttgcggtccttgctgctaaaccagttgacccggaaacctgtcggaatacttccgggaactatgtaaatctcaaaaaa

SEQ ID NO: 26472 - protein, 63 aa, DROSOPHILA
MYMYVNPNYVLVGGPCCGPCGGCGPCGGCGPCCGGCGPCCGPCGGCGPCCGGTSSFCGCGPCC

SEQ ID NO: 26473 - DNA, 22901 bp, DROSOPHILA
caacgttaccatttcacctctgtgcgctttgccgactcgagtcaaggtccagggcggtaccgttaattcaggactccattattttccgttcgacctggcagcccttgacccatcccgctttccagccttcttcgctgttgctaaccagctctagtgcacatggatttatagggtgtattgagacttcttgtattagtcatctaaagattttcaattctctttcagttgctctggatccaaggaagggtactaagtttaagcccacagcatgtagtacatcatggttaacacggaacgcagcgtgcttggtccagtaggaggaaccttatatagaccgcttcaaggtaattgtaccggaatgggaattaactggaaactttttcgccgttttgtaaactatagcactgccgcggatctacaattacaactttaaaccaaatggatgtatgcaccgcgaaccttaacagatcgaagtgagaccatttacaaaagaaacacggaagaatatttaattttagattccagaccaggtattgttattgttgcttaagaaagcaatttacggtttaacgcagtcagctagggcctgcaatgagaacctgaataatgctctggaggatttgagatttgttgcctgtgataacgaaccatgtttatacaaacgatgatgacgacgtaaacgatgtttatgttgacgataaagtcaacatatcctcttagtctgccaaacgcaagaggacttagttaatgcagtgcgaggaggcgatcttgtagcgatttcgctaggtcattcccgcagtctggagaaagtctgccataagagtttattaagaatctatattctttatagcctatccttacaatttagtgtatcgggttgccttggcttttcatttttaaattgggttttcacttaagcgatcggtcttcccgtaaatgttgagaaatgtccgccctttaaagaggaaatttgtcaaaaacgatttatatgtgtatttttgattatattatatggggtcgattagagttatataagaatgtaattgtcgataaaactgaatagattacagcattaagattgcttttaataaccagagataaacgcaatgattttgatactactccgtgtatggtaattaattgatactgatagaaaatcaatttttaaacagcgtcagcaggactctggaattcagataatgcatgtatagggttttgaacctttttttgagatcccttgcgaactttggcccgtacttcttctggtttttcaggcctgaccaatggttttttttctggtgctttcatcttccatacaacaattggagactataaaaaatttaaattgtttagtatcgtacaattttttgtactaaaaaacacttacagacactgttccttgcctggtatattttgttgatgccacatatgagtactttaccgttaatacaacggcattcattaaatttttagcagcttgaattaacgatgtagcgctgtccagctataaaaaacacatttttaaatatcagttttcatcatctttaataatatacgtaccccagaaactataagttcgccgcttatattttgaacgtctgcttttacttttgaagttatttggatttgatgacaatacagggcaatgcgttgcaaatacgctaaaaggtcctttttcgtgctgctttctgggcattgctctgctatttccctggttagtttatccagctttgtaccagcttccgaaatttttttagctgcgttaataacatccatagtagtttttaaaggtcctcgtcctctgaaaaaaaaaaattggacagttgttgggcaccacacatttgtcttgacaaatttgatcgatatggaaaaaacaatttaaaaaaaaaacatgattattatattatcgcagcgccagcagcacctaaatttatatcttcagttattgccaaaattggagacacaattagtcgcacctcagctttcgttaactatgcagatcagctgggtgaacatctgttcagaaacatctgcttaggctctcccatatcacattttttctcattcttgctttctcgcacctacacctttggcttaacgttctgctgttcggtctgcaattatgagctcattgtcattcacttttgtttcttatgcatataccaatacacatcttcgttcgaaatcgatacataaaactcgtcttttaatttctctgaaaaacagctaattaaaaggtttaaaagcacaacatttggtgtccccgacgtgatttgtgcataaacaatatatagtgcacatcatactaagatatttaagctttaactttaataaattcgctgtcgctgagtgcgttcttgggcaacaatttgtgtgtgctatattaagtcaaaattaatggtagtgaacattaaatgcaactccgttgtttaaataaatagttatatttgcgcgcgtacataaataataaaggaagctgccactaattcttttttgcgctcatcttcccgcttgatttcgagtggatgtttctgatatttcgttgttgttggtgttgctgttgccatggctgctgaaaatttatcaagctctgcaataatttagtttgataagtccgttcttcatgtgcgtttggagctgatcgatgagcttcagcaaacattcagaaaaattctcaacgagctcgaagaacttgattttgacggaattgaaagtgagttgacattctcgtaacgctttaatacttttgttcggagggagatttcatagggcgcctcgcaaatgtattcgcactcaacgtttgctgattgcatactccatgtgattgtcgccatcggcaacgtccactctaccaccgtcgcttttcagcacacaaaattcgtcgaaaaaaaaaaacttatgaacccctccaacactttgtaaaagttgaagtaaatcaagagagaatactatagttccctgactatcagatacccgtttctcagctagtgtgaatgcgaacgcgcaatttcatcattttcctgggatatcgatagatgttggggaatataataaaaaaaaaaattataaaaattgtttaaaagtgtgggcgtaaccgatttggcggcttaaaggcgatagattgggagtgacaaaaagttttttggcaaatcgatggcaatttaagcgattaataaaattatgaacaaatatccaacaacttttaataaatgctggagtgccgtttttggacgattttaggacgttggagtgggcgtggcaaacaagatttttggcaaagaaatttacacaactgataaaattatggaaaaatattcaacattttttcaaaaatatgagcgtggcagtattgagcggttttagggcattgagttcatatcgataaagaatatatatatacattatatagtcggatacgcttccttctgcctgttacatactttttaacgaatgataaaaaaaggtgttgatgaattcgggcataaaaagaaaaaaaaatggtcctagatttcaagaaaattaataaaataaaaaacgtgagtgatgaatacccaatacctcattatttctttaatattggcaaacatgggtgaggctccaaattatacagcactggaccttaaagttaggcttccaccaaatatatctggcggaaagggatagacataaaaccactgtttctgtaaactttataagtattgcaatcttccgttcggtttaaaaaatgcaacgagcatatttcagagggttattgttgatgtcctccgtaaggaggtcagaaaaacctgccatgtttatgttgacgacgtgatcatcttttctaaaaacaagaatggccacgtaaagcgtattaactgggttttaaaaaccttgaagaagctaacatgatctgtgatcggagcactcttctccagacactaacagtcgtagtaaattcaattcaattcagtcgtcaatggagtccatcgcgaactaccgatccattgtttttataaaacacacactaatcgaacttttcccaccatttcgatattggtaattggcatcctagttatatcggaacaaagggaaatattaacgacagaacatagccgcccccaccgagcggtacaggaaaatgttaagcaaattatgcgtaactatttttttcttaacatatccgtattaagaccagaaatcgttgcaaattgttaagtctgctcaagggctaagtatgagttacatcaaaaaaaaaaaaaaaataataataatcaaatgaaaggaattgctcgatgtgtgaaacttgacaaaaagataagcgacactctagatctgattctactttcaacaatcgaatttaataaaacaaatcattcggtaaccaatataaaatcagttgaactcattcgttcaaacaatgtggaaacagggctgcaggtaacaaatatacttttgaaggaccacagtcttaaaaatcaaacaggaaaaataaacaaaaaaaaaaaaaaaacgggaaaaataagagctatcaagtaggagataagtcaaacaaacgcatgggtaataaattgaccccactatgcgttgagggcatagtggaaacacaattaggatcaacagttcttataaaaggaggggttgtccataaaaacaaaataaaaaaagaaattactaattctagtaaataagaatagaattggaactacacttttaacttcttttatcttagactaacatcaatactgatagcgctttaaatgacgatgtttacgactacaacagttaaactgacaaatagcactttcggacaacatacctgtaagtgccatttgggaagagtacggttaccttacaatgaacgtgacatcgtatgagacgaacacgtacgaaacagacagacacaaaacttatttaaacaggactacatacggaacttactcctcactgaccttgggcacatcaacacactctaattacgacacttaaggtcaaccacgtcagcacgtagtataaacatgctgggacagttctgaaagttgtagcagggactcgtgatctcgatgactgggaacagatcaaattaggaaaacacaacttattgattcagaaaaccgacaaagagtattaaacacaaaatttcagacaagactcaacgaactaacttaaatagttaacttaactagcaaaacagatgaaattgaatcagataacctgcataaaacaattccagcaaaaaatagaaagattaccttagacatacaaaacttaattctttgcgtaacacattcaaaaacaaacttgagcagaccattaatgttaaacaacgttgatgttaaggagtattatactattatgggatacttattaagtatcccatacctaagttagtatgtcaaaaaataaatatattttccatacaacattctggcaaaattctggacttcgaaaacacaaacatcgccgcaatgcatcactcgccctgaccatctggatagggtggttgtaatagacgtttgtgcgatcattatcaacgattacagcacattggtgaactacaatccatgttgacccacagacccatatggaccacattgacagtcatcatgatttgcctggtactggtgcgaaaaacttacgtgcgaaacttcggaacgaatcgagatcattaagaacctacaagcaaacgctaggaaaaccacggacgctcttcacttagctgagggaggagttaacacaagctaagctgaatcgggccaacaggatgggagtgcaacaaagttgcgacacccaaaggtggaataacttgatccgcacacatagcaaccggcaaagtggcctgccgcgacgctattgatcataatattgtctaaataactgaaaaactactttgttaatttgcatacataacatgccttaacatatcccaaagaacatatagataagtaacatataacgcagccactctgctgtttttctcagcagcagagcagcccttcgctttaagctttctttaagcaaaatatgtgacaaacattgattcaataaaaacacagagcagcgactagtacagtcgttcaaattcaagcagatctttgttttaatatggctaccaaaacaacacacaatccccttatccaaataaataccacatgcccatctgaaaaagataatataagcaaaaccgtatccattaacaaatgcattgcataagtcctaaattgtttttataactatcgccaaacgtttatagttttattttaaccaccaaactattactatctagcaacaagatctatatctctatatgtttttttttatctatatctatatctatatctatatctatatctatatctatatctatatctatatctatatctatatctatatctatatctatatctatatctatatctatatctatatctatatctatatctttatctttatctatatctatatctatatctatatctatatctctttttatattatttcagtctttgcttaaatccaataattatttaacgtttctaaatttatgaaaattagaaaattcgcagtcaacacagtaacaaatttatcaaacatctttccgttaaaaacggccaaccgaaaggctcatccagcaagtttaatattaatattaggaccgcataaaatacatgtctaaagctcaatcttccattttcacaacttaaaaccaatctaataaaatagaactctgaaactagcgaaacactgccctaatctcgttcgtaaccatttcccctatcacattggcatattaggcaacaaaaaagtaaaatctatacataatttatccttaaatctgggctgcaaattggaaaaattccgttttatagtttaagatctattacaaataccttggtgtcattttagatagaagattaaccttcggtagacgtgtcacctcggttcttcaagtattcaagtccaagtccttttataattcctgagatctcaacgttcatacgaacagacgggcatggctagatcgactcggctattgatcctgatcaagaatatatgtgtcgcgacttttcattcacttcagcgtccatattgtccagcacagcaagtcgcctgcgtgttgtgccttctattgttctcaccagactaatttactcaagcgtcgccctctcgatgctttttttctattcctcaatttcactcaattatttcatccttacttcgtacgaaactctagcacaacaacaacacacgccagctcattttaattcacacacaaatgattctcactcaataacggaacgctttccgtgaattttaatactcgctgctcattcttaacataacggatcaataacataactttggttacattcaaataataattgaaataatactcaatctcaatccactcaatctccgacatatgtatatactttatatagtcgaaacgcttccttctgtctgttacatacttttcaacgaatctagtatacccttttagtctacgagttacgggtataaaaaatatttaaaactacttataaaaacttcataaaacgacaccaacaacaggaaaatcaaaatccttatagcacacaacttcactaatacctccttaacacaaggccatttgcaacaatttccggattgacattaaaaatataataaactaccattcccatgtgatatatgtattatatataagcctttaaatcgtacagctcaattagtgtaatttcttacccaacaaacaaatataatcctaaagacctagttcttagttagcttagattgcctaatttgcttatagtttcacaatatccctaaaaaggttttcagaccgaggataactttggtgtcttaaaagaacgtaacaccagttttgtttcggcattatacgaaatttggtattaatcaaattctttcatttgagcgtaaagattttgttagtcaaaaaaaggtaaaataaatattttatctaagggaactaacctggtaaaatccgtcatttccatcataatcatgcacatatgtttggccagaaaaataatgtcatttccagtgtcatcccatttagcaacttctgaatcaaaagttagtttttccctacggaataactccacttgctgagcaattttttgtttgtcttcttccgtcatttttcgcattgcttcctgaaatatattgttgtatccatatttatcgggtttaatgatattaatggcaagcaatgacttactcgagctgtacatatgccacttatatcgggatattcgtcaacggtttgatcgccggtatgagcacttgctaaataataggaaacaaaaaaatatgctagtgaattggcatacacacttttgaaatttttaatttaaatttttatgattattactaatttgaaaatacccattttcaaaaaacgaatagcacagagctcactcagagcccataataaagaaacaagaacgctaaagtcgagtttcccgactatccccgacccgttactcagctagtgtgaatgcgaacgccaaatttcatcacttttcttggatatcgatagatactgggaaataaaatgagaaaaaatttaaaaattgtccaaaagtgtgggcgtgaccggtttggcggctttagggcgttatattgagcgtggcaaattaacaaatctatagcaactatagaaattatgaaaaaatatccaaaaattttttgaaaatgtgggcgtagaacttttgggcggttttatggcgttagagtgggcgcggcaaagtttttcttttccaactcaagaatatatatactttatatggtcggaaacgcttccttctgcctgttacatacttctcaacaaatctatgtatacccttttactctacgagtaacggatataattatttaatctccgaaagtattacgatataataatattaataaactaaatttctctccgtttttggagttataattataaggtcagaaaaagtggttaaatttcacaccttcatccaattttttcggaatatgcagattctactcacatcgacttcgagtttccaaggttaagtcttcaactggctcaaattcagtatctgtatcaaggtcttccgagctctgaaaataaaaagatattattagcaatttggatgttgtttttaggaaccaatgcctaattatatagtaagtcaataatttgtactctattctattatcatctgtgcgtttaaaatggttgaggtgttgaattttgagataactggttattttgagatcctattatgtacagttgtaactcgttggtgcttttcttcttctcttcgaatctgtcgttcttgtttagaaaccttattctaagttgcctttatttagccgtcgctttcatatatgtgactgtgtataccgtaatgcatgataagaccaaagagagtaatagttatcagtgtttcttagtaactagggagtgtaaaaacagatggacaatttgcattaagaattgttttgaaagtatcgcaactaaactagtccagtgataagaagtaacgtttcggagttagtcgttattttataggtaaaagaaaccggttcagactctataacatgcatatattcttcattaggattattagccgttttcgtttgttcccataaccgaattctcttaggatattgacaccggctctataaaaaaaatatattattaaagagtcaatatacattttcaatcacatgcagtaaaatgcagtaatgcttcgaatattcttttataatatttatgtgagtgttgcttttgtctaacggtagaagccaaatcataaatctaagaatatgggcatcttatactacttactcgattcattaaaacagctcttcgaatttcacgaactccgtcgtaaaccaaacgagaagcatcaatgaagtcattttcgtcaacatccttattggagttatttgaaagggctccaacggctgctcctacacgttggtcaaatttcatcataactaaaaacaaaagattaatttaacggcttcgcgtaccaagattttacgtatataaaaagccggtgtgaaattggtatgcacacccggcagtgataaagattaaaaaggactatgcatgataataatagttatttatcttatattaaattatattatcagacatgctccggtagtcaaattcgtaagaaccttaggattttggtgctcctgttttcgaaatcgtaaaatttgtttcatttttaaactgaagagtaaagccttttttttatcaaatcagattttatttatttatttaggaaaaaagcatactcagtggtctattgaagtttattccacatcaccacaagatcattctgccacttagttatatacttataaaatttaaaatagtcaacttaattagttacttaaatggtcaaataaaattaaaactcagaaaaaggtggcagctttattgcctgtttactgtttacaaaacattccgatagcaaaaattttgcaaaaaccagagcacctaaaaacgaaatcgaaagattttgtccaaatcgcaataaaattacgattaccggagcatgcctatatattttattctatattcattcttaataaatggcaaagaccatagtattattgatagttgtattaagtattagtattaatatgtttaatttgtctgtagatataataatataacacaaattagtcggcactaaaatttagacagcacaacaattcaatttttttttatagcttactaaaatattggcataaaagaaaagaacattttcatttcgctttattcgaagtttattttttataatctttttttataaccaaataatgaaaattttgtttcccaaaaacaaaagtttatttaatattcaattaagaaatttgagaactctgtataggaacatggtattcttgtctatatgtacttatggccaaaacgattcaagtaccacttaaatattttttactatattacgtaacgaaaaaatgagaatttaataggaacaaatatttataagtaacgtatatttagttacattgaaaattaacacataccttgatctcgtagaactttgactgcttctaagactcgtttggtgtaaatacatggttcataattatccatttcagcttcaacaacattacaaactcgtgatgatcgaccttgaatagcaccagcagttgcacgcaaatccctggcatcaccaacttgtaaagccattacacatttgtttacatcttcaagaatgtgattctcagatactgctaaaaagtcgtcaattgttgtaatatcatccactgcctcggttaaaatacgaacttgcacctcccaggcttgtcgataagtagtcatattttcttgagctacttttgaattcggtctaacagtcaatatcgatgctgcatttattacttgcggacaaagactttcaatttgagcagcagcatatcgaaccattttaacaccatcttcattgtttgacatgctacatactaaatttgctacttcaactagtttttcagcgtgcttggtgaatatttcggacttttcccgaacttttttttcattacccgattttgcagcttcaattaaatctagcaaaggagttgtagtctccaaaaaagagtccgaaacatgatccacaacagcctttcgcaattgccttcttaggtcgcgagtctttcgacacatttgatcaatcgctcgagagagtcctgggctgttatctttttgactcatctaaacgtaaaatatgattaaaagaagagagaacgctatagtcgcgttacccgactatcagatacccattaatcagcttgtgcaagtgggaccaagaatattcaacttatttcaggaatatctgtagaaatttggaaaaaattaattttattgatcttagttgtgggcgtgccagttttggacggtttgtgggcgttagaaaaaatgtaaaaatgtttatcgtatacaaatagaaactggccagacaaataataaaacaataaaatatcaaaacaattttcaaaattgtgggcatggcagttttggccggattgtggacgtggtaactagcgatgtgtacatgttcctgaagatcaaggcgttcaaacggacagaccagatcgaagcgcttttttctatatgttacatacttttcaacgaatccagtaagccgttttactcaacgagtaacgggtataaaaataataattataagtatgttactcacgtttgacatatattcagataacaaatcctgtaaagcctgtcgcacagcattgcattcggccacaattctctctcgtctctcgtctcgagtacaatctgcatccgccatcaatgcagctgcactaataatactttccagacgctcttcgagcaattgacgtgaacgcttttcgctgtaggtcatgggatccataacaattccttcctgcagtgtagaagtccaataataatcggagaataaattgcattataataaaaaacaagagagagagaattccctgactatccgatgcacggtactaagctagtggaagcgaaaacgcgaaaagtgtgggcgtggcaggtttgggcgttttgtgggtgaaagagtgggcgtggcaacaaacttgcgctgcttctatgtatctgcttccttctaccgttacgtgtatgccactgcacagagggttatcaaatttcagtcagaagcttccgacgcagtaaataaagtatttggcaacaaataaatatctttaccatcagtatcaacagcccagtcaaaaaagtaatttatcagttttaatactgcattaaacccttccaaacggctgttatatcggaccgctacattataaagctataattgggttatcaagaaataacaaggcctcagcctcaaagaaattattagttagagaaagacccaagtgtataaagattttttcttcctttgggtgtaatgttaatgctacaatctgcaacttaaagcaccgtagacaggaaaaccataacgatactgatagaattttaatgtaaaagattagtttatcttacgtcaaagtcgtctaatgctgcagccagctctcccgctccactgtatatatctgtcggttgggatgactttccttgggcaacatcgctaatagtatttacagcatcgcaaacttgttttagaatgaaatcgcgatttacttttgctagatctagttccggatgacgaacgtatacttttgatgcagttaacagcatagttgaatgttttttaagcatcgcccgagcagctgctaaatcgtcccttaattggggatccttaagttcttgctgacgtttggctgcctgttttataagttctcctgcattgcgtccgaattgctataaaaaataaaatgttagaacatttttgtgatctttatttttttcatagttttaagattatagattattatagattaattataaaattgataaaattaaagggtttgattggcgtttaagtcgcaatcactacatattgaagcatgtccctcttcctttttatttaagggttgaattattccttaatacgcactaatgacaccccatcatttcttaatttcacttattttacctatttacctaaattacccatatatatataaatattttttactgccatatagaatggtgagtatggtgtttttgagatgatatggggcaagtttattggtttaatatgttttaataatttgttataagctagttgatatacgcaaatatctccgtctcgataataataaataataaaatcgaaaaaaagtatcactgtacaaaagtatgggcggggcagttttcgtcgaattttttgtgttttgacagaaagaatctaaaacaagaggcaatgctatagttccacgactagcagatacccgttattcatctagtgtgaatgcgaaatttcataatttttctgggatatcgataaattttggtaaataaaatgaggaaatatttaaaaattgttttaaagtgtgggcgtgaccgttttctttcgcacgggtcctacggccacttctccctcccaccaaaccgacagaggggcgccgccttgtatcgtacagctcgattcgcgagaagatatagacgcgatataaaaaagagaacaggaacgaggatatgaatataatgtaaaataactatattaaatattagtagtaggatctaattatgtaataaaaaaaaagttaaaatcgattgctttaagagcggcagagagtcaagattacagataataggataaagtatattatagtcagaacataataccctgtaagggtcatgcaactcatagttagatctatttaaaataaaataagatttaaaataaggagtatatagtttctagtgaatctacttggaaccgagaagttaagttgactaatcaattcgggactctcaacatcccccacgaataagcttacaaataaagactgttccaagcatacttctacggctagctagggacggtaaattaattaaaagtagtctactggaataatgggctaatatacggtttgcatcccgatttaagcgccgaaaggcaaaaagtaagaagtttttttgaccgattcaatgcagtccgagtggactacgtattgtggtacgtactaacgaaataaataaggttatagtcatgtaaggatcattcaaattcattagaccacctttttataaaacccagcacaccccctgtccttattgacaatagtcgaaatatggtcagaaaattttagtttagggtccagaagaacaccaagatcatcaacgttgtgcgtattgggttgacacgacaaaaggtcataactttacgtttggagccatttaagtctaataaattatcacggcaccatatttgaaatctgtctcgatcggattgtaagtccaaatggcgccgaagtgtccttgtgctggagcattatttaacatcgtctgcgtacataagtacacgcgaatgttttattactaataataataaataataatcgttaataaataaggtaaaaagaagcggaccaagttggcacccttgtgggacaccggatgtgtctcggagaatacaagatttaaaattttttaagaggacttgttgcgtcctgctattcagatagcttgaaatctaatttaggagatcaacagggaaacctaaaagattaagtttccttactagaaggtaatgattaacaagtcaaatgctttactaaaatcagtgtatatgacatctgtttgattattgaaaaccgtgctgacacggggatatgattgatctacaaaggtgctgcaaatgaggagtgataacattttcaaaaagtttagctttcgtttacagtggggcaaaatattagattcgacttagataccgcataagagtatggctattcggaaagaggtaaagttgaatatgttgtttgaaaaaacttggcgaatagatcggctattgcctgatccgatgttaccgttgtgtttttaaaaaacagcgaggaagggtaagaaattgtatttcgcttagtgctaacgaaattataaaactgtttcggatcctgtgcaaactggaacttacaacggtttaaataattttttttagcactgagcattaatcacggtaaagattaaccgatcgctttaatatttacaaaggatggactgagaaccggtatttttaaattttatatagagtctggactttacatttcttaggtgtgtaaactctttattaaaccaacgagttttagagattgacggatagtacatcagaacacaagagtcaaaaaatgatttaattgcagtataaaacatattaatcgcatccgccattatgttgcaggagtaaagatcgggaccaattaaagccagctataaaattgtttagcctccgaaaatttgccttgcgaaaacagggaattcgctttgttgacttctctgaatttacttttaataccgtaactatctcgattgccacctcgaaagtaggatgatatggatcttcaggttgagtaagaggtgctaccctggacagaaacacactttcaggatttgttacaaaacatagatccaacagtcgaccaagagagtttgaaatacaattaactttaagtcgataagtcgagcaagccttcaataaagtcatttataggtaaaaagaggagcgtggtatacagataaaaattcgcgtagcagtttaaggcggctttagggcgttagtgttggcgtggcatagtttttttgcaaatgaagagcaatttacaagactaatagaaaaatgaaaatatatcaaaaatatttaaaaaatgtggtcatgacagttttggcctgtttgtgagcgttagagtgggtatgacagcatgggtcaacaaacttgcgctgcgtctgtgtctaagatctgtatgcttaatctcaaccttctagcttttatagttcctgagatcgagacgttgatacggacatacggacgctctcttctacctgttacacacatttcaacgaatctaatataaacttttactctacgagtaacgggtataatacaaattgtagtctgcgtcactgaattctgcatgcttaatattaatcatagcatataaatttgtgttggttacaaataaaactcatttatcgaagactataggagggcaaaacatagaattgctctcatatacgataataatatttctttattttattccgacacataccctcatattatccataagctcgtcctgactcgaagcgtttttgagtttgtttagatcatcttcgacaatgtggagtgattttaagagcaaatgtacatcaaccatatcagctaaaatcagcaagcgggttacagctgacaacagattcctagctgcgcgcaccatatttcctctcttcagggaactgcacggatcttcagaaaattctctggctgcaatgctcatagcatctccagttttttttacttcatccacagctgttaacatttcttgtgtaatgtctgggttctcgtaagcgatctgttcacctttttgaataaaattttctgtagctttttcaacagctgcaactaatgcgctggcccgctttgattttcctgcaaatacaaaatacaaattagaaactattaaaattgagaagattattcgacaatgtttatacgttttttgatatttttaaaccacttaaatatatatatatgtaaaagttgattatttcctctcgatcaccaaagaaatttacaaatgagtcaacttacctaaatgaagctgccaaacagcttaaagtttaagatggaaaacgccgagtctacgagccttaaatactattaattcgaacggcatctgtttttttgcagaatgcaatattcaacacacattttcaatactataattgatttaaacttatttgattccaaggccaaggaaattgtttacgcttcgtcaaaaaaaatcgtttgcaatggggctagcgaaaatagatttttataagaaaacaaaacggcattaagtaatgatcaaatgatcacattaataaaatcgattttcgggtcttgcatcagccagcaatgcctaaatttcttatttgtaaacatgccaactttggagacacaacattaagctctacggcatctcagataggcgattatctttcgttgtctaagctactctctctcgccctctatctatcttgtactctcgcacttgcgaaaaaaagtgtttggtcaatcgataaaaatttacaagactaaaaaaattataaaaaattagggcgtaagagtgggcgtggcaaaaaattttaggcacatagaaaaatggttcaaaaatgtaggcgtgtcagttttgggcggttttagggcggctttaccttctagctaatgtgtcgacgttcatacggacatggctagatcgactcggctattgatcctgatcaagaatatatatactttatatagtcggaatttaacgaatctggtatactcttttaccatacagttttggcaagtctatagaaatttccacgactaataaaaatatgaaaaaacttcacatttttccaaaggtcaggcgtagcagctctgggcggtagaataggtgtgccaacatgggtcaacaaacttgagctgcgtaaatgtcttaatctcaaccttttatagttcctgagaactcgaggttcatacgaacggacagacagaagggcggacagggtcagatcaaagacactagaataacaagatgcgtaagggccatacattggtttttcactaagcagctacttgtttggtgacggccaagattgtgctcttttctctcgaataatattgagagcgtaaaataatagactttggttgcttgtgtgagtaacgtttaaacgtgaaagtgtatatgtgtgcgtacttgtgctagaagacgattttcgggccgaaatcaattttgatctaagaaacgaattaacatgtttggagttttcaacaggggactgggagaagtttttttttacagcattaatattaggttcatcaatatttaaacttataaatgaaaaaaagttgcgatatggaatagttattattacttttgtagtttaacacatacagtttaatacatttaaaaaaatatatttcataaaaataatacgaataggaaaaaattatttttaaaataatgccaattgaccaaaaataatatagatttaaattccaaaaacttctgaagtgtagggcatattttgtcaaatttacaatgcatgagtattcgtgtacacacaaaaagttttcggctgtcactgtatgcgtaaaatgaagttgctggctgaagagctctccgaaatctggctcttgaacaaaaattcaagagagctggagccagcccaaaaaatatttacttttaatggtcgggaacgcttccttctgccttttactctacgagtaacgggtataaaaacagtaattaaataatatgaagtaacaatttattgtattttaagggcctgacagctgtttacatcctgtgatagttctgtatatagttctcctgaccaaaatggttttgcaaaaagaattgacatgacttaaaacaaaaactggaatggatgctataaccgagtccccgactatcagataccccgttactcaactagaagtgtgaaagatttcaatttttttggaaaatcggtaaaaattgaaaaagaaataattatatttaaacaagaaatatatttttcaaaaagtttgggcggtttgtgggcctgacaataggtattttggcatatcaatagatttacaagatcaataaaatagtatgaaaaataccaaaacatttttgtgtgaaaaccaatttttgggcgttagagtgggcgttgcaaaacgttttttgataaatcgattctctccacggtacatttgtatacactttaattaaggaacggaatccatatctcttaagctacacattaggttaagttcagaaggaactgaacgattcctattgacgtatgactaataataaatgataaactctaataaaaaaaaaaggtaaatcgatagaaatttaaaagactaatgaaaatatgaattcatatgaaaacgctttgtcatacggacagaaagtcggacatggccagatcaactcggctattgatcctgatctagaatatatattttttttttggaaccgctttcttctacctcatacttagttttcaacgaatctagtaccccattttactttacgagtaacaaatatatattacagcgaaccccatagtaaatttccttgactatcagatacctgttactcagctagtggccaagcgaactataaatttgaacatttttattgcatatcgatagaaattggaaagatatacatataacaaaatgaaacacaatcaaaatatatgtaaatcactaataggctatttttttatattttcgcaattttgcgtttaaagaggtaaaagatgctttcacattccttttcagttttaagcttgttacatgaattcaaatgctttctatcctacaaaatttaagatgtcacaatatgtatgtatagtatacacagccgttttagaacattttctatcatttctcgtatgtacacaatacttataattaataaaattaaaatgagtatacgcacagttattcacgactcgcaaaaagtttctttaaaattgaaagttctaatatttaggttttctaggcactataagctataaacattttaccttttttctttttgcttgggcccttggtatttacaagagtagttacttgtaatacaaggggttcaagtgttttttcaactgacattgtgcgaatttccaaatttttgggatcccatttcaaagctatctgtccgaaatcggttaacgtgcccattttatcaggttttaacataaattctttaaccgacgacgcctttttcgataatatgtagtccactgattattaatagtaccaggattgtaactttgcagtgctgtaaagaatgcgggctttaaatatatcatagtcccactgagccacatgacctacgtaacgtaaccaatatataatgaataagttaaatagttttgtagttttgagtcctgtgagtcattctttagtaatgactttaagaaaataattaaaattgatttttgatgattgaactctcgtgaaaaatatgtgatattcaagtattgaagacgattgagaaaagtttaataatatttttaatttttaccaacaaaaatatttcatttaatgaattaacatattccacacatatcaggattgttgttttctatgtttattattataccggttacttgtagagtaatagggtataccagaatcgtttaaaagttcctaataggctgatggaagcattggaacaattgatcgggatcagtagtcgacacgatctggtcgtgtccgtctgtccgtccgtatgaacgtcgagatctcaggaacaatataagctataaagcttagattaaccatatgatattaacctaacgcctaacgctgccacgcccacacttttgaaaattgtgttgatatatattttcatatatttattagttttgtaaatttctattgatttgtcataaaactttttgccacgcccactctaacgatacaaaccgaccaaaaaacgaccacgcccacatttttgaacaattttaaatattttctcattgcattcaccaatttctatccgtgtcccagaaaaattatgatatttcgcgatcatattgcctctagctgagtaacggatatttaatagtcgggaaagtctacatagcattttttcttgttattattgaaaaaaaatcctttcgacatataaacaaaatgtaacaaaaatgcatgactacttcagaagattatatcgttcccggcggcttgaaattattatgacagcctaacataaaacctgtgcgacaagcatgcataaaaattacgtatataaaataatatattccttagatgtaaaaaaaaatatttatgtgcatgatttttgagttcccattctataccagcatcgcttaatactggcatgtcacatataaaataatatgacatctgcctgttatgaatacatatatttttatgtttgagtcaacatcgagttgccgatgtttggaaaacatcgatgacatcgctgttggcatcgaaatatgtccatatctaatatatagttccattctgttttattggattgagtaaagttaggtaattttttataaatgtgtttctttcttacatattaaatacattttaattataacgtagacaaaatgcaaggtcttggtctgcaaagtcttaaaaaaaatccagctgtaagttttatgattatattaagttatctgttgattgcataacaaaaatttgttcagttaattccactttatgtgtgcgttggagcgggagctattggagccgtctactatatggctcgacttgctactcgtaatcccgatgtcacttggaatcgcacatcaaatcccgaaccatggcaagagtacaaagaaaagcaatacaaggttagatttgctccttaatattcatattctattttcatattttaatgggccaagaaaagccctcgaccgtggttttgttaataaccaaatttgcttatagatatatgtatttttgcaattttttacttttttggcgatttaaccgacatgccataaccattacacatatatatttcacgaatatatactatgttgtagttgtagttatacccgttactcgtagagtaagatgttatactagattcattgaaaagtatgtaataggtagaaggcagagttttcaccatatgaagcctatatattctcgatcaggatcaatatccgagtcgatctgacgctgtccgtccgtctgtatgaatgtcgagatctcaggaactatacaatctagaaggttgagattaagcatacagattctagagaaatacccgcagcgcaagtttgttggcctatgttgccacgcccacaaatcttcaaaaactgccacattttttcacatttttattagttttttaaattttgattgatttcccaaaaattttattcaccaatatctatcgatatcccagacaaatcatgaaatttcgctatggcattttaactagctgaataacgggtatctgatagtcgaggaagtcgactattttgtacagtgatactttttttcacttttattatttgtctcgcaaaacaattcccaataaccgtaaacaccgcctgttaacaatctctaaacggagatatttgcgtatatcaactagctaataacaaattattaaaacaccatactcaccattctttatggcagaaaaaatgtatatatatatatatatatgggtaatttaggtaaataggtaaaataagtgaaattaagaaatgatggggtgtcatt

SEQ ID NO: 26474 - DNA, 2954 bp, DROSOPHILA
agctcccgctccaacgcacactcggttaaagaatttatgttaaaacctgataaaatgggcacgttaaccgatttcggacagatagctttgaaatgggatcccaaaaatttggaaattcgcacaatgtcagttgaaaaaacacttgaaccccttgtattacaagtaactactcttgtaaataccaagggcccaagcaaaaagaaaaaaggaaaatcaaagcgggccagcgcattagttgcagctgttgaaaaagctacagaaaattttattcaaaaaggtgaacagatcgcttacgagaacccagacattacacaagaaatgttaacagctgtggatgaagtaaaaaaaactggagatgctatgagcattgcagccagagaattttctgaagatccgtgcagttccctgaagagaggaaatatggtgcgcgcagctaggaatctgttgtcagctgtaacccgcttgctgattttagctgatatggttgatgtacatttgctcttaaaatcactccacattgtcgaagatgatctaaacaaactcaaaaacgcttcgagtcaggacgagcttatggataatatgaggcaattcggacgcaatgcaggagaacttataaaacaggcagccaaacgtcagcaagaacttaaggatccccaattaagggacgatttagcagctgctcgggcgatgcttaaaaaacattcaactatgctgttaactgcatcaaaagtatacgttcgtcatccggaactagatctagcaaaagtaaatcgcgatttcattctaaaacaagtttgcgatgctgtaaatactattagcgatgttgcccaaggaaagtcatcccaaccgacagatatatacagtggagcgggagagctggctgcagcattagacgactttgacgaaggaattgttatggatcccatgacctacagcgaaaagcgttcacgtcaattgctcgaagagcgtctggaaagtattattagtgcagctgcattgatggcggatgcagattgtactcgagacgagagacgagagagaattgtggccgaatgcaatgctgtgcgacaggctttacaggatttgttatctgaatatatgtcaaacatgagtcaaaaagataacagcccaggactctctcgagcgattgatcaaatgtgtcgaaagactcgcgacctaagaaggcaattgcgaaaggctgttgtggatcatgtttcggactcttttttggagactacaactcctttgctagatttaattgaagctgcaaaatcgggtaatgaaaaaaaagttcgggaaaagtccgaaatattcaccaagcacgctgaaaaactagttgaagtagcaaatttagtatgtagcatgtcaaacaatgaagatggtgttaaaatggttcgatatgctgctgctcaaattgaaagtctttgtccgcaagtaataaatgcagcatcgatattgactgttagaccgaattcaaaagtagctcaagaaaatatgactacttatcgacaagcctgggaggtgcaagttcgtattttaaccgaggcagtggatgatattacaacaattgacgactttttagcagtatctgagaatcacattcttgaagatgtaaacaaatgtgtaatggctttacaagttggtgatgccagggatttgcgtgcaactgctggtgctattcaaggtcgatcatcacgagtttgtaatgttgttgaagctgaaatggataattatgaaccatgtatttacaccaaacgagtcttagaagcagtcaaagttctacgagatcaagttatgatgaaatttgaccaacgtgtaggagcagccgttggagccctttcaaataactccaataaggatgttgacgaaaatgacttcattgatgcttctcgtttggtttacgacggagttcgtgaaattcgaagagctgttttaatgaatcgaagctcggaagaccttgatacagatactgaatttgagccagttgaagacttaaccttggaaactcgaagtcgatcaagtgctcataccggcgatcaaaccgttgacgaatatcccgatataagtggcatatgtacagctcgagaagcaatgcgaaaaatgacggaagaagacaaacaaaaaattgctcagcaagtggagttattccgtagggaaaaactaacttttgattcagaagttgctaaatgggatgacactggaaatgacattatttttctggccaaacatatgtgcatgattatgatggaaatgacggattttaccagaggacgaggacctttaaaaactactatggatgttattaacgcagctaaaaaaatttcggaagctggtacaaagctggataaactaaccagggaaatagcagagcaatgcccagaaagcagcacgaaaaaggaccttttagcgtatttgcaacgcattgccctgtattgtcatcaaatccaaataacttcaaaagtaaaagcagacgttcaaaatataagcggcgaacttatagtttctgggctggacagcgctacatcgttaattcaagctgctaaaaatttaatgaatgccgttgtattaacggtaaagtactcatatgtggcatcaacaaaatataccaggcaaggaacagtgtcttctccaattgttgtatggaagatgaaagcaccagaaaaaaaaccattggtcaggcctgaaaaaccagaagaagtacgggccaaagttcgcaagggatctcaaaaaaaggttcaaaaccctatacatgcattatctgaattccagagtcctgctgacgctgtttaaaaattgattttctatcagtatcaattaattaccatacacggagtagtatcaaaatcattgcgtttatctctggttattaaaagcaatcttaatgctgtaatctattcagttttatcgacaattacattcttatataactctaatcgaccccatataatataatc

SEQ ID NO: 26475 - protein, 917 aa, DROSOPHILA
MLKPDKMGTLTDFGQIALKWDPKNLEIRTMSVEKTLEPLVLQVTTLVNTKGPSKKKKGKSKRASALVAAVEKATENFIQKGEQIAYENPDITQEMLTAVDEVKKTGDAMSIAAREFSEDPCSSLKRGNMVRAARNLLSAVTRLLILADMVDVHLLLKSLHIVEDDLNKLKNASSQDELMDNMRQFGRNAGELIKQAAKRQQELKDPQLRDDLAAARAMLKKHSTMLLTASKVYVRHPELDLAKVNRDFILKQVCDAVNTISDVAQGKSSQPTDIYSGAGELAAALDDFDEGIVMDPMTYSEKRSRQLLEERLESIISAAALMADADCTRDERRERIVAECNAVRQALQDLLSEYMSNMSQKDNSPGLSRAIDQMCRKTRDLRRQLRKAVVDHVSDSFLETTTPLLDLIEAAKSGNEKKVREKSEIFTKHAEKLVEVANLVCSMSNNEDGVKMVRYAAAQIESLCPQVINAASILTVRPNSKVAQENMTTYRQAWEVQVRILTEAVDDITTIDDFLAVSENHILEDVNKCVMALQVGDARDLRATAGAIQGRSSRVCNVVEAEMDNYEPCIYTKRVLEAVKVLRDQVMMKFDQRVGAAVGALSNNSNKDVDENDFIDASRLVYDGVREIRRAVLMNRSSEDLDTDTEFEPVEDLTLETRSRSSAHTGDQTVDEYPDISGICTAREAMRKMTEEDKQKIAQQVELFRREKLTFDSEVAKWDDTGNDIIFLAKHMCMIMMEMTDFTRGRGPLKTTMDVINAAKKISEAGTKLDKLTREIAEQCPESSTKKDLLAYLQRIALYCHQIQITSKVKADVQNISGELIVSGLDSATSLIQAAKNLMNAVVLTVKYSYVASTKYTRQGTVSSPIVVWKMKAPEKKPLVRPEKPEEVRAKVRKGSQKKVQNPIHALSEFQSPADAV

SEQ ID NO: 26476 - DNA, 2445 bp, DROSOPHILA
aaaagcaggagagaagtttaagcgattgtgcgattggaaaattattcagctcaaggaagctggggtcggaaaaatctaatttttgaaatttgaaagctggaatcgtttgcccattttttgcccatgtttgccaccaattagttttttttgcccacgtccagtttttgagatatgaattttcgaaaaagttcaaaaattttcgaaaatcaaaaatttaaattttttttttttaatcgcaataacatcgtttgcccatcctttagaattttgaaaaaatgtatactttagaaaatataaggcttttaagtttacctcggtctaatcagagagtaaatcgtttgcccatctcttaaaacaaaatattatcaacaaaaaacgtttgcccaaccattattattagtttttatcgtttgcccaccctttaaaaaacctttaacaaaaattttttttcgattggccacatttaaaatacacccaatttcgttagcccacctctttaaaataaaaatttgttactgcggcgctttctttctctagtttggaaacataagttttggaaaaattacaactaaaagaaaaacaaagaaaccccacaaaaatataaatcccaaacctcccgcactcgaactaaagtacccaaactgtaatgcctccaagttgaaaaaataattattgtttaaaaaaaaagttattttttacattaagtctattgggttcaaataattttacttttagggccacaaacacaaaatcgatttttaaacaatttaaacttgtacgatcagttcggataagtttcatgaacctgttcagaaccaatttttatcagtttttaagtttcttttatgtataaaattaaaatttataatgtattgtttgtgtagatcaatcctagcacccgcattaaataagtgattgatacgtgccgagcgagtagtgacgatagtaattattcccctccctaaatctaccaagaattggtagccggaaccagcgggtccgatgagtgaattgtgtttgtgaaaatataagtaacgtgaacaacgcctccgaaaactagtagaacggcagccaagaaggctggcaaggctcagaagaacataaccaagaccgacaagaaaaagaagcgcaaaaggaaggagagctatgccatttacatttacaaggttctcaagtaggtccatcctgacaccggaatttcgtcgaaggcgatgagcataatgaacagctttgtaaatgatattttcgagcgaattgctgccgaagcgtcttgtctagctcactacaacaagcgctcgaccatcaccagtcgggaaatccaaacggctgttcgcctgcttctgcctggagagttagccaagcatgctgtcagtgagggaaccaaggctgtcaccaagtacaccagctctaaataattttctcctgcgaatgcggacaataatccataatccagctacattttaccatctgctcaggaaagtaatacacgtagttcgctacagtatttttatcagacatcagacggcaaacatcagacgttcgtccccaagttctccacacgttcatcaactaaagtacgtttgaaaaaaaaattgcgatctaaaactccaaaggttgtatatatggatgctgctggtaaagttttagccatttggctcttaagcctctactgaaaccgaacacttattgttgattcttattattatattagattgtcctattgtagactggaagaattttagctatttagctttaatcctgcgtcataattagttcatttattgtgttaatactttatgttgttatttttattccttttttgtttattaatctttggtatagaattaaagcaagatagaacgctatagtcgagttccccgactatcagatgcccgttactcagctagtgtaaatgcgaacgcagaatttcataatttttctgggatatcaaaaatgtgggcgtggaagttttgggctgttgtagggccttagaatgggcgtctcaaaattctttggcaaatcgatgtaaattgacaaaagtaataaaacgataaaaaaatatccaaaagtttttcaaaagtgtgggcgtggcagttttgtgcggtttgtgggcattggagggggcgtgtcagcacggttcaacaaacttgagctgcgtctctttctcaagaatctgtgtgctgaatctcacaccttctgtttctgagtttctgagatctcgacgctcatacggacagccgcactaggccaaatcgactcggctattgataaggtcatgggataatccgtagatgtcatttcggcaaaattaccaaatctccaacaaaaacagcttatcagtacatataacaagtagaaaaattggcaaaggccctataaggagcataaataaatggtggattgtcctcagacttggcaacatagtacatcacaacactttcactt

SEQ ID NO: 26477 - DNA, 445 bp, DROSOPHILA
cgatgagtgaattgtgtttgtgaaaatataagtaacgtgaacaacgcctccgaaaactagtagaacggcagccaagaaggctggcaaggctcagaagaacataaccaagaccgacaagaaaaagaagcgcaaaaggaaggagagctatgccatttacatttacaaggttctcaagtaggtccatcctgacaccggaatttcgtcgaaggcgatgagcataatgaacagctttgtaaatgatattttcgagcgaattgctgccgaagcgtcttgtctagctcactacaacaagcgctcgaccatcaccagtcgggaaatccaaacggctgttcgcctgcttctgcctggagagttagccaagcatgctgtcagtgagggaaccaaggctgtcaccaagtacaccagctctaaataattttctcctgcgaatgcggacaataatcca

SEQ ID NO: 26478 - protein, 64 aa, DROSOPHILA
MNSFVNDIFERIAAEASCLAHYNKRSTITSREIQTAVRLLLPGELAKHAVSEGTKAVTKYTSSK

SEQ ID NO: 26479 - DNA, 2876 bp, DROSOPHILA
gggtgcggatgctggctccgtagttgatggtcactccactggctccgttggtgcagtgggcggcggtcaggacccaggtgttgccgatgatcgagccaccgcaccaccagtttccgttgccgctgaagagcagacccacgatgtagggcaccttgccctcgtaggctgggtagccgttggtgatgcgaccctgaatgtccttgatgggcgtcggggtcagcttctgggcgggagcgggcacagcagtagctgcggccacggccaaggccaggaatacgaacagtttcatcttggtcaagtcttgcaactcaatggtgttccgatgtcgaagcgcctttatatacagaagtggtccgtagtcttatctcgaccaagagcccttccttccacacgtatgtaaaatgggagggcagtaaattttaatcaagttatcatcgcgagccatcgtcgactgataagtccactacaggtgattttttttttttgtaaattatggcctaaatttgaagtggaatgacatgtgccttatttgcaacttactcttcagtatgatagtatcatgtaaggacattcacttcacctaaaatatattatatactcagattacccaaatgaggagtaaagtattttatgatctttaagaaatttaaattctgaataatgtttattgaaagtatttactaccaatttcaaaaaaaagtgtgataaaatattactcatacggcacattgtacagtttttgttctcaacaagttgatttttagattatcaaaaaataaaacactaataggttaatattacataggtaatgtattaaatggtatgtattatgtaatatgtaatgtattgattatgtattattggtaattttatctctaaacatgaatatgccactatcttccaagaaattaataatacacaaaatataacagcatatgttcttcatttatttaaaacttgtttaagcacctttttgctttgaaattagtaaagtttttttttaataatagattccagtctcctcctttatccattccaggtacttggtgaccctagtgaagccagccggtcctccaacctggcatccgtaagcggagacgaaggaagtgattccgataagcttatcaccctcctttgtgaccagaggaccaccagaatcaccctggcaggtggcctttccgtccggagtttccacacagatggtgttctcggaggcggtatcagttccgtagtaagcctggcactccgccacggagatcactttcagatccaccactcgcagatcctccaccacattgctgccatcgtaaatggcaccccatccggcggcctgaacccaattgttttcgtaagagttgtatcggtcatccaggctgggaagctctattttgttgaccaggctgtagaagtccacatggggagtcttgatcagggccaaatcatgatcgagtccaacgtagtggggatatctgatgaagttctcgctgctcactgtgtggcggaaggcaggttcgttgtagttgacggcaccatagtacagtgaagcctcatcagcactgcaatacgatgatttatcaaagagcgttaattatttgtgaaatcaaataactcacccagcggtacagtgggcagcagtgagcacccaagtgtgtccgattatggatccgccgcaccaccaccagtttccgttgctgttcaagctcacacccacgatgtagggaacctgaccctcggacgccaggtttccgttggtaatacgaccctcaatccctccatgacgaatctccagatcgcgtggatggaccagcgaatggggcacagttagggcactacagaccccaaggaaggcgagcgacaagagtgtaagacccctcatattgaaagactaaaaggctcccatggtggtcccaatactatatagcttagccataatcactatcgatgctaattcaaagtgcgaaatcttatctcgcagcacttttatcaacgaaaaagtttgatttatactagcagatactcaagacgagtgtttggcagtatgaatgaagtgttagcaaagggaataagagtgttttgagtgcttcaatcaattctgagtggatacaagttcaagcaatttaattcatttaattttattaaatcataaagaattattaaccatggttaatagtaaatgccagtctgctccctgatccaaaaagggctgccaatatgggtacgcaagccttcattttgtatactaaaatctcctgttggtctcacacttttatatagaccaatgaagtcactatcgatgcacatatagaagtgtacaagcttatcgtgcaataaattattttaatttatgccacccaatggattaacttagtaatagagtgcgttatgggattatgtacttcaagttcagaaaagcaaaagtttataatcgtacctcaaaatatatattcaaattgtatgcaatggttgagtttatgcataaattcccagtaatatatgtcacagcacaacaagtgaaaatgtgcaagcaaggtgtcatgggggggacttcaaagaaccccaaggaacagaaatggcaatcgagggtcatgtgatatccttgaagtattgcagggaatagtgaagcagaaaagaaaatacgattatggcaatcaaaagggaggtccactttcggaactacggagcagcagtatcactcaaagtgaggcgatggcttgaaatccgatatagtttctgaggaacgcctcgggcggagtgggcgaaatggcggacccattcctcattaggaagctactgggaatgcctttgtttgcattctccgagcttccccttgaccgtccttccgccgacgtagtgccacgctgaaatgtgcaacatat

SEQ ID NO: 26480 - DNA, 819 bp, DROSOPHILA
atgaggggtcttacactcttgtcgctcgccttccttggggtctgtagtgccctaactgtgccccattcgctggtccatccacgcgatctggagattcgtcatggagggattgagggtcgtattaccaacggaaacctggcgtccgagggtcaggttccctacatcgtgggtgtgagcttgaacagcaacggaaactggtggtggtgcggcggatccataatcggacacacttgggtgctcactgctgcccactgtaccgctggtgctgatgaggcttcactgtactatggtgccgtcaactacaacgaacctgccttccgccacacagtgagcagcgagaacttcatcagatatccccactacgttggactcgatcatgatttggccctgatcaagactccccatgtggacttctacagcctggtcaacaaaatagagcttcccagcctggatgaccgatacaactcttacgaaaacaattgggttcaggccgccggatggggtgccatttacgatggcagcaatgtggtggaggatctgcgagtggtggatctgaaagtgatctccgtggcggagtgccaggcttactacggaactgataccgcctccgagaacaccatctgtgtggaaactccggacggaaaggccacctgccagggtgattctggtggtcctctggtcacaaaggagggtgataagcttatcggaatcacttccttcgtctccgcttacggatgccaggttggaggaccggctggcttcactagggtcaccaagtacctggaatggataaaggaggagactggaatctattattaa

SEQ ID NO: 26481 - protein, 272 aa, DROSOPHILA
MRGLTLLSLAFLGVCSALTVPHSLVHPRDLEIRHGGIEGRITNGNLASEGQVPYIVGVSLNSNGNWWWCGGSIIGHTWVLTAAHCTAGADEASLYYGAVNYNEPAFRHTVSSENFIRYPHYVGLDHDLALIKTPHVDFYSLVNKIELPSLDDRYNSYENNWVQAAGWGAIYDGSNVVEDLRVVDLKVISVAECQAYYGTDTASENTICVETPDGKATCQGDSGGPLVTKEGDKLIGITSFVSAYGCQVGGPAGFTRVTKYLEWIKEETGIYY

SEQ ID NO: 26482 - DNA, 2964 bp, DROSOPHILA
tgtttctttgaaatctgtacaccaaacggctatttccccagcattttcgaggttttttcatacatgttgagagcgcgtcgcagtctgtaccaatataaggcagtcatcgcatacagaaaaagtgtgttgccgtttcgttgcttccgcactcgccgtcgaaagaagtggcactttttggccaaatagcgtgccctttgagccgccaaacagttgcggtgtcagaggtccatgcatattccttttgtagaacaccaattaatttcatattaattattaagtggcgcgcgttcgagcagatagaggaagcaagaagcgggagagagcaagcgcgcgcgcgcgcattttcagtttcttttttgtattttcttgctcaagagtgctgagcgatagccctagtaggtggtgccatctcgcttgcgccgccatcgcttcatcccggtggtggcctgctgtctcgctcacgctacccctgctgttgtgtttgccttgctttttggtacaggaacatggcgcgctgctaaaacgaaaatgtgatgcccataacattttgaatcaaagtgtttagttttgggtccagtacagtacgattaagtagttatatgaatttatgaatattttaagatagcaaaaaaagcaaaggatttggttgtacagctttcatttgcgtaaaatgtactgcattttatcttatccctaaaaactatctcttgagctcaactttcagcaaaaattgctaaaatgtttagatatgattgtggattacaatacaatggcataattctgaatattacatgtccaaatcggtagaaacatagttatatacatagatatcaagatctgtatagtgggagatgtgttcctaacagctgttacacttgcagaaacaaatgttatttaaaagtaatcagggtgcaagtacagtaatgtttagcagactgttctgtagactgttaaaaactatgcaaatatccagctaataattatttatcttatttcttgcagctcgaagcaaaaatacacagtgtaacacttgttaaatagtttcaacaaaaacacattcaaatatgtctgataagccaaaacgcccactctccgcctacatgctgtggctcaacagtgcccgcgagtcgatcaagcgcgagaatcccggcatcaaggtcaccgaggtggccaagcgcggtggtgaattatggagggcaatgaaggacaagtctgtaagtacacatggttattgacatccaaagatccttacttacaccaccacgatatcttcttttgattcgcttaggagtgggaggccaaggctgctaaggccaaggacgactacgatcgggcggtcaaggagttcgaggccaatggtggcagcagtgctgccaacggtggtggagccaagaagcgcgcgaaaccagcgaaaaaggtggcgaagaagagcaagaaggaggagtccgacgaggacgacgatgatgagagcgagtagactggctcatcccccaccctaatccatcaccaagtcacacacaaccagccagaaccacccgcaagcaaacaagaacactggtggcaacaccacatccaaacatcagcaaccacagtcccccttaatagaatacaaagccgccaagcccgatcatatctcatcgacaacttgaacaacgagatctgttgaacattgtatccacaatcacatacgcgagagaacaaaaatacgcgataataaggaaaattgtatttatacacacgagtttttaagtttatagtagtcgtttattttataatgcccatatacaaagaagaggacaaccggcaggaaaggagaagaaataagattagcaggatgtgcgttgaggtgttttttttttcgatcctgcggcgtttcgcctggaaaggcgagtcgttcggaaaatgaaagagaaaagtagtccccttgcatattatttgtgtaaagtaaacgataattccattataaataaaaagatacaaacaattgcatcttgttctctaagtagttggatgatagcgattgatcgaagatcgggtggcaaaagggaaagaaacaatccacttcacagacaaaatacacgaaaaacaatacacacaccgcaaatgaatcgaacgaaatttcgctcaggtcttttcgtcattttgcattaaacttaatgtttaacgtcttgttagctaaagatgtatagcagaagaggaagtcggaagttagatgagacaagcagatgtaattgcatttaatcggtagttttaattgattactatacgtactatttaaagagaaaaccaacaaattaaaataaatacattttttaaatgcgttgaaaaccgaaatctacttatttcctggtagaaaattaacgaagcatatggtttgttttggtactttaaacgttttattttaaatatcgttatgaattcatgctacactctaaatggatttccttcgtttccgctagttatgcaaaaatcaatgcaatgatttctgtgggatttagtgtataatattatatttatgtatatatttaactatttatcgtatgggatttcgcatacaaataccattaaagttcttgttttcactttgggattatcaaatgttaacagatctaaaatataaacaacccttttaaacaatatcttttcaatgcaatgctgctgtgatgattcggattcgtgttgggggctgctcagatgaaacacgtagagattaaagcttagatttagatacacgctccttaagtgccagatcttacaaattaagtatgggggcctttgtttttttcgttttccacggtgtacaaaacagaacgatgttgcgcttatttattacggagcttagtctacaaaattatggcaaacaaaaaacaaagtctctctcagagcctttccacaaaagaaacacaaaagtcaagaaacgaaagaagctgttccaaaaagggtgtccatagcaaggtggttgtc

SEQ ID NO: 26483 - DNA, 890 bp, DROSOPHILA
agctcgaagcaaaaatacacagtgtaacacttgttaaatagtttcaacaaaaacacattcaaatatgtctgataagccaaaacgcccactctccgcctacatgctgtggctcaacagtgcccgcgagtcgatcaagcgcgagaatcccggcatcaaggtcaccgaggtggccaagcgcggtggtgaattatggagggcaatgaaggacaagtctgagtgggaggccaaggctgctaaggccaaggacgactacgatcgggcggtcaaggagttcgaggccaatggtggcagcagtgctgccaacggtggtggagccaagaagcgcgcgaaaccagcgaaaaaggtggcgaagaagagcaagaaggaggagtccgacgaggacgacgatgatgagagcgagtagactggctcatcccccaccctaatccatcaccaagtcacacacaaccagccagaaccacccgcaagcaaacaagaacactggtggcaacaccacatccaaacatcagcaaccacagtcccccttaatagaatacaaagccgccaagcccgatcatatctcatcgacaacttgaacaacgagatctgttgaacattgtatccacaatcacatacgcgagagaacaaaaatacgcgataataaggaaaattgtatttatacacacgagtttttaagtttatagtagtcgtttattttataatgcccatatacaaagaagaggacaaccggcaggaaaggagaagaaataagattagcaggatgtgcgttgaggtgttttttttttcgatcctgcggcgtttcgcctggaaaggcgagtcgttcggaaaatgaaagagaaaagtagtccccttgcatattatttgtgtaaagtaaacgataattccattat

SEQ ID NO: 26484 - protein, 112 aa, DROSOPHILA
MSDKPKRPLSAYMLWLNSARESIKRENPGIKVTEVAKRGGELWRAMKDKSEWEAKAAKAKDDYDRAVKEFEANGGSSAANGGGAKKRAKPAKKVAKKSKKEESDEDDDDESE

SEQ ID NO: 26485 - DNA, 5146 bp, DROSOPHILA
cggtggcctttattcttttgggaacccgcatcttgtcgttaatctcgtgggcatatttggcgtcgctgtagagatcatcgtccaatccattgaacatgggcgtcggcgattgcggggtcaccatggcgatgtcctggggaatcctttcaactgatccaatgggcctcacttgcttttggtttttcgttgtttgtccaattttttttttttaggtagaaggcggccgtgagagagacgttttcataacaaattaataaccagaatttggcaagcgcaacattttcgtccggcttgtgtgcgtgtgtttgttgcgtattgggtttttcgaatgctttctacttacattgctcgggaaatgacagaaaaatgtccgagaaatccgtaataatttacaatttttctcctgccttttgttatgtgtgtgaggagattgatatagaatgtgctaaataataccaggaatgacagtcactctacttccactctacagatccggcactctagctcctttttagccaaattaattatctacctcaatatcagtagaaaactaggtatttaagaagttatttcagttgttttgattcattttattaatatgtttttgtttcttgaaaagtttgcggtattcttctgtcttgaacaaataatttacaactcgatttaagcgacaactttggtctttataacctacatatgtaaataaaatgagtactgttagtctttgcaaagatcaaatactccaaaaagttttctatcgatttataatacttgcgcattggtatggttcgattaatgtttaagggaatgtaaaaataagtacaagtacttttaatactttaaaataattaaccttgaatacattttaaattgtcttaaagtgcccactaaaccactgttaacgacacgctgcgtgctgttaggcgccgttcggcgttagccaacactgaaaaataccaacgcagtgggccgcgctcattttacaacaaaattttctcatccgccgacaactagacgcgcgtcttttttatcaagtgatttatgctgaatttacggcgtttcaatagccccataaagtgaaaaactacaaataaatcccatcagaagtgagttactaagttgtgaagcgttaaaagctgtttaagctaagttaaacatcgtttaaaaactgccagccaagaggaagagagcaagagagagagcgcgttctgccagcgtcgctgcctgcggaatgtacagttgcggcagcgacgtcgcttttcctttcggcgcgcaaacacaaataaatacagaaaattagagaaataaagaaagcaaagaaactagagaaaaccacagcgttacttaagtacattaatagattgtgtgtattttgtaaactataaataacatgcagcactcgccgagcacaacgactgatcatatccattttgcagcacgttttttcgaccgcaattcatacaccatggatcgacgcctgagacgcccgcgtcgcacggaagacgtgtccagcggtccacttctggcccagtccaagcagcccagcctcctgccggtgacccgacgtacgggctccgtgacagctgcgggtgccaccgccaccgccaccgccaccgctggtcccgccacccggacacgtgcctccccgtcacgcaacaaggtcgtcgcaccgccctcgcccgatcttggcccgcgcacccgtcgctccagccggccgaggtcgtcggtgggtccgctgaccggatcgggatctggttcctcgctgcccatcaaggccgccatcaaggcacgcacacccatcccagaggtttccgaggtgagttctccagcacaaaccagttttgctggccggtggataagtgcttagctatatttgatcagtattccaaccatcagcagtttagaattttgaaatcaattgctttcaatataaaagcatagcgaaatattagttctatttaatttcgatcgttacaaccaattaaactacataattaactgtaactgtcctacctttattacaaatttcgagcttctgtttctgtgtgttttatgaagctgataagcagcacccaccgccctgcttatcagcttagagttctgccctcatatgctaccataaggaaattccgggctaagataacggatttgtaattgttgagctaaactgctgattacaaaaatagaggggaatctgataagtgtactcaaaacacctttaacccagttttgagtacccacatatttttgtacaatcatgtccctttgtatattcttctaaggttatatagtttctgactttgttttatcacttattacatctttacttatgatcttaaattacaggtatcatcgcctattcgtttgtcaaccagcaatctgcccatgacattgaccaccaacacatccagcggcgcaccgaacaaagcatttaacacaagctccgtgaacagcggcaacagcttcagccgtaccactaccagcagcaccaccacaaccacggagcgcatcgagatccgtgccgagggagacggcgaggtggacacggattccattcgcaaacgcataaccgaacgactgcgcagatcggtgtcgaagacaatctcaaatctagctggaacaccagtgacaaacaccgaagagggcagtcgttatagtaggagtgtgtcccgatccgtctacgacgatgagaagtcctccaagcgtagttactctacgggtgaagaggatattgatgaggaggatgaattggaggaggatcagttccgtagtttcaatgtaacccgtaaatcggccacaccggcggaaatatcctgccgtcagttgaaggctcctagagaatttggcggttggctaggcgccttcctgttcctgctacttctgcccaccgccgtctactatttgacatggagctgtacggccagaaacgcctgtcagtttaagcacctcaatctgggtatactactggatgttaactacctaacgcgccaggtgttccagccacgagtggtgggtgcctttgccgcctatcaggtggtggtatttctgctggtggcactgctaccaggacgaagggttcatctcacccgcgagacctacaagtttaattgtctagcagtttcgcttacgcttttgattgccagtggagtggccgagtatctgaagtatccagtggtcaccttcgttctgcgtcactatctgcgtttctgcatctttggactcgttggcgcctttgtggcagctgcttggagctactggctggtggacaccgccaagtacaatgtgctgcgccaaacgctgaccaatgattatggcaggactggcagctttgtggtggacttcgcgctgggcagacagctcaatcccaagtggctaggacgcgtggattggaaacagtttcagtaccgtctctccctggtgaccaccttgatctatgccacctgctacatctaccagacgctcgtgtggccccagaagccgcagctgggtgaacaggagggctatctctaccaggccaaatactactggaacaatgtaaattatgatcctgccaccctgttctcggccagctgcttgctgttctacgtattggacgccattattttcgagcaccacttgagctcatcctttgagctgcaacacgaaggctacggctgtttgctgctcctgcgctacgcagccactccatatctgctgacggcggtcaccaagtatttctacgagcagcgtgtacccatctcctgctggtatgctccgctggcagtggctgctctgctgtctctgggattgctggtcaagcgattcagttgcgcctacaagtacaaataccgattgaactcgcaaagtccgatcttcgccaacatcgaaactattcacacgtatcagggaagccgtctgctgctcagcggaatgtggggatgggtacgccagcccaactatctaggcgacatcgtggccctgctggccctggctgctcccatggccctgcgtccggcctggccaccagttctgggtcttagtctgatcatcctgctcctgctccatcgcgccacccgagcgaacgcccggaatcaggcgcgctatcactcctcctggcagcgctacagcacccaggtgcgcagctacatcctgcccagggtctactaagccgggagttgacccttctattttctgtggccattcttatttttattttgatttcagtttgtttttattttatgtttcgaatttgtatatataatacgtattcataattcatattgttctagaccaccaatacagcccccccccccccttcagcccattacttttagtaacaaaatttgattttacactcgccgacacacgcacattaaacaaaatgaattttcacacacataattatagttaaaaaacccatctagctgtacgaacttatgcgcttaagatctagacatcttatataatcaatacttgtaatctatgtggtatgcatatagatagtactttttacatttaaatatgaaataaaaaaaaaacatagtttctatgctatgaagaaacgcacaaggacagctgtttattatgtatgtttccatcaagtcagttagttgattcctgataagctccataaatcgattttcacttagcacttgccagactttaaggtcactccaagtggatttcaagttgaatcaaaatacaaattatgagcggccagcaaactgcggccgatgatgatgatgatgatgatgaatgtcagtcagcgaataaaagaagtaattttgtgtaaaaatacccgctccatccagcgaacacccaccacctaccgctgttccgcttttccggacggagcgcataaagttcttggctgtgggcgtggcacgcagcctttacaactgttaatgacatttacgaatgtttgcgagccaccgaaacttggtggacctcatccgtttcgccattccatttgccaccccacacacataatgccaaaataatgacgaagtctgggcttgcacctccaaaagacctgctcgcaatacactggaaaaaacatagtatatttattatagaattgtttgttttaaaaacaaataaattataattgaagtttattatctctaataatatattaaaatttatgcacaacagtatgtgtgattat

SEQ ID NO: 26486 - DNA, 2286 bp, DROSOPHILA
ccgccgacaactagacgcgcgtcttttttatcaagtgatttatgctgaatttacggcgtttcaatagccccataaagtgaaaaactacaaataaatcccatcagaacacgttttttcgaccgcaattcatacaccatggatcgacgcctgagacgcccgcgtcgcacggaagacgtgtccagcggtccacttctggcccagtccaagcagcccagcctcctgccggtgacccgacgtacgggctccgtgacagctgcgggtgccaccgccaccgccaccgccaccgctggtcccgccacccggacacgtgcctccccgtcacgcaacaaggtcgtcgcaccgccctcgcccgatcttggcccgcgcacccgtcgctccagccggccgaggtcgtcggtgggtccgctgaccggatcgggatctggttcctcgctgcccatcaaggccgccatcaaggcacgcacacccatcccagaggtttccgaggtatcatcgcctattcgtttgtcaaccagcaatctgcccatgacattgaccaccaacacatccagcggcgcaccgaacaaagcatttaacacaagctccgtgaacagcggcaacagcttcagccgtaccactaccagcagcaccaccacaaccacggagcgcatcgagatccgtgccgagggagacggcgaggtggacacggattccattcgcaaacgcataaccgaacgactgcgcagatcggtgtcgaagacaatctcaaatctagctggaacaccagtgacaaacaccgaagagggcagtcgttatagtaggagtgtgtcccgatccgtctacgacgatgagaagtcctccaagcgtagttactctacgggtgaagaggatattgatgaggaggatgaattggaggaggatcagttccgtagtttcaatgtaacccgtaaatcggccacaccggcggaaatatcctgccgtcagttgaaggctcctagagaatttggcggttggctaggcgccttcctgttcctgctacttctgcccaccgccgtctactatttgacatggagctgtacggccagaaacgcctgtcagtttaagcacctcaatctgggtatactactggatgttaactacctaacgcgccaggtgttccagccacgagtggtgggtgcctttgccgcctatcaggtggtggtatttctgctggtggcactgctaccaggacgaagggttcatctcacccgcgagacctacaagtttaattgtctagcagtttcgcttacgcttttgattgccagtggagtggccgagtatctgaagtatccagtggtcaccttcgttctgcgtcactatctgcgtttctgcatctttggactcgttggcgcctttgtggcagctgcttggagctactggctggtggacaccgccaagtacaatgtgctgcgccaaacgctgaccaatgattatggcaggactggcagctttgtggtggacttcgcgctgggcagacagctcaatcccaagtggctaggacgcgtggattggaaacagtttcagtaccgtctctccctggtgaccaccttgatctatgccacctgctacatctaccagacgctcgtgtggccccagaagccgcagctgggtgaacaggagggctatctctaccaggccaaatactactggaacaatgtaaattatgatcctgccaccctgttctcggccagctgcttgctgttctacgtattggacgccattattttcgagcaccacttgagctcatcctttgagctgcaacacgaaggctacggctgtttgctgctcctgcgctacgcagccactccatatctgctgacggcggtcaccaagtatttctacgagcagcgtgtacccatctcctgctggtatgctccgctggcagtggctgctctgctgtctctgggattgctggtcaagcgattcagttgcgcctacaagtacaaataccgattgaactcgcaaagtccgatcttcgccaacatcgaaactattcacacgtatcagggaagccgtctgctgctcagcggaatgtggggatgggtacgccagcccaactatctaggcgacatcgtggccctgctggccctggctgctcccatggccctgcgtccggcctggccaccagttctgggtcttagtctgatcatcctgctcctgctccatcgcgccacccgagcgaacgcccggaatcaggcgcgctatcactcctcctggcagcgctacagcacccaggtgcgcagctacatcctgcccagggtctactaa

SEQ ID NO: 26487 - protein, 716 aa, DROSOPHILA
MDRRLRRPRRTEDVSSGPLLAQSKQPSLLPVTRRTGSVTAAGATATATATAGPATRTRASPSRNKVVAPPSPDLGPRTRRSSRPRSSVGPLTGSGSGSSLPIKAAIKARTPIPEVSEVSSPIRLSTSNLPMTLTTNTSSGAPNKAFNTSSVNSGNSFSRTTTSSTTTTTERIEIRAEGDGEVDTDSIRKRITERLRRSVSKTISNLAGTPVTNTEEGSRYSRSVSRSVYDDEKSSKRSYSTGEEDIDEEDELEEDQFRSFNVTRKSATPAEISCRQLKAPREFGGWLGAFLFLLLLPTAVYYLTWSCTARNACQFKHLNLGILLDVNYLTRQVFQPRVVGAFAAYQVVVFLLVALLPGRRVHLTRETYKFNCLAVSLTLLIASGVAEYLKYPVVTFVLRHYLRFCIFGLVGAFVAAAWSYWLVDTAKYNVLRQTLTNDYGRTGSFVVDFALGRQLNPKWLGRVDWKQFQYRLSLVTTLIYATCYIYQTLVWPQKPQLGEQEGYLYQAKYYWNNVNYDPATLFSASCLLFYVLDAIIFEHHLSSSFELQHEGYGCLLLLRYAATPYLLTAVTKYFYEQRVPISCWYAPLAVAALLSLGLLVKRFSCAYKYKYRLNSQSPIFANIETIHTYQGSRLLLSGMWGWVRQPNYLGDIVALLALAAPMALRPAWPPVLGLSLIILLLLHRATRANARNQARYHSSWQRYSTQVRSYILPRVY

SEQ ID NO: 26488 - DNA, 2446 bp, DROSOPHILA
ggctaatcaataataaaagcagctagctagcaatacatagaaaaattcccccgcccaaaaagacatatgaaacatgtttggtttaagctggtgtttatatttagtttcggcgtgttttttcgacgtattttggtttgcgccgccacaacaaagcgctttgaccagccaaactacttacaccgactgtctacaagagtatcgtcccacacaacacacaaataaataatttaaggcaaacacaggcagcagcagcaaatcaacgcgaacagcaatattttggcagcgaacttgtttgatttgcataaagtcgcacaaataaaaacgatgcaattaaaaaggcgcgcgcgtagatccagtcagctgatgatggtttcggattggctggagttggccagaaatatggccaaaaaggggtgggggggggggggcggtcatctccagggggatcggatcggcgactggagacggcggcattcgggtaaatttaaatatattttttatatgcactttgttgactttttgcgcttcgccgtcgtttaataccgctcggaattcaggaatcggaatccgctgtgccgaaactagttcgtcgcagaattagtgcagtaaatatacacaaaagtaaaataaaaataaaaataaaaacaaaaacacaagaacatgcatgactgtgtgcgggttaaatatgtatgtacctgcttaaataagttttatttagcgtgttctattgaaaggacaataaactctcggcgaaacgtcaaggtcgaccacatcgcattagaagactgcggatcgattctaattcaggtcgcatttgcgtctaaacatctgtatctgtgttctaaaatcagatatttggctaagcaaattgcatttgactattatcactaatcaaaaaccaaaccttcttgaagcttacacctcatatttattgtctcaaatacctatatttgtggttcacgaatattagatgaatacgaggatgaaatagggataggttctatcctatcgtcttggtgttctggtgaacccttcttggacatggccagttgcaactgtctagcagcaagggtatccacaatagcagccgccacagggtccacaggcatagcatggtccgcagacattcggtccatagcagggtccacatcctcctccgcatggtccgcatggaccacagcagggtccgcagcaaggtccgcagcagggtccacagggtccgcagcacatgattaattcgtaaaagttctgaagggagaaaaggtacgtttaaatgatatgccataggaattttttacacattttcatttttgtaaattttcacttattttcactcactttgaaccgaacaaaaagaaataatttgagactagacgacaaattttgatgtgttcaggccgaaaggacaaataataatgatacaaaatctggttacgcacaggtatatcggtttgacaagtcggactgaagaggcaaaggatactatataaaatattttgtttaaagcattggctaaagcttataatgattgtattgtaagtagggaaatgctcaatcttcatgtgaattaacctttatatttcgatcctacctatgtagttatcatccaacttggtaggaacgcatcaagttgccactatttttccagtgcactgtaacatataaacgaggtaaatgagatttaaatttttgttttgtcggatcatgtgttcattgcacccggctgaagttcgaatcgctgccggttctcaagtcgagttctgcgctgcacttttgtttactcttgattttgtcgtactttttgattaagtgcatggcgcatagccgattgccgattgccgagaatccgggtatcggggctgaacgggtatactatatatgcaagtgtatattaagttcattatctgaccgaagacttgtgttgcttatgttttttattttgttttttcttggtttttttccccagccgaatcgagccaagaatgtcgtcgcattgaaagaggtcaatcaccagcgattgcgccttggatgtcactcggtgtaattgagcgcaatttatttcatttgctaacgattttacgatttcggatttaattaactcccgaaaagcaggaagcctagtggaccagttgacagagctcgccagcctccaaaatggaaccctagtgttatacacaatgattatacaatgatttgtatttgtgcatgactgagtcagccggagcattcgggcagaaaagtatgggttgcaaataaaaagcgcataataggcgtttaaatgcaattttcttcgcaaaatggtcgggcgaaatatcaaaaattcgaattatatgttttgccgcatgttgattagaatgtatgtatgtatttgtgtgtgtgtcgatcagcagaggcagaaaccgaagcaaaaaccccgtcgtcaaaccgcacagaagtcctctccctt

SEQ ID NO: 26489 - DNA, 356 bp, DROSOPHILA
tatacctgtgcgtaaccagattttgtatcattattatttgtcctttcggcctgaacacatcaaaatttgtcgtctagtctcaaattatttctttttgttcggttcaaaaacttttacgaattaatcatgtgctgcggaccctgtggaccctgctgcggaccttgctgcggaccctgctgtggtccatgcggaccatgcggaggaggatgtggaccctgctatggaccgaatgtctgcggaccatgctatgcctgtggaccctgtggcggctgctattgtggatacccttgctgctagacagttgcaactggccatgtccaagaagggttcaccagaacaccaagacgataggatag

SEQ ID NO: 26490 - protein, 56 aa, DROSOPHILA
MCCGPCGPCCGPCCGPCCGPCGPCGGGCGPCYGPNVCGPCYACGPCGGCYCGYPCC

SEQ ID NO: 26491 - DNA, 7964 bp, DROSOPHILA
gcggttacacaatagctggaaaaaagctgcaaaaaccatgaattttaaagattaagaactaaaaaatttcgaatgattcagagaatgattatgccaatccttaagtcttattgcccatcccaaattttacacgattagcacaatatgttgggcaccaattgaaaacagtagattttttgcagatttaaattgttaccaagttcgttttattgtacaggcgaataaaagcatttcattgaaaatattttaaaatccttttaaaagatagacaacaactgtgttaacgctcattatacgttttatttatatcgatttctcttttatgtaagaacaaaatttatttacagtgtttagatcgcgtttgcttgcttccgttttcgtgctttcggttcggcgttaaattgtttttcaaaatcaattctatgtgtgtcctacttaactcaaatccattacagaagtgttgcctacatatgcctggaatcgattcccacatatcaactaatagataaaacaactttttcgtacagattatcataatcacttcacgttgctttgggcgtacacaaaaaatgaagatagaggaatatgaatagtcattgcaatccttacgttctgttcacacgcatctcaaaacgtgggatgaatgtttttatttggattgaaacagacgacgtataaatgtacatcaaacgctctctaaaattcataattcatttataaatttattactttagctatatttatagttattaatattttcttgcttatatttctgttgttgcttctttacctttttactcagctgcttacaattaggggctgcattatgcattatttctcttatcttgctttgcgtacgattcttgtgggtggatgtggtgtgtgtggttgtggctctgaatggggtggtggtggagcaggtgtgtatgtggttgtttgggcttactgctatacacttgttatgcgcaaagaaatgaccataaacagtaattagagaatatcaagaaatatattagagggataataattatggtggtgccttatccaatagcatttttaactgttgaattttgaatgtcaggcttacaaaatgggttgcgaaacgaaattttacgattcggggcgcactaattgatatatttatgtattcgggttattggctggcggtcatctataatcgtggtcagtatccgccatatcaatgccgctcgtatgctcaggccattccgtccgagctgcagattgtgtttttcagttagtgtgcaagccctggcgatttgaagatgagtgtgttccggatcctgcttaagacgctcctgctactttttgtgggccgcttaggccaagtagttgtacactttgcgatcttccggcgatcgttgcagatactcgcgctcgattaggccctcaatgcgctttttgataaacacgggcgagggcaagaaacgcgactttagctgcgacgtcacatctgatactagcaagttgtgctaagaaaataaaaacaggaatcatggttaaatcacaatccaaccagatagcaaacgtataatacttacagccagacgcttgcgggccttcattatgcgcacaatagccgcttcgatctcgtgcttacgatcctcgtcgacctttccgcgcgtttccttacgctctggctctgattctcccttggcggctaccgtttgtatcttcaccctaaaatagtttcgatattattaccaggcgccgttctttcgcactgaaagtaatatctaacctgtggaacttggagttgaaggcgtcgtttacgtaaaactcatccgtgggctcaatgtccttagttttcgttttagaattgcgtactaacaaacgctgagcgggtttgcccatggacaacgattgtagtgctcggacgagctcccgttccggtatatcggtctcctggtgtatgtcatcgtaggtgagcacgtcgcggttattaaacagcagtagcacacacatctaattttggattatgaaatacatgttaaatgtttagttaaatatttttttcagatcaatgaaataaagctgcttctgctaaataaaattcggaggtgtacgaactaaaagatattttagcttacctggtacgtggacacttgcaatatgtgcttgcgtgtggtggtgggcaccccacagccgcttgaactggagctgggtgcatctttatccttttcactttcaactgccttgcggccataaaacacagcgttgatataggcggttcctattcgaaggggaaggcataaatacagtagttgcttaaaaaagaagatcatttaagtagctaacccatttgtggctgtaacgtcaattgacgtcctgagtgcttatttagatagaagttcttgaaaatgtcaaaggcttcacgcggagcggcgggtatattgcagttcggagttgctgtctgttacggaaattgaagataagttaacctattcacataattatggaacaatttaagcttacctgtgtgggccaaaaaccagtggttagtatgcgtaccgttagctccacaccgccaagggataaattgttattatttacaaagttcttaaactcatccatgatcgtattggagactgacatatctttaaacatgccctctagcttcgaggtgaattgacagccgcattcagtctgcaataatagagattaaagcgataaataattatgctaagataccaagtaacttgacctacctttagttttgatatcatattcttctcgaaatcatcagagactgatttgttcagcagcaatctcttggctaaatgcgtcttgtaatagcgctcaaagacatctttctccaataggaaacggaagagaaccattgtcttatccaagatggactcaatttcctgttcgctcatctgtggaaaagtaatacacattattaatacatttcagaaagcatattgtaaattcaactcactcccttgccaccctttttcagtttgtcatcgatgaatagcgatagatactccggggatttgttatttaggttcaagaaatgttcaaaatcggatgagatgacgtttttgaatatgcgatcgttggcgaacgagtgcaccagaaactggtcgaagcggtccttgagatccagcaagttctgcacgaatgttatgggattcgtgttgccgttttcttcttccttaaccagcatgcgtccttgctctcgcagatatgccgacattgtgtccgctatcaccttgagaccctcctccttcaggcgcgagaaaagcttatatgtgcaggccagatcctcggtctttgagttcttgatcatgtacaccacgcccgagttctccatttcaacaatgggtcgcatgtgctttttgatcagctcttcttcgaccacgcgcacaatgcggggctccgtatccttatcgagatacagcgctgcccgggaagattcctccgtgatgcgcgcttccactttcttgatgtaaacgccagcgttgttctcggcaagaaagttctgcgactcgaatttgtaaaacgccgccgattgcgcaaggaagggcttttcaaagtcctcttcgtagacagtgcgcgagttaatccccagggtgatcagcatactgcaagcattcttgatagccagatggttaatggcttcgccatgacgttcctccatcaccatgcccagcaacttctctcgcagggccttttgaatctcagaatagcgaaccacctggtaatggaaaaagcgataaatatatttccaacggaataaatgcaataaagatattcctacctgatccctgaacaaaattaatcccaaattgtacacattgtctacctcgcgctgctgcacataaactctatccatgtacatgagtatgtcgcggatcatcaccatagatgtctggtggtctgtccaggcctggtttaacttgggtaggaaattgctgtgcagagcctccagcacatccgcccgcaccttgtgctccaggtgttctgagacgacctccctcagaccgtaatacagtctattgccgtgcttatgcagcaccatgttgtacgcattccggtagagttgttcaaacgatagtccggagttgttctttttctgtatctcctggatagcattctttaagctggcccaaatggtctccacgtacttctcgtccatggaggcctggaagagaaatataagattattaatttggatagtcaagaacttatttctcagggattaaaacttataaatgcataagagtgtaagagggatattaagactttcgcttgttagtaagttaactaaaagttgaaatccctgtttggtttttatcagatggtaggctaacattgaatgcccttcgcttgtactccggtagccagagtgggtacttccgtgctatttccttaaagcgtttttctgtactttctgcgctcgctgaagctgaggttgatggcccagaggtggttgcactagtttcagttttaacgacagctggagcagcaggagctggaactggcatggaaagtggcgtcggcgtgagcgggtggttagtattaattctgttatcagcccgaactctgccaccgctggcggcaaggtgataactccgccgcgaggcagaagctaatccctgagcggacaatcgattttgggactgctggtgttgctgcattgaggaggcgttgggcacattgatgttcatgcttcgcgcctgctgtccaagaacgttttgccttgcaatccggcaaggcacggcagagtccacattaccgacagttgcgccattgaagttgttggagccggccaccatgcgattgtggtagcggccgttggcgttgaggttgttcagtggctccggctgctgttggcggggatcgcggccttgcatgagattgctacgctggtccagctcacacgtcctgtcccggtagtggctcctctcttcctcgctgagtgccagagagcgaggggctggataatagcccgctgctgaagccggtgcctggcgagaccgactttggtttaacgacttaatgatgatagcttcaatgtcacatccgccgcgcggttctgctacacctggtccgctgctcctcctcctcctctgtgctccgtactccggccagagttctactcgcgattcgggtctcgcccttcaccctgctctccacatacaggtgttcacagtctttttgtgtgtgttgttggtcaacaataatttctcgaaaactacgattgaattcgttgtaacttaaaaactaaaatgtgtgttgaaaattcccctggccccggttggtgttttgatgtttttatttgtttttgatttttggtgtttgcttttcatgtcgcctgacattttgtggggagaaatgtttggtgtcgcctaaccggtgaatttgctaattgttttataaaaattatctaactcttaatacccgcaaatggcattatcttatcgaaacattttgcaagttcatgatgcgatcgacagatttttcgctgcaactctcatctcaactgcaaagcgagtaaggggcttttcaaatgagtatatctcgttttttaaattcgtttgcaaattgcactcaaccttttcaaacgcttaatcttaaaaatttgaagatcattgttttttgaaccaaagaaatggcataatctgggattatacaacttgctgtggacagcaagctctttcttcatagtgatttcttggatttgagcttaaaatgaaaatgtttttacagtttgtggtttaaacttgtattagttccgggttgtcagataatagataatctcatattagttcgctcttagcaatattacacgattaagagtgtgtatcgtggttttaacgatgctccaatgtgggttcttaccggaaaggcccgaatgcgcattttgccctccttcttgggaggatttccccgcagattcatgctttgcaagcgtcggcactgctcctccactttattggcggttcggactccggagcagggagctgcaagaagagcaggtgcttctccgacttttccgatgacggaacctgctttcctcggcggcaatcaatggttaacacaacaagaacacagttaacctgggttatccttggtttatcctgaaagataaggagaggtgaatggattagttctatcacagatctcccagcatgtttacgctacaatccgcgtagggtggtgccgagatgagcattctggtttcgtatatttgtgcaaacattccacgcaaatgttagggtgtcaagcgcgatgtacacaagcagacgtgtgtacgtacatatgtatatatatgcccgtgtgtgtatgtctatttggggaagcggctggttttattcgcgaatagtttgcaattgcggatatgtcccgggataccaatccgccgtactgcgtcgtcacttcctttgtcgccgcctatatcgcagatatcggatatatgtgcatgtacattgattcgctggcccatccgatctctccgcgtaaaagaaacggtgaaaaaaactcacacggcgacaatataattgttatgtacatatacgtgcaattaatacaagaaccgttgttttcgcacgcacttccaaccgatgatcgataaatatacgtcccagggaagtgcattcaattgctagacgttatcgagccaatgcttctattttcactttgttgctttctttattttcttaacgattcttctatttcactttgtcatggaaaagacgggttacatatgtgtgtgcgtgtgggtgcctgcccgtctcacggtctacgcttgtgtgcgtatgtttttgtacctggccttttgaaacggctttccacgtcgctttcgcacaatttttactatttcaaaatgtattttaccggtgcgaatgcattagtaaagtcactactattatttagcttgatttgttgctgttttcaacgtttacttgcatttcatattgattgtaggttttaatagcgatgggcgacaaaagtagcattgttgttgtttttcgaggcgaatggtgatagctatcgatagtacttttccatcgatagtgtcaaaaccagttgctctcaactttatgataaataaaaccagtaaagttaacaggaaaggaactgactttgcatcgcacgcaacttaagaaaatatgtagttactttttattttatttgttaaaggaatataaatattaaatataaaaattaaaaggaaagtaactgacttcttagtacgcttgcatcacaagcagaaccagaagaattattgtcactaattattgatttctttatttatataaattaatttttatttggtaaagattttatgttcataaattttgaatttttaaagtacataacatttccaaatatatatttaaattgtcttatgtatataatattttatcataatttatataacatttttttcccatgtctagctaacagtgttgcaaaattcgtgttgctctctgtgaatggtagtatttcaaaacgaaagccctaaaagtatgctatatttttaagtacgcactggacttcaaatttcagttagtccatttcaaaagtttgtaatacagataaaaatagttaactataactatgtaggtgacaaaaacacaaatgattttgaaatagtagtgctttttgagatttcagaataattcttggaatatgaacgcacaattttatcgataaacgcatgttaaaaagtttaggagttttataaaataagccgtttaatatctaccttacatcgtatctgggaaattcccgctctgactgcgagagtgaaagctttgctgaagaactaattaccctgcgacaaggtctcggcattcggttaataatttaattatgacaacttgcaacaggcgaaaaacagatgtaaacggatatccagcgatggctaccgcatgtggctttcttaattgcccatcgatgcccactgcctttagtactcccttggttgataa

SEQ ID NO: 26492 - DNA, 2866 bp, DROSOPHILA
ctattaaaacctacaatcaatatgaaatgataaaccaaggataacccaggttaactgtgttcttgttgtgttaaccattgattgccgccgaggaaagcaggttccgtcatcggaaaagtcggagaagcacctgctcttcttgcagctccctgctccggagtccgaaccgccaataaagtggaggagcagtgccgacgcttgcaaagcatgaatctgcggggaaatcctcccaagaaggagggcaaaatgcgcattcgggcctttccggcctccatggacgagaagtacgtggagaccatttgggccagcttaaagaatgctatccaggagatacagaaaaagaacaactccggactatcgtttgaacaactctaccggaatgcgtacaacatggtgctgcataagcacggcaatagactgtattacggtctgagggaggtcgtctcagaacacctggagcacaaggtgcgggcggatgtgctggaggctctgcacagcaatttcctacccaagttaaaccaggcctggacagaccaccagacatctatggtgatgatccgcgacatactcatgtacatggatagagtttatgtgcagcagcgcgaggtagacaatgtgtacaatttgggattaattttgttcagggatcaggtggttcgctattctgagattcaaaaggccctgcgagagaagttgctgggcatggtgatggaggaacgtcatggcgaagccattaaccatctggctatcaagaatgcttgcagtatgctgatcaccctggggattaactcgcgcactgtctacgaagaggactttgaaaagcccttccttgcgcaatcggcggcgttttacaaattcgagtcgcagaactttcttgccgagaacaacgctggcgtttacatcaagaaagtggaagcgcgcatcacggaggaatcttcccgggcagcgctgtatctcgataaggatacggagccccgcattgtgcgcgtggtcgaagaagagctgatcaaaaagcacatgcgacccattgttgaaatggagaactcgggcgtggtgtacatgatcaagaactcaaagaccgaggatctggcctgcacatataagcttttctcgcgcctgaaggaggagggtctcaaggtgatagcggacacaatgtcggcatatctgcgagagcaaggacgcatgctggttaaggaagaagaaaacggcaacacgaatcccataacattcgtgcagaacttgctggatctcaaggaccgcttcgaccagtttctggtgcactcgttcgccaacgatcgcatattcaaaaacgtcatctcatccgattttgaacatttcttgaacctaaataacaaatccccggagtatctatcgctattcatcgatgacaaactgaaaaagggtggcaagggaatgagcgaacaggaaattgagtccatcttggataagacaatggttctcttccgtttcctattggagaaagatgtctttgagcgctattacaagacgcatttagccaagagattgctgctgaacaaatcagtctctgatgatttcgagaagaatatgatatcaaaactaaagactgaatgcggctgtcaattcacctcgaagctagagggcatgtttaaagatatgtcagtctccaatacgatcatggatgagtttaagaactttgtaaataataacaatttatcccttggcggtgtggagctaacggtacgcatactaaccactggtttttggcccacacagacagcaactccgaactgcaatatacccgccgctccgcgtgaagcctttgacattttcaagaacttctatctaaataagcactcaggacgtcaattgacgttacagccacaaatgggaaccgcctatatcaacgctgtgttttatggccgcaaggcagttgaaagtgaaaaggataaagatgcacccagctccagttcaagcggctgtggggtgcccaccaccacacgcaagcacatattgcaagtgtccacgtaccagatgtgtgtgctactgctgtttaataaccgcgacgtgctcacctacgatgacatacaccaggagaccgatataccggaacgggagctcgtccgagcactacaatcgttgtccatgggcaaacccgctcagcgtttgttagtacgcaattctaaaacgaaaactaaggacattgagcccacggatgagttttacgtaaacgacgccttcaactccaagttccacagggtgaagatacaaacggtagccgccaagggagaatcagagccagagcgtaaggaaacgcgcggaaaggtcgacgaggatcgtaagcacgagatcgaagcggctattgtgcgcataatgaaggcccgcaagcgtctggctcacaacttgctagtatcagatgtgacgtcgcagctaaagtcgcgtttcttgccctcgcccgtgtttatcaaaaagcgcattgagggcctaatcgagcgcgagtatctgcaacgatcgccggaagatcgcaaagtgtacaactacttggcctaagcggcccacaaaaagtagcaggagcgtcttaagcaggatccggaacacactcatcttcaaatcgccagggcttgcacactaactgaaaaacacaatctgcagctcggacggaatggcctgagcatacgagcggcattgatatggcggatactgaccacgattatagatgaccgccagccaataacccgaatacataaatatatcaattagtgcgccccgaatcgtaaaatttcgtttcgcaacccattttgtaagcctgacattcaaaattcaacagttaaaaatgctattggataaggcaccaccataattattatccctctaatatatttcttga

SEQ ID NO: 26493 - protein, 773 aa, DROSOPHILA
MNLRGNPPKKEGKMRIRAFPASMDEKYVETIWASLKNAIQEIQKKNNSGLSFEQLYRNAYNMVLHKHGNRLYYGLREVVSEHLEHKVRADVLEALHSNFLPKLNQAWTDHQTSMVMIRDILMYMDRVYVQQREVDNVYNLGLILFRDQVVRYSEIQKALREKLLGMVMEERHGEAINHLAIKNACSMLITLGINSRTVYEEDFEKPFLAQSAAFYKFESQNFLAENNAGVYIKKVEARITEESSRAALYLDKDTEPRIVRVVEEELIKKHMRPIVEMENSGVVYMIKNSKTEDLACTYKLFSRLKEEGLKVIADTMSAYLREQGRMLVKEEENGNTNPITFVQNLLDLKDRFDQFLVHSFANDRIFKNVISSDFEHFLNLNNKSPEYLSLFIDDKLKKGGKGMSEQEIESILDKTMVLFRFLLEKDVFERYYKTHLAKRLLLNKSVSDDFEKNMISKLKTECGCQFTSKLEGMFKDMSVSNTIMDEFKNFVNNNNLSLGGVELTVRILTTGFWPTQTATPNCNIPAAPREAFDIFKNFYLNKHSGRQLTLQPQMGTAYINAVFYGRKAVESEKDKDAPSSSSSGCGVPTTTRKHILQVSTYQMCVLLLFNNRDVLTYDDIHQETDIPERELVRALQSLSMGKPAQRLLVRNSKTKTKDIEPTDEFYVNDAFNSKFHRVKIQTVAAKGESEPERKETRGKVDEDRKHEIEAAIVRIMKARKRLAHNLLVSDVTSQLKSRFLPSPVFIKKRIEGLIEREYLQRSPEDRKVYNYLA

SEQ ID NO: 26494 - DNA, 3593 bp, DROSOPHILA
gatgagtgcgaggaattcatgaaggaggagatgctggacgaggagttccagttcagcgagccggacgacagcatgccgtcgtcggaggaggagttcttcaccgagaccaccgagataccctgccatatctgcggcgagatgttttccagccaggaggtgctcgagcggcacatcaaggcggacacctgccagaagagcgagcaggccacctgcaacgtgtgtggcttgaaagtgaaggacgacgaggtactcgatctgcatatgaacttgcacgagggcaaaacagaacttgaatgccgctactgcgacaaaaagttctcgcacaagcggaacgtcctgcgccacatggaggtgcactgggacaagaagaagtaccagtgcgacaagtgcggcgaacgcttctcgctctcctggctgatgtacaaccatctgatgcgccacgacgccgaggagaacgccctgatctgcgaggtgtgccaccagcagttcaagaccaagcgcacctacaagcaccacttgcgcacccaccagacggaccggccgcgctacccctgccccgactgcgagaaatcgttcgtggacaagtacaccctgaaggtgcacaagcgggtccaccagccggtcgagaagccagagtcggcggaggccaaggaagccaccgtcacgttcttttagggtagtcctttgctagattaatctaagaagcccagctcatgggtgcattagcgcgcgtatgtatcataaaattaaatctaaacaattattgacggaaagtaccagttctttgccgttcttcgcccattttccaggaaccccagtaggtaaagtagcggatttcgcgaattttcgcgggtatggcaataaaacaggcagatgttttttaatccccaaaataggtcctttctacctgtgcgcttggcaaagtatataaaggtgttgcgtcgtccgccagaacttagttgaacatttctgtttcccggagcacatctgatagaacagcatggaacagctattggcccaattacacacttgcagtgagctgattgcagagggctacagcagcaccggcaacattggctggctgaacgagttctgcgccactttcctggacttcgccagcgatctgaaggctaggctgccggaggtggcgcccagtggcgcaaaccttgatgtggagaccatcttcctgtgcctcacccaggtggtaacctgcatcacccacctagagcggaccatcagcatggaggcaccgcatatgaccaggcagcacttcctcgaccgcttggactggtgcttgcggcgactgctcgtctccttgacgcaactggaaggcaacgtgaccccagtcaagaacctagaggatcactccttcgttgagctcatggacctggctctggaccacttggatgactacatggagaagctggcccagcagagaaacaactcgctgcacattctagaagagagcttcacggaagacacctaccagctggccagcatagttaatcacatcgttcgccacgccctggcctttgccaatgtggccattcattcggacaagaaggctttgacggctttgtgcgagaccttgctcgccgaatgtgccactttccacgaggaggcgggcgagcccaacagtggtcatcggaagctggaggccctctccctggaacgtgccctctatgccctggaatcctttctcaatgaggcgctgctgcacttgctgttcgtcagtctgatagatctggaaaacgcttcggtggagaagctaaaggatgcactgcaaagggatcctgcgggagctcaggagctaatctccgcattcgacacgaacatggatcgcattcagcagattggggttctggccatagccttctcgcaggacatcaaaacgaagacgattgtcaggagctgcctggcctcactggaatccctggatgcgtgcattgtgcccgctctccagctgccagagtccacttcatccgcacaccacgcggaggtcttgcaggagcattttaaccaggagctgctgatctttaggaacgtcatccacgaaatcatcgatagctgctccctgatcaacaactacctggacatgctgggcgagaggatccacgtacaggacaaaagccatctgaagctgattgtccagaggggcggagtggtggtggatcactttcggctgcccgtcaattactcgggactcagtgaagatggcaagcgggtgcacaaggacctcattctgatcctgcgcgagtgccaggccgtggtcaacctggacgtcccagtggatcccaagcgcatcgtgaagcgccttaagatactgtactccgtgctggccaagctgagggacttgatatgcagggataatctggagcccgattcctcagttgcttccgaagctcaagtgccctcaagtgcaacccgaacttttgtgcggagcagtcgatcctttggcaaacggcatcgatcctttgtaaaacaaaccggaaattgctcagttttcgggccacaggactcacttgctgaatccggacacagcgaaagcgatcttattagtttccaaatcactgagattcttaggttagattgagtggggcgagccatattctaaatacgcgggcttatctgtatgagattttttttaatacttcattggcttgaagtgcttaattaagattaaacatatccttacaaagattctaattagctacctaagtcaattgtgttctttacacttatgtaattacttcattaagttgaagccattcgcataatttatataaaatacaattaaaacataccattataaaaaaattatataattcaattcaattttttcagggaatcaataaattaaatgctactcgttttcataactaaagaaaccaacaccaccataataatcaacaacaaattatgtatttatgcaaattgaatatccgtttgcaatattgagcaaacacatatttttattattcaactcatatatttcagttttcacaccctgttccattcccaccgttccgttcctggcatcaatcggcatcgttcgccagccctggtgggcattatgccatggttgcatttcacgcattttagtatagcttccgatattcatcattttgccaactctattaaatttcatacacaatttaaaagattgtaaacaaacgccgcacgaaacggaatcgctaaaaggaccatcgtcggcgcaatggatacttgcttcttctgcggcgccgtcgatctgagcgacacgggctcctccagctccatgcgctacgagacgctgtcggccaaggtgccgtcgtcgcagaaaacagtgtccctggtgctcacccacctggccaactgcatccagacgcagctggacctgaagcccggcgcccggctgtgcccgcgctgctttcaggagctctccgactacgacacgatcatggtgaacctgatgaccacccagaagaggctgacgacccagctaaagggcgctctaaagtccgagttcgaggtgccggagtccggcgaggacatactcgtggaggaggtggagataccccaaagcgatgtcgagacagacgccgatgccgagg

SEQ ID NO: 26495 - DNA, 1593 bp, DROSOPHILA
atggaacagctattggcccaattacacacttgcagtgagctgattgcagagggctacagcagcaccggcaacattggctggctgaacgagttctgcgccactttcctggacttcgccagcgatctgaaggctaggctgccggaggtggcgcccagtggcgcaaaccttgatgtggagaccatcttcctgtgcctcacccaggtggtaacctgcatcacccacctagagcggaccatcagcatggaggcaccgcatatgaccaggcagcacttcctcgaccgcttggactggtgcttgcggcgactgctcgtctccttgacgcaactggaaggcaacgtgaccccagtcaagaacctagaggatcactccttcgttgagctcatggacctggctctggaccacttggatgactacatggagaagctggcccagcagagaaacaactcgctgcacattctagaagagagcttcacggaagacacctaccagctggccagcatagttaatcacatcgttcgccacgccctggcctttgccaatgtggccattcattcggacaagaaggctttgacggctttgtgcgagaccttgctcgccgaatgtgccactttccacgaggaggcgggcgagcccaacagtggtcatcggaagctggaggccctctccctggaacgtgccctctatgccctggaatcctttctcaatgaggcgctgctgcacttgctgttcgtcagtctgatagatctggaaaacgcttcggtggagaagctaaaggatgcactgcaaagggatcctgcgggagctcaggagctaatctccgcattcgacacgaacatggatcgcattcagcagattggggttctggccatagccttctcgcaggacatcaaaacgaagacgattgtcaggagctgcctggcctcactggaatccctggatgcgtgcattgtgcccgctctccagctgccagagtccacttcatccgcacaccacgcggaggtcttgcaggagcattttaaccaggagctgctgatctttaggaacgtcatccacgaaatcatcgatagctgctccctgatcaacaactacctggacatgctgggcgagaggatccacgtacaggacaaaagccatctgaagctgattgtccagaggggcggagtggtggtggatcactttcggctgcccgtcaattactcgggactcagtgaagatggcaagcgggtgcacaaggacctcattctgatcctgcgcgagtgccaggccgtggtcaacctggacgtcccagtggatcccaagcgcatcgtgaagcgccttaagatactgtactccgtgctggccaagctgagggacttgatatgcagggataatctggagcccgattcctcagttgcttccgaagctcaagtgccctcaagtgcaacccgaacttttgtgcggagcagtcgatcctttggcaaacggcatcgatcctttgtaaaacaaaccggaaattgctcagttttcgggccacaggactcacttgctgaatccggacacagcgaaagcgatcttattagtttccaaatcactgagattcttaggttagattga

SEQ ID NO: 26496 - protein, 530 aa, DROSOPHILA [sequence omitted]

SEQ ID NO: 26497 - DNA, 3406 bp, DROSOPHILA
cacgtacaggacaaaagccatctgaagctgattgtccagaggggcggagtggtggtggatcactttcggctgcccgtcaattactcgggactcagtgaagatggcaagcgggtgcacaaggacctcattctgatcctgcgcgagtgccaggccgtggtcaacctggacgtcccagtggatcccaagcgcatcgtgaagcgccttaagatactgtactccgtgctggccaagctgagggacttgatatgcagggataatctggagcccgattcctcagttgcttccgaagctcaagtgccctcaagtgcaacccgaacttttgtgcggagcagtcgatcctttggcaaacggcatcgatcctttgtaaaacaaaccggaaattgctcagttttcgggccacaggactcacttgctgaatccggacacagcgaaagcgatcttattagtttccaaatcactgagattcttaggttagattgagtggggcgagccatattctaaatacgcgggcttatctgtatgagattttttttaatacttcattggcttgaagtgcttaattaagattaaacatatccttacaaagattctaattagctacctaagtcaattgtgttctttacacttatgtaattacttcattaagttgaagccattcgcataatttatataaaatacaattaaaacataccattataaaaaaattatataattcaattcaattttttcagggaatcaataaattaaatgctactcgttttcataactaaagaaaccaacaccaccataataatcaacaacaaattatgtatttatgcaaattgaatatccgtttgcaatattgagcaaacacatatttttattattcaactcatatatttcagttttcacaccctgttccattcccaccgttccgttcctggcatcaatcggcatcgttcgccagccctggtgggcattatgccatggttgcatttcacgcattttagtatagcttccgatattcatcattttgccaactctattaaatttcatacacaatttaaaagattgtaaacaaacgccgcacgaaacggaatcgctaaaaggaccatcgtcggcgcaatggatacttgcttcttctgcggcgccgtcgatctgagcgacacgggctcctccagctccatgcgctacgagacgctgtcggccaaggtgccgtcgtcgcagaaaacagtgtccctggtgctcacccacctggccaactgcatccagacgcagctggacctgaagcccggcgcccggctgtgcccgcgctgctttcaggagctctccgactacgacacgatcatggtgaacctgatgaccacccagaagaggctgacgacccagctaaagggcgctctaaagtccgagttcgaggtgccggagtccggcgaggacatactcgtggaggaggtggagataccccaaagcgatgtcgagacagacgccgatgccgaggcggacgccctgttcgtggagctggtcaaggatcaggaggagtccgacacggagataaagagagagttcgtggacgaggaggaggaggaggacgacgacgacgacgacgagttcatctgcgaggacgtggatgtgggcgactccgaggccctgtatggcaagtcctccgatggcgaggacaggccgacgaagaagcgcgtcaagcaggagtgcactacctgcggcaaggtgtacaactcctggtatcaactgcagaagcacatcagcgaggagcactccaagcagcccaaccacatctgccccatctgcggggtgatccggcgcgacgaggagtacttggagctgcacatgaatctgcacgagggcaagacggaaaagcaatgccgctactgccccaagagcttctcgcgcccggtgaacaccctgcgccacatgcgcatgcactgggacaagaagaagtaccagtgcgagaagtgcggcctgaggttctcccaggacaacctactctacaaccaccggctgcgccacgaggctgaggagaaccccatcatatgcagcatctgcaatgtgtcgttcaagtcgcgcaagaccttcaaccatcacacgctcattcacaaggagaaccgcccaagacactactgctccgtctgccccaagtccttcaccgagcgctacaccctcaagatgcacatgaagacccacgagggcgacgtcgtttacggggttcgcgaggaggcgcccgccgacgagcagcaggtggtggaggagctgcatgtggacgtcgacgaatcggaggcggccgtcaccgtcatcatgtccgacaacgatgagaacagcggcttctgtctcatttgcaataccaacttcgagaacaagaaggagctcgaacaccacttgcaatttgatcacgacgtggtcttgaaataagctacattgcctacaataagtaattgtttatctttccctagtgtatttcctcctctttgtacttgattattgtagattcctacaaaatataatttactggtatttcaattactgcgtttcatttagacagaagcatttccgataataattgtacactgttctgtaaaaataattgcgaatatatatatgatttcatataaacaacctctttcaatactaagggggaaaaatgtaaaatatataacaaaattccctgataaggattgatgctgtctagttttggcacgtcaaggaatttatattggtctaatatctcgaggcagttgctatcagaaagaaagaccgcaatggtctggattaactgatatccatccagataatgcacatgttatcaatggtgctgctatcccaatctcagaaatgacaattgaactcggcactcgcacatcattttttaactaaaagtccggtatattaacgtttacaaatgtgtattccgaccacgttacaagaactctcaagaatcttaagcttactcgttctcttgagaacgcaggcgaccgttggggttggtgaggcggaccgacagctgcttggcgcgctcgacaatctccttgcgcttcttggaggagacgccgtgggcgatctcgccgcagtaaacgcggttctgcatgagcaggacctccagctcgcgcacgttgtgcaccaggaacttcttgaatccggtgggcagcatgtggcgggtgcgcttgttcgatccgtaaccgatgttgggcatcagatactgtcccttgaagcggcgacgcactctgttgtcgatacccttgggcttgcgccatttgtgctgcaaggagacatgttgattaaacacgggtacaatttggcacaatcctcgttggcactcaccgacagcttagcatatcgatccgactggtggcggatgaagtgcttggtgcgcttcttcacgatcttgggcctgtatgctgggcggatggtcatc

SEQ ID NO: 26498 - DNA, 1406 bp, DROSOPHILA
atattcatcattttgccaactctattaaatttcatacacaatttaaaagattgtaaacaaacgccgcacgaaacggaatcgctaaaaggaccatcgtcggcgcaatggatacttgcttcttctgcggcgccgtcgatctgagcgacacgggctcctccagctccatgcgctacgagacgctgtcggccaaggtgccgtcgtcgcagaaaacagtgtccctggtgctcacccacctggccaactgcatccagacgcagctggacctgaagcccggcgcccggctgtgcccgcgctgctttcaggagctctccgactacgacacgatcatggtgaacctgatgaccacccagaagaggctgacgacccagctaaagggcgctctaaagtccgagttcgaggtgccggagtccggcgaggacatactcgtggaggaggtggagataccccaaagcgatgtcgagacagacgccgatgccgaggcggacgccctgttcgtggagctggtcaaggatcaggaggagtccgacacggagataaagagagagttcgtggacgaggaggaggaggaggacgacgacgacgacgacgagttcatctgcgaggacgtggatgtgggcgactccgaggccctgtatggcaagtcctccgatggcgaggacaggccgacgaagaagcgcgtcaagcaggagtgcactacctgcggcaaggtgtacaactcctggtatcaactgcagaagcacatcagcgaggagcactccaagcagcccaaccacatctgccccatctgcggggtgatccggcgcgacgaggagtacttggagctgcacatgaatctgcacgagggcaagacggaaaagcaatgccgctactgccccaagagcttctcgcgcccggtgaacaccctgcgccacatgcgcatgcactgggacaagaagaagtaccagtgcgagaagtgcggcctgaggttctcccaggacaacctactctacaaccaccggctgcgccacgaggctgaggagaaccccatcatatgcagcatctgcaatgtgtcgttcaagtcgcgcaagaccttcaaccatcacacgctcattcacaaggagaaccgcccaagacactactgctccgtctgccccaagtccttcaccgagcgctacaccctcaagatgcacatgaagacccacgagggcgacgtcgtttacggggttcgcgaggaggcgcccgccgacgagcagcaggtggtggaggagctgcatgtggacgtcgacgaatcggaggcggccgtcaccgtcatcatgtccgacaacgatgagaacagcggcttctgtctcatttgcaataccaacttcgagaacaagaaggagctcgaacaccacttgcaatttgatcacgacgtggtcttgaaataa

SEQ ID NO: 26499 - protein, 433 aa, DROSOPHILA
MDTCFFCGAVDLSDTGSSSSMRYETLSAKVPSSQKTVSLVLTHLANCIQTQLDLKPGARLCPRCFQELSDYDTIMVNLMTTQKRLTTQLKGALKSEFEVPESGEDILVEEVEIPQSDVETDADAEADALFVELVKDQEESDTEIKREFVDEEEEEDDDDDDEFICEDVDVGDSEALYGKSSDGEDRPTKKRVKQECTTCGKVYNSWYQLQKHISEEHSKQPNHICPICGVIRRDEEYLELHMNLHEGKTEKQCRYCPKSFSRPVNTLRHMRMHWDKKKYQCEKCGLRFSQDNLLYNHRLRHEAEENPIICSICNVSFKSRKTFNHHTLIHKENRPRHYCSVCPKSFTERYTLKMHMKTHEGDVVYGVREEAPADEQQVVEELHVDVDESEAAVTVIMSDNDENSGFCLICNTNFENKKELEHHLQFDHDVVLK

SEQ ID NO: 26500 - DNA, 1486 bp, DROSOPHILA
tctcgatttctcttactttcagtaaccaaaaacacaaatcaaaatggctgatgatgaggtgaggtgagtatctccaacggccccctttctaccgcctttgagaaacggttgattaacctttgaccctcttcttcagttaactattttggggcattaatcgcaagcactgttttggaaattggaagtgatttggacgggattaaacctgactggatgtggatttaggtaagcaaagctcccgaacaatccagaagcttcaacagccccccacttgcaaccacgcaacatgcaacccaagcctttctttgcctttctcttgctttcacaggatcgctgcgctttgcaaccctctgaatcccagccatttcttcctttcgatcaaggagcacagataatgataactgtcaagtctgactgaaagccatgtctgttatcgttagtgtgtgtctatgtctctgtgccttgctttgtccctttttttgttatcgtcgcgtttgtgcctggagaaatttgagatctatttaaagtagtttaaaatcaatgaaatattacaaccaataaaacttggctgaccattcttatataatttaaatgagtttaaaacctatttgattactttaaataattgtggatgattgagaaatgttaatagttcctttgaagtttaagcaattttctcctagcctggcgtactttttcgattcctagaactgcaactaaccagcaatcatttaacttgatttcagaaaaaggcagcagctccggccgcagctccagcggcggcggccaaaccggcggctccggcagcagccccggcggccaatggcaaggctgctccggcggccaatggaaaggctgctccggcagctgccgccgctcccgccggtccgcccaaggatcccaacgaccccaaagtgaaggccgaggaggtacacttgtgtacgtgtgtgcccgttcaacttaacgtccatgtcaaagtccaagtctcgtgctgtgcagtgctgtgttcgaatatcatatctagtgttgtgtccagttttggatgtgagcaaaccatgctgatacccggattgttcgttcatttaatttgcaggctaagaaggctaaacaggctgagatcgagcgcaagcgtgctgaggtgcgcaagcgcatggaggaagcctccaaggccaagaaggccaagaagggtttcatgaccccagagaggaagaagaaactcagggtaagtttccagcatataccaacgctttgtatgatcgccagctaatcaaagccctccacttgcagttgctgctgcgtaagaaagccgctgaggagctgaagaaagaacaggaacgcaaagcggctgaacgtagacgcatcatcgaagaacgttgcggcagtcccaggaatctcagcgatgccagcgaaggtgagtagcctcggtcctcgaaccgaatgattaagatccctgatcaggcgagtggaaatccctagaggtttccct

SEQ ID NO: 26501 - DNA, 386 bp, DROSOPHILA
tctcgatttctcttactttcagtaaccaaaaacacaaatcaaaatggctgatgatgaggctaagaaggctaaacaggctgagatcgagcgcaagcgtgctgaggtgcgcaagcgcatggaggaagcctccaaggccaagaaggccaagaagggtttcatgaccccagagaggaagaagaaactcaggttgctgctgcgtaagaaagccgctgaggagctgaagaaagaacaggaacgcaaagcggctgaacgtagacgcatcatcgaagaacgttgcggcagtcccaggaatctcagcgatgccagcgaaggtgagtagcctcggtcctcgaaccgaatgattaagatccctgatcaggcgagtggaaatccctagaggtttccct

SEQ ID NO: 26502 - protein, 91 aa, DROSOPHILA
MADDEAKKAKQAEIERKRAEVRKRMEEASKAKKAKKGFMTPERKKKLRLLLRKKAAEELKKEQERKAAERRRIIEERCGSPRNLSDASEGE

SEQ ID NO: 26503 - DNA, 2447 bp, DROSOPHILA
gaatacgaggtggtcaccactgagcacgaggtccagggaactggcggagccaccgtcgaaggcggcaaggccacccaaagcaataaccatatcagtctgcgacgcaaaggcgcccgccgcggccaggtgatcagcgttcgcatcccaccccgctaccgccgctacttcaagaacggccagaaggtgatgctcaataccggtagtcgtcccgtctccaagcgtcgcgtggttcgcaagcgagtgcctgccaagaaaatcaacaagaacaaccggaggcgcaacggcaacaagaagaatcgtcgcaatcgcaacaagaaccgtcgcaatcgcatcaccgccgtctaaggatctaggattcaaggtcaggatccaacgatccgacacattccggcaagataatttttttttctaatttattgtagcctaacttgctactgccacacttcctgcggcaggataaacgataaataaagcccttcaagaataacaaaactgcattcttactttatctttgcgcggtaataatactaataataaaaatagtaaattgtataacaaaataataagattataagagaataagaacgggctaaaatatagttgcgaatagcaagtaaggtaggaattaaactgaagaaactgagtacataccttacccacaatttactttaggctcatttacatcttcatattaattgcttatacaatttttcaaaaaacatccctctaaagatcggaggttacagcgatgaagcaccaaagatcaatgatcgttgatcttcagaagcaaagaaaggcaaaaacaatagttggtacaatctcctttatgggcatagaatcaaagaaaaaacaaaagtctgtgaaaagtacgcacttgacccacatttttgggacgaaatcaccaaagagatcagatcgtgacgaatgatggggcaattttcgggtatttaagcggctgtttagcccggggctcagtacaaacatggctggacagcgatttatgatcgtactgatcgtggtttcaatcttgttaccatcaattccggaggcttctgccaaagcctgtggatcgagactccagttgcgggctcaaaatgatcccgttgacctcagtcgtttgagcgagaagcagctaaaacagctggctgagcagttggcaaaattcaaaacgcagaaggacgaatatggcggtgatctggtggaggaagaggatgacccagaacaggatcagcagctggaggatgccgaggacgatcaccgcggcggaagtcgtccatggaacagggtgcagcggataatccgaagacagctgataaaaatacccaagagatatctcaagaagctcctaaggcaatttggattggcccggagtgctggatatagcggtgtccggagtgcgaacttgactccccagctggaggagtactacctaataccactgcagtgaaattattgaccggaaataaatacaaacattttgaaaatacaacacttttacgtacactcttttgggcgctgggctaaaaacaattgctgagtattgagtattgctcgtactcaatactgttggctatcaaatagccttccttaaagcaaaaatgaatggaaaatattaatatttttaaacatgacaaattaaatgaatttccatttagttgccatcagagacgtagacgtattttttaaacgagcctaaaactatgtttcggcaaacaaacataaaattcatatacaaagcacaattttttttttaagcgcttttgtgatctttggactcttacatttttttcttgataaacatatggttccaccgaaaagctctgacaacgatcgtgtggtaaaaagctttccaccacttcacttatgtttcatttgttcatagccaatcagctttggaacagctgttggccggcgatatattttagtgattatatagttgtcgcacgaccgttgaggagaaaacaagtgaaaactgctgtttactaagtcatttttagagccatgtcagtgggagtactagctggaaaagtagccctggtaacaggtgtgtattcgtttgttttctcttgatatctgctctttatatgggactcttctaaactggagtttttaggtgccggatcaggaattggtcgtgccacctgccgccttttggccagagatggtgccaaagtgatcgccgttgaccgcaatctaaaggcggcccaagaaaccgtacaggaattgggctctgagcgatctgccgccctggaggtggacgtttcctctgcccagagtgttcaattctcggtggccgaggccctaaagaaattccagcaggcacccactattgtggtcaattcggctggaataacccgagatggttatctgctcaagatgcccgaacgggactacgatgacgtatacggggtcaatctgaagggcacctttctggttacccaggccta

SEQ ID NO: 26504 - DNA, 447 bp, DROSOPHILA
atgatcgtactgatcgtggtttcaatcttgttaccatcaattccggaggcttctgccaaagcctgtggatcgagactccagttgcgggctcaaaatgatcccgttgacctcagtcgtttgagcgagaagcagctaaaacagctggctgagcagttggcaaaattcaaaacgcagaaggacgaatatggcggtgatctggtggaggaagaggatgacccagaacaggatcagcagctggaggatgccgaggacgatcaccgcggcggaagtcgtccatggaacagggtgcagcggataatccgaagacagctgataaaaatacccaagagatatctcaagaagctcctaaggcaatttggattggcccggagtgctggatatagcggtgtccggagtgcgaacttgactccccagctggaggagtactacctaataccactgcagtga

SEQ ID NO: 26505 - protein, 148 aa, DROSOPHILA
MIVLIVVSILLPSIPEASAKACGSRLQLRAQNDPVDLSRLSEKQLKQLAEQLAKFKTQKDEYGGDLVEEEDDPEQDQQLEDAEDDHRGGSRPWNRVQRIIRRQLIKIPKRYLKKLLRQFGLARSAGYSGVRSANLTPQLEEYYLIPLQ

SEQ ID NO: 26506 - DNA, 6851 bp, DROSOPHILA
ttcccaattccttcgaggtgatggcaccttcgttatccttatccaataagctatagatattcttgagcaggtcctgctcttcaacagacaattcatccattatgctttatattatgggaaggagaatattattattatgctagtagatatactttttcgataggattgatactcagttgaggtctgataagctttgaaggagttctacgattgaaaattgttattcaaaacattcaatataaatatttttgaaaaaagccaactaagagttagccttcggtctttaacagatattaaacaatctgcgtgctccatgaagttcataaacttttactgaagataaaggcattaaaagagcattctcacgcacagtttggcaaacaaatcacgtgctttcctggacccaaatgatatcatctggcggagaaactctttggctttacgcgtattattttatagttgaaccagaaattgatgtcatcggtggcggtaaaaaatgggcgcccaatccgcccaatgaggaaattccaggaagccgggcaactccaactgtcggtgatgacaatttgcgtggcattttaattgaactttctacgtgttcgagtggtgtactttgatttgatccccatccaccgatttttcgtcgatttgagtcaatgttaaaggcgttgccacaaaccgcaaactgtcgtgtctaggaggttggggaggggcttggtggctggggcctcgaaacgtgcctgaagtattattaccgccgtctgtgattgatggcctcatgcgagtgagtcagtggatttttataactctacgcagatcccttcctttcaatcaagcggcaaaaaatctggacatcgatctcgccgatattagctaacttcatttcaacttaactgcccggagtgctttgaataaagtggatttgaggcgatgccttgggattcttggccagattaagtcgattttttttttttacttcaatgaaaaaaatggcacgcaattgtttttcattattaatgcatactttatttgaaatcaactaactcgctatggtttgaataaaatcatttaaaattgaaggaagaccatggaattctatgggttgcttatattaactactgcaaaactcttaaaatttaagcctaattacataaggttctactggaatgttgcttgtagttggatttttgtttatgctctgctttacactaacttttactttcaaccatttttttccctacagcaaaatcgattaacgattttgtttactcattaagattagcttaccggataaggaaacataaataaaaaattggaattcactcagcaaacagcaacacttagtgttgggccacacattaaaaactaatcgatagactctcgtactaaaggcttaaacatttaaatcggtagatttaagctaaaatcctaacgcataagagctctataaaatgcaacaacggagtttgtttcgcttacaattatcgcttaactgattttattacttagtttaggtctattgccttgcctagacattgtactaaaaagtattaaattgtagatctaaatttattttaatgtacttgtgggtctaaaacgataaatcctcgtttaaccattgggaacaataactgtttgtcattatgatattcaactgttcataagaccttctaaatgaaataccagaaaaaacaaccgagatatatatttattaggaatactactactttttgatatttcaaattcgtaagagctttgataaatagttttccaaattgtgttgtttttctattccgattttacctccattaatggattgttttctagttctttctcggtttacttctaacgcctcattatgtcctcaatgctgaaccctgttcttctcggtggtgcaggcggtggtgctatgggcggtgctgccactggtggtcccttttcggtggtggctccacttgtttccgtactcggtggttttcccagaagctgtctggggggatgtcgcgacatattcaaagcatatatgctgggactatccacaaaggtcctttgacccaatccaggatggtggtgcggatccatcaagtccaaggtcggtgccggaagaatcctctttcgcatgggtatcgatcccaggaagctgggcatagcttcatgcggtgaatgcaaaggttgattgggtggtttacccgactccggctgggttattatagtgggtggtgtatgtggtggcggtggaacaccagccttcgaaaggttcaagctcttgtggtgcaagtcgcgtcgaacgtgcagaatgggcaaatagggatccccgttgggtgggagtaagtgtggatgtcctgggtgctggtgggttggcggaggagctccaggtggtgcaggcggcggtccagctgccccaggtggtacagaatatcgcacaaaggaaggtggaacgggtaggctggcaatgccagagttcccgggttcctcctgatgtttctcgccatgtggccgcattgtgtaggtttcaccaccctcatgatgacagtgggtgactccctggcgttccggcttggtgcccactgacgacgatgattgcgatgtggcggcagccttactcgcctggaaacgcgccactagtgccacttctgcctgctcctcgtcctcgggatcaaagtcgtcgtcctcttccctgggcaaatcgtgtactcttggcagatcctgcagttcctcttcctcgtcgaagtcatcgaactcctcttcgctttcctcatgatcgatggctgccttgcgcttgagtctcattctttcggactcagatttctcacccgatcctccagactcgcccaaattgtgaactggcgactggcgaggcgagtccacttccagcaacgaatcctcctcgtcgccacttaaatttctggcctcatcctcttcgcccacatccacatagtccccggagttgacctcacccactgcatgggtcaaggcatggcgtcgtagatcgcagttacggcggaaaactttgccgcatgaagagcactcgtagggcttgtgatccgtgtgggtgagcagatgggtcttcaggttggagcgctgattgaatgatcgactgcagacggggcacttgtggggtgattcctccatgtgcaggatcttgtggacagccaaggttctcgattggcagaatcccttgccgcattccgtgcatttgaagggtttctccttggagtgaatatacctgggcgaatacaagtggagaaacaattagactttattgttatagcgtgggcgttttcctggtagctgcaattggtagcccaggttgacagttatctctgctcaaatgcagccttaacttgaaccgataaagctcactgatatacagctttacaatactctaactaaggatataactggctagagcagacaatagaataaataatataatactatagcatataatacctatctttctctttcaaaatgaaacctaacctggatttgttttaaccttaaacccaattctttaaagtttttcattaaagaaatcctatgattttgtatcctcttaactgatagggtatttaactttcgtgtatgcgatctggctgcattaattttttatgtttatggcggccatcttggcaatggcgtccacttgctgttggatagcagcagccacagttaaaagttaaagtccccatcttcgacggagccacagattcagcatcgcatcggaggcagcagctgctggtggaaaaaaaaaaataaatgtataaaaacccaaaacaggttctgcctccgaagcaccgagattcttctcccatgctccgtgcgtttctggtaaaaaaaaaatacaaaaaacttaagaagaattagccccgcggcaaagcaaacaaacgacaaatggaccgataccgaacgatcaaaagacagaacgctcggacaggccgacacattgaagccgggatgctggacctgctgcctggcatcggcatgggcatcggcaccgggatacacagacccgatatatagcccccaaccccttggccatccctcaattttaatgctggtggaggagccccaaaggaaaaccaacagagttaattaactttgtgttgtactctgcggccgagttgaagttttactggccgtcagaggagctctgattttgggtccgctttatggggacttacttatttgagttgaggtaggaaaattcgtcgtaaagtttaaacatttcctggaaaattccttatggtaaaaggggtcttttgaagcgattgtctgatatatctaaaatcaataaaactccatctacgagtagtggtcgcctttcccttttggccgagattactgtcacacctgttcagaatgtgtgtataaactgcctagtaagcaataaattacattgatctaattatcctttgcctttacagggtattccattattcgccattcgttcacactttgagcacaaagaataactccaggcctgatggcaattacccgagcagacactgcccccttttgtgattacttgtaccccaacctcgactcacctgtgatccctcaggtgatcctgtcgccggaacgccttgccgcagatatcacaggaatagggccgctcgtccgtgtgtgtcctctcgtggatgagcagattgtacgacttggtgaattgtcgattgcagaacttgcagatgaactgttttttaggccgcgatgcccgaccaggagcacgtagcaggcgcctatcgagtccggcatgcattccaggacccaggccaggtggaaatagagctgcggcggcggctcctggtggaaatggaaaacttccggctcccgtgggcgatggacccggtccggtgagatatggcggaggtggcacgccagctggtccgtacaacactccaggcggtggcacaccaggaccgccgggtcctccaggacctcgtcctaacattgccgccgccgcagccgcctcccttagggccaactcctttcgcttgtccgccatcatggcaatgatttcgtaattggaattactacccgggcgcacctttccggtgggcagaaccggcacaaaggcagagatctcgcgatgatgcgatggtggtggcggtggcggcggaccatgcagtccggccaaatgctgctgataggccagctgtgtttcatacgctgagatccggctggccgatgagttgcgcgaatcgccgttgccattctgggagccaccatccgatcctccggatccgccgttcctatccgccgcaccaggaagaccgccaccacccaccgccgccgctgccgccgccatcgagttcatgaactgatccatccgggaaggtcgcagcatgggtatcgcaccgcctcctccgccggagatctcgctggatgagctttccgtgggcattatattggaggggctcttcacattccgttggaactgccggagatagggatagaacagaaaaagccgaaaataaaataagggtagtggtaaataacaattagtacacgattgtgctgggttaattgggctctcgtttttttttcgaggcttatcttaattgcgaaccgagtgcaataaacagatatttccacgttgtattctttattgctcctagggtagtactgggtatgataaaaactgacgcaaactggtttaaaatagatatattactattaacttagtttcttcttggtgggaagtttccttgtaattgaaatattcatgatcttggtttggcaaggcacaggaatatatacaatatatactatagaatatttactctttttatctcaaccggttgtaactcactttttagatgtgaaattcttcaaatttgctttttgcacttcttatcacaaaattaaacagctttatgggcaattaacttgcaaatagccaaggattatcacattagctgatctttcagaatttatccacgtgaacgtgatttagtagtcacaaaaaaaaaaataatgaagaaaatatttttctcgaaaataacccatacgattctgagaacgttttggtatcacagtacgtatattttcacagggtaactaagcagtttatcacattatggccctcgtctatgggtttgttgctgtgttttttccataggaattttattattattgttggtttattattatcagcggcggactgccgacgacggcgagtgaaactaaactgaaaacgagtcgcagtttggcaccgcgatcggttgcttccagtgcgcaggttagataagattgtgcgtctaaaaaaacctgcctccgaacctctgagactgagtaagcagcacagtagtaacgatataaacacacacacacacacacagttatattatatatgtgcctgtgatatatggcatatcggcagataccccggcacactcagatacagatacaaagatacagatacagaggcaggcagccaagttgccgtcggttttggtaaatgactcgaaccgaactcgaccgactgcttactggatttacgcaacaggagcctcgacttctgagtgcctcgaaagaagaaggggcagaggcaggggcaggggcaggggatcgggtcccggaacgtgatcatcacgataataacaaaataatgcacataataatgatcacaatgatggccggaccataaagtttgtggccccatattgcaaacgcttctggctgccatcttcccaacgccttgcacagcaaaaaaaatggcaccaattttgtacccaattctatggaattctattttaagatctatcttttacgataagattatatttgttataatattaaagaatttatagtaatatgctttaaaatttgtggctcgcaaagagtgcgcc

SEQ ID NO: 26507 - DNA, 3152 bp, DROSOPHILA
agtgcaaaaagcaaatttgaagaatttcacatctaaaaattccaacggaatgtgaagagcccctccaatataatgcccacggaaagctcatccagcgagatctccggcggaggaggcggtgcgatacccatgctgcgaccttcccggatggatcagttcatgaactcgatggcggcggcagcggcggcggtgggtggtggcggtcttcctggtgcggcggataggaacggcggatccggaggatcggatggtggctcccagaatggcaacggcgattcgcgcaactcatcggccagccggatctcagcgtatgaaacacagctggcctatcagcagcatttggccggactgcatggtccgccgccaccgccaccaccatcgcatcatcgcgagatctctgcctttgtgccggttctgcccaccggaaaggtgcgcccgggtagtaattccaattacgaaatcattgccatgatggcggacaagcgaaaggagttggccctaagggaggcggctgcggcggcggcaatgttaggacgaggtcctggaggacccggcggtcctggtgtgccaccgcctggagtgttgtacggaccagctggcgtgccacctccgccatatctcaccggaccgggtccatcgcccacgggagccggaagttttccatttccaccaggagccgccgccgcagctctatttccacctggcctgggtcctggaatgcatgccggactcgataggcgcctgctacgtgctcctggtcgggcatcgcggcctaaaaaacagttcatctgcaagttctgcaatcgacaattcaccaagtcgtacaatctgctcatccacgagaggacacacacggacgagcggccctattcctgtgatatctgcggcaaggcgttccggcgacaggatcacctgagggatcacaggtatattcactccaaggagaaacccttcaaatgcacggaatgcggcaagggattctgccaatcgagaaccttggctgtccacaagatcctgcacatggaggaatcaccccacaagtgccccgtctgcagtcgatcattcaatcagcgctccaacctgaagacccatctgctcacccacacggatcacaagccctacgagtgctcttcatgcggcaaagttttccgccgtaactgcgatctacgacgccatgccttgacccatgcagtgggtgaggtcaactccggggactatgtggatgtgggcgaagaggatgaggccagaaatttaagtggcgacgaggaggattcgttgctggaagtggactcgcctcgccagtcgccagttcacaatttgggcgagtctggaggatcgggtgagaaatctgagtccgaaagaatgagactcaagcgcaaggcagccatcgatcatgaggaaagcgaagaggagttcgatgacttcgacgaggaagaggaactgcaggatctgccaagagtacacgatttgcccagggaagaggacgacgactttgatcccgaggacgaggagcaggcagaagtggcactagtggcgcgtttccaggcgagtaaggctgccgccacatcgcaatcatcgtcgtcagtgggcaccaagccggaacgccagggagtcacccactgtcatcatgagggtggtgaaacctacacaatgcggccacatggcgagaaacatcaggaggaacccgggaactctggcattgccagcctacccgttccaccttcctttgtgcgatattctgtaccacctggggcagctggaccgccgcctgcaccacctggagctcctccgccaacccaccagcacccaggacatccacacttactcccacccaacggggatccctatttgcccattctgcacgttcgacgcgacttgcaccacaagagcttgaacctttcgaaggctggtgttccaccgccaccacatacaccacccactataataacccagccggagtcgggtaaaccacccaatcaacctttgcattcaccgcatgaagctatgcccagcttcctgggatcgatacccatgcgaaagaggattcttccggcaccgaccttggacttgatggatccgcaccaccatcctggattgggtcaaaggacctttgtggatagtcccagcatatatgctttgaatatgtcgcgacatccccccagacagcttctgggaaaaccaccgagtacggaaacaagtggagccaccaccgaaaagggaccaccagtggcagcaccgcccatagcaccaccgcctgcaccaccgagaagaacagggttcagcattgaggacataatgaggcgttagaagtaaaccgagaaagaactagaaaacaatccattaatggaggtaaaatcggaatagaaaaacaacacaatttggaaaactatttatcaaagctcttacgaatttgaaatatcaaaaagtagtagtattcctaataaatatatatctcggttgttttttctggtatttcatttagaaggtcttatgaacagttgaatatcataatgacaaacagttattgttcccaatggttaaacgaggatttatcgttttagacccacaagtacattaaaataaatttagatctacaatttaatactttttagtacaatgtctaggcaaggcaatagacctaaactaagtaataaaatcagttaagcgataattgtaagcgaaacaaactccgttgttgcattttatagagctcttatgcgttaggattttagcttaaatctaccgatttaaatgtttaagcctttagtacgagagtctatcgattagtttttaatgtgtggcccaacactaagtgttgctgtttgctgagtgaattccaattttttatttatgtttccttatccggtaagctaatcttaatgagtaaacaaaatcgttaatcgattttgctgtagggaaaaaaatggttgaaagtaaaagttagtgtaaagcagagcataaacaaaaatccaactacaagcaacattccagtagaaccttatgtaattaggcttaaattttaagagttttgcagtagttaatataagcaacccatagaattccatggtcttccttcaattttaaatgattttattcaaaccatagcgagttagttgatttcaaataaagtatgcattaataatgaaaaacaa

SEQ ID NO: 26508 - protein, 744 aa, DROSOPHILA; identical to SEQ ID NO: 5139

SEQ ID NO: 26509 - DNA, 4525 bp, DROSOPHILA
gaaacataattacaatgcctgaatgataatctcgaagccctatagcaatatctaaacagatttttttttttattttacgttcttttttatataaaacctaaatattaaaaaaaataaaaaaaaactgaattttaaaggcatacatattttatatcaatcagccggaaaaaatcgctaccactacttctgtaaattaaattattaataagtagttgtatatatacgcatatatatgtatattatatatataagaaataatgcatacatataaatgcatatattgtagatatatgtataaatttttatatacatatacatatataatataatataattattattacttatacgtatatatatatgcattattgcttattataataattataccttaataagtaaaaatttataaatacatagttaaatatatacctatgtttgtagatatatattttaattgttgaaaatatttgcaatttttctgttgctcttttttgcacttgttacggtaagcagaacttgcatccaaatgtacatgtctagtaaagtacgggtaatatatgggagtaattttcagtaacggagaagcagcgatgtacaagtgttaaacacttgctagttccaggtgtgcgatgtacatggatgacccgacattgagctgatatgtgacatccctggatccttacatagatcctggtgtttcccttttccacgtcatatcatcatattcggtttataattgcagttgcggattctggtatatacagtaggcagcaccagtgttttatggtgttttcggaatttaatggccttttccgtagtttcaaggtagttgggcggtttgttatataatataaggggttgtcattaagatagagacgtgacgtatgagtagactgtccatcaacttccatcgtattattgctattgtttgtaaaaaatataatttttgtacatatatatatgtccatatgtatctgtgtaaactgctcacgaaatcctaatccttcttgatccgtgcctgaagaaagcagtataggattcctgcctgagccataacgtcgactgtgctggctgccagtggatccttctgcttcacctgcgtttggcccggccttagcaaggttggtccaaacaccatggccagattgtgcaacgacatcttgttatctgtctccttttcgtggactctacaataagtagtgacaaaaaaagtttattttaaacgtccatgtttataagaaacaaaccttattaaatgatctaatatcgaagtaatggaggctttgttggcctgtggcaactcctcaaaaacttttagaagctcgttgattcgtgtggattcgttgttgttgctaaaggcgctgaatgtgtcgaaaaatcgtggataaagttgatccgtgaaaagggcctcggggagctcccttaaaaaagttttcagaatgccagtgaccgaatggatgtccacctcgcgtagcaactgctccgcctcataggcatctgaagaaaataaaattaagtgcaaattagtaataagacatggttacccatcaaagccatatattcaccagactcaaaggccttcttcagcttcgccaaatcagaagcggaaccgctgacgcggtagcagccaacctccagcatcccacgccgctctacctcccgaatgcaggcgcctatgatgaacggaatgtcgcgtttttcacgtctgaatgaacagaaatatatagttttacattaatttatattgctcacaaagtttattaaaatatttaattatttctttacaattttcatttcacgaaaaggggtgctgttatttgatatatggaattattatttactttaatacttgactcattttggcaccgaagagggctcctggctttgtgctgccgcggaagagctcgcctggtataaaacggaagctacagccgagctctaaggtctcagtaagtttaattgacttcggctgcgttgtttctgtcagccaacttaaactcaactatggaatcaagcggaattattgatgtaaaacttaataacaaagatcaacttttaactcccaccttaagtatgtgcttggctttaagaagcggtcgctccttagcctcataaagaagaatgcgtacattctggctgccctccagttccagcataaagctttcgttccagagcggcgtttgactgcgacatatcttcttggtggtggccttgcgaaaatagtggccataggagtccacctcgacgcagatgtacaggtcgttcgcttgctccagtccttccaatccatgaactcccatgtacaggtccccaaccaacaggctctcgtcgttagtgttacgcataagatatgaacccatttcggttttcatgcccttctgcatggctacaatgaaggcggtaacctccagggaattaatagtatttgctccaggcaggttgcatttttgctacataaatatgtacataatttatcgccttattaagctgaagtaggtcagagaaactaaccttaagggataagattgagtcgatccactgcgtcctctcaaaatccgagctaagaaagaaggttatggttttattatttgccttgttccccaggcgcaacactaaattgggcgttgccagcaccagctgtgattccagatccgccagcttgcggcgatacttatcaccggaacggaaggctccacttccactgttagccacctccatggccaattgatctcgaacggatcgcaaattgcgttttacttgcgaaatgtttgctggactagattccttaagctcgaccgccggatctgcttcctcgtaaatggatacgtcttttagcggaatgaaccatttgagctcatagtcgatacgatcgcggcctaatgctttgtatttggcacatgcgatgacatcattaaaaagaaagagatgccgcagcttacgatgtccatcgacaagttctacaataaaagaattacgcaccatgcgtcttaaatttcgattcgattcaatgggcaaccgctgattgaccacattgaactgattgaggaacatctgaataatcttttgcgcctgccttaatggctggtgatccggatgcgcatttggggtttcgcgtagcaaatcgttgaagaccaatgcgttgatttgtaccctcgcaacaggtttgtgcaatagatcctcgagagttagcgattgttccgtctgcagattaagcacaatggtggagacgatctttttaaactgggggttattggcactgcacttcttcacagtctcaatagcatttttgtagttgtgcaaaaaggcactgtataagtcaaacatctccgccagtcgacgaaacggctcaccgatcagcacatcaccaccctcgtgagacacaatagtctttaaatcagataagaaaccggtatgcagatcgtaaagctcatcaattttaaagaaaattgtgttctcctcctcctccctgatcacaggctgcgaagtagttagggttgcgtggatggccttcttgtactgcatttgggaagaataggaattaaccacattagcaattttaccactcatataaatcacgttgtaactccctaacaatttccactttttataccccttttagagggcatattaatttcagtcagaagcttgtgacgcagcaaatgaaaacttttgcgaccatatgaagtaatgaagtatatataatcttaatcaatatcaacagaaagtgtataagtcggagcgttccgaaacggacccatatcatgcagccgccataggattaatcgaaaaaaaagtttgttttttaaattgatacaaatcggacgagtaattcattaagctgtcatatgagcagtacgaaaatgtattaataataagtttcttcattcctgcttcaattatcttttggtttgaaactgtttaatttaaatagcatatataatttttcgtgatttttatatatttaatttaaatatcttgggaaaccctatttctatgccctcccacaaaacgaagtttataagatccgtattacatacctgcatcattttattgaggcattccacgtagatagtctcactttgaataattgagctaagtatggaacgtattttagcaccgcgcgcatttccacaaacctatgaaaaagcgaaccacttggatgaaatgggtagttgtaagtaacacataaaacgtggtagatgaggccaaaactttcctaaacccgcttaaaaagccttttcacaactatatataaactatctttaaatagcttatatatggtttcgtcgagccgatacagttagttgtcaaaaaaatataacattgtatttttgcaagactacgtacacactggcaacaaacccaaattttcatgaatgagatagggaaaggtatactgtgattaatgaacaatagataggagtaaccagtcagaagcgatattggaaaatcgatcattagtctgtaaaaaatgttcgtttaattgtgggcggaagcttaagtacaaacgatggtaaaactt

SEQ ID NO: 26510 - DNA, 2157 bp, DROSOPHILA
atgcagtacaagaaggccatccacgcaaccctaactacttcgcagcctgtgatcagggaggaggaggagaacacaattttctttaaaattgatgagctttacgatctgcataccggtttcttatctgatttaaagactattgtgtctcacgagggtggtgatgtgctgatcggtgagccgtttcgtcgactggcggagatgtttgacttatacagtgcctttttgcacaactacaaaaatgctattgagactgtgaagaagtgcagtgccaataacccccagtttaaaaagatcgtctccaccattgtgcttaatctgcagacggaacaatcgctaactctcgaggatctattgcacaaacctgttgcgagggtacaaatcaacgcattggtcttcaacgatttgctacgcgaaaccccaaatgcgcatccggatcaccagccattaaggcaggcgcaaaagattattcagatgttcctcaatcagttcaatgtggtcaatcagcggttgcccattgaatcgaatcgaaatttaagacgcatggtgcgtaattcttttattgtagaacttgtcgatggacatcgtaagctgcggcatctctttctttttaatgatgtcatcgcatgtgccaaatacaaagcattaggccgcgatcgtatcgactatgagctcaaatggttcattccgctaaaagacgtatccatttacgaggaagcagatccggcggtcgagcttaaggaatctagtccagcaaacatttcgcaagtaaaacgcaatttgcgatccgttcgagatcaattggccatggaggtggctaacagtggaagtggagccttccgttccggtgataagtatcgccgcaagctggcggatctggaatcacagctggtgctggcaacgcccaatttagtgttgcgcctggggaacaaggcaaataataaaaccataaccttctttcttagctcggattttgagaggacgcagtggatcgactcaatcttatcccttaagcaaaaatgcaacctgcctggagcaaatactattaattccctggaggttaccgccttcattgtagccatgcagaagggcatgaaaaccgaaatgggttcatatcttatgcgtaacactaacgacgagagcctgttggttggggacctgtacatgggagttcatggattggaaggactggagcaagcgaacgacctgtacatctgcgtcgaggtggactcctatggccactattttcgcaaggccaccaccaagaagatatgtcgcagtcaaacgccgctctggaacgaaagctttatgctggaactggagggcagccagaatgtacgcattcttctttatgaggctaaggagcgaccgcttcttaaagccaagcacatacttaagttgagtttaagttggctgacagaaacaacgcagccgaagtcaattaaacttactgagaccttagagctcggctgtagcttccgttttataccaggcgagctcttccgcggcagcacaaagccaggagccctcttcggtgccaaaatgagtcaagtattaaaacgtgaaaaacgcgacattccgttcatcataggcgcctgcattcgggaggtagagcggcgtgggatgctggaggttggctgctaccgcgtcagcggttccgcttctgatttggcgaagctgaagaaggcctttgagtctggtgaatatatggctttgatggatgcctatgaggcggagcagttgctacgcgaggtggacatccattcggtcactggcattctgaaaacttttttaagggagctccccgaggcccttttcacggatcaactttatccacgatttttcgacacattcagcgcctttagcaacaacaacgaatccacacgaatcaacgagcttctaaaagtttttgaggagttgccacaggccaacaaagcctccattacttcgatattagatcatttaataagagtccacgaaaaggagacagataacaagatgtcgttgcacaatctggccatggtgtttggaccaaccttgctaaggccgggccaaacgcaggtgaagcagaaggatccactggcagccagcacagtcgacgttatggctcaggcaggaatcctatactgctttcttcaggcacggatcaagaaggattag

SEQ ID NO: 26511 - protein, 718 aa, DROSOPHILA
MQYKKAIHATLTTSQPVIREEEENTIFFKIDELYDLHTGFLSDLKTIVSHEGGDVLIGEPFRRLAEMFDLYSAFLHNYKNAIETVKKCSANNPQFKKIVSTIVLNLQTEQSLTLEDLLHKPVARVQINALVFNDLLRETPNAHPDHQPLRQAQKIIQMFLNQFNVVNQRLPIESNRNLRRMVRNSFIVELVDGHRKLRHLFLFNDVIACAKYKALGRDRIDYELKWFIPLKDVSIYEEADPAVELKESSPANISQVKRNLRSVRDQLAMEVANSGSGAFRSGDKYRRKLADLESQLVLATPNLVLRLGNKANNKTITFFLSSDFERTQWIDSILSLKQKCNLPGANTINSLEVTAFIVAMQKGMKTEMGSYLMRNTNDESLLVGDLYMGVHGLEGLEQANDLYICVEVDSYGHYFRKATTKKICRSQTPLWNESFMLELEGSQNVRILLYEAKERPLLKAKHILKLSLSWLTETTQPKSIKLTETLELGCSFRFIPGELFRGSTKPGALFGAKMSQVLKREKRDIPFIIGACIREVERRGMLEVGCYRVSGSASDLAKLKKAFESGEYMALMDAYEAEQLLREVDIHSVTGILKTFLRELPEALFTDQLYPRFFDTFSAFSNNNESTRINELLKVFEELPQANKASITSILDHLIRVHEKETDNKMSLHNLAMVFGPTLLRPGQTQVKQKDPLAASTVDVMAQAGILYCFLQARIKKD

SEQ ID NO: 26512 - DNA, 2132 bp, DROSOPHILA
acgcgtctggcatactacggcgccattaaatagaatatttaattttattgtcgcccccacagcctgatggcattgtcctttgtcaccaaagatacatcgcacacacccacaaaagggtccagttgctttcgcaaaatgaagcggctcgcatttttcgaggcttagctacaaatttaaattccgagcatgctgctccgtaggctccaaaggcatccagcatccagcatccagtatccaacacatatttacatattctccttgcccgtttcacttgccaaatttttcacccaaagccattttatattaaaaaacggtagcaacaaaacaaaatggaacgaaaagttttatacatttctaatatgaaacccttttgtgttgtttttttcaggttgctttggcagcactaagccgcggatgattaaaacgataaaaaggtgggttcacaaaattccagacagctttaaaatattatttctgggatactttaataggtattgctgaatacctgtttggcttataaatactaaatttacaatgccctaattttgattcattacattaaatagtattttgtactgcattttttatgttaaattaaataaaatatgtaaatcaaaagcgacgctgtggctttgaagtaagttttcaatttgttgtaatatttatttttctttgtgcgtttttgccaccgagctgtcatgtgctggccccattatttatttatgattatatttatttatttataaatgctatgtgtacatatgggcgattcatcaaaaacgcatgcaatatttcattgggttttaaaaacaatatttatacgcttgcgggccaaaagtaaaaccgagagtttttgcttgcttgttgaatttgctactttttcttttcgaggtttggcctttattaactgaacggcatacaaatggccagaaaaatcgctagtactggtcatgtaaaagtaacacaaacaaacggcactcacaataaaaacgaaaatgatttattggaagacttgaaatgttgccatgttaagaccagatatttgtggatatttgtatttataaaaacagagtgcagtttttgttacagccttgagaagtgctgatattttgaaccacatttccacttccatatacaagatccttctttgatttctatagatgctttacatgcaacacggatcctttgtgatcaaacatcttggataaagaacgcagtctggaagtacactttcagttgtgtgctgacccagtccagccagaaacaggataatggtgaaaagaaatggaactcgcttggaaggtagcatcttgtagaatgaaaatcatgcagagaataaactttttacaaagactatattttatttaataggaataattgcaatttaaatgcaataattatgttaagcacttacgtaacgttttataatttagttcgtttcgcagattataaacagctagaaattgtaacgaatagggtaacattttaaataaaaatttaactagactgttttagaattggttgatcttaaaaagtttccttaagaggccttgaagtatttgaatatgtactcaaccagttttccttgctgtccattattatacaccatacactcaattctcgccagttgtctccgagttatctcattagatgtacttgagactgttgaggtggaaaattcgggggggaatggcaacattttaatttctttttaatgcggtacgaactcatggtcttagcttctcgcttggggtaggccaaaaaaattaattatcgttggcaaacacgctcagcgcggaaaaaaggaggatggcaaagtgggcgggagctgggcggagaaatcattgcaagtgaattgtaagccgctgaggcttcgcgtttttcattacatgagcgttgttaagctaaaaataaattgcttattaaaaagccttctcggcacatgtacagccaggtgggtagtgtttcgcggatggtgatgcggtggtgcagagaatggagccactcatttacactcgaggggacaccaaagcggcgagatgtggaggagctgttagcagtgacaatgcgaaatagagcgatggaggcagacatccaactgggtgtgaatgacaaagccgccaggaatccaa

SEQ ID NO: 26513 - DNA, 132 bp, DROSOPHILA
atggaagtggaaatgtggttcaaaatatcagcacttctcaaggctgtaacaaaaactgcactctgtttttataaatacaaatatccacaaatatctggtcttaacatggcaacatttcaagtcttccaataa

SEQ ID NO: 26514 - protein, 43 aa, DROSOPHILA
MEVEMWFKISALLKAVTKTALCFYKYKYPQISGLNMATFQVFQ

SEQ ID NO: 26515 - DNA, 2273 bp, DROSOPHILA
gatccatccataatcaaactatgtatcatatttgaatttaattttaaataggattaggattatctaagtttgagattcgactattgtttttaaagaaatttggatggtaagaccaactaaaagtgcgtggaatggaacgactcaaaaggatattgaattcttcaccttttgatctagtatttcgataatcttcgtatccgactcgtgtagtttcttagtgtgctttattttcatgagtcccaaaatgtggcgcaactcctcgggatccttgatcttgctcctccactcggccacttctatttcatactcgttctccgcctgcatccgtattttaattaagtgtctttcggtttcgtgttgcagctccattaatgcttttactattacaaaaatgccatcgtttagcacacaattggcgagttcggtgagtagatcgtaggaaatgcgtgtctgcaagtttctgttaatcaaaaatggcgttaaatatttaaataaactaaatatcaaggacttactcgggaagttccgaatggtaagttcgcaattggtccaccaaaaaatagattttgcgttgtaaaaactccggagttggctgctgatactccactactgcctcactagtgttcgcactaccttcgctggttgccggtatgtccgccatcttaactaaattgtgatttcctatttatttacaataatttgtgtaatattcccaagtatttgtgtttttagtgatgttttgtgcaaccgcactccaatttcgcctcttcgccgcacgaacagctgagcgccagggctgcaaactgcagcagcagcagtgtgaccacaatcagtttggctgcccacataacggtaagtcagagaaagacgcggaaagtaaaatgtttcaaaagtatttatatatatttttgttgtatcagagcgtgaaaagaattgtgactgtacgatttgaaatcaatgatgcttatgactaaggtgattacatcggttcgtattatgattagaagttcaaagatttgcgagccttgatgaaattcttatcagcctcgtaagtgtacatgcgattcagtttgtttttgcggcgctttttgagttcggtttggaactttccgtgtcctgagctgctgggggtggctggtaccagggaatacttcttgctgtccagggagtagcactcgcgttttccgaactcatgctgctcctttggggtttccacgattttcaggctgttcaggcgctgcagcacttggttggtttcatttgtcgacgacataataactgctaggctggctgatcaggaagttaatgtgaagcttgacgttgctgatttgctactgatttccttttgcccacggccttctttatatccacttgagtgtgcaatttcaggactgccataaatatctgcgcggaaaatacagcttatccgttttccacatctgtcacttttatggtgctacctgctcataattaaaatttccgcagaaaattctcgctaatccctttttaatgcgttcagaattacgcgagcaggtagtaatgggttttagtctaccgccataaagtccgccttttacaaatcgcaataaattagaaaggaattcgtaacaatttccaaatttggtgtttaaagtgcataactttttaatggagtatattaatttcttactttatagataataattccttaaagataatataaaaatataatttattggatctccaaatgctttcaattatattggatctctaaatgctttcaataatccaatcttttaaatgtagcctctaatcaattaatacgcttttaaaaaaacgcgcgcaggtgaaagaacccactgccgttttaaagtgtgtacatactggcgaaatcatatggtgggcatacacgtgtatcggttgtacagtttatgcgttaatcgacttcgcgaactacgaaacctaaagctgattgctattataaaataaagactttactaaacaattgatagtgcccattatagttgaaagcctaaagaaataaacgcttatcaaataaaatcactgccgtgggttactgccatgaagaaattatgatctgctgaaagtcgagttgtctgccgcatgaacgccctaacatacggctctttgcgggtgtctctcttaacatttcgttatgcgatttgaatggggcagttgcattggagcctcgtccgccgaacacagaacattacaaacgcgtttccaggagtaattgtcggtgattttaatcgaaaacaattgatacgagcgcg

SEQ ID NO: 26516 - DNA, 273 bp, DROSOPHILA
atgtcgtcgacaaatgaaaccaaccaagtgctgcagcgcctgaacagcctgaaaatcgtggaaaccccaaaggagcagcatgagttcggaaaacgcgagtgctactccctggacagcaagaagtattccctggtaccagccacccccagcagctcaggacacggaaagttccaaaccgaactcaaaaagcgccgcaaaaacaaactgaatcgcatgtacacttacgaggctgataagaatttcatcaaggctcgcaaatctttgaacttctaa

SEQ ID NO: 26517 - protein, 90 aa, DROSOPHILA
MSSTNETNQVLQRLNSLKIVETPKEQHEFGKRECYSLDSKKYSLVPATPSSSGHGKFQTELKKRRKNKLNRMYTYEADKNFIKARKSLNF

SEQ ID NO: 26518 - DNA, 1962 bp, DROSOPHILA
attttcatattttgtttttgtgttttttaattcatgttctggtaaaacagcgaacatgataatttaagtaaaagacaatgcctatcgtaatgttcttaatttggttcttcctttttctcgtataaaagactttaattggagcaggttctactgcactcataaattatatatatattctcagtgcttctttagtgtgttaagtaatgaaaagtatggcagaactaaagaaaaacaataggaacaaccaccaaagctaaaaccatgagtctttttttatatactcaagagccaccccaaatttatacacccgttactcataaagtaaaaggatatacttaattcgttgaaatgtatgtatcagatagaaataagcgttccgtccctttaaaatatattcttgatcaggatcacttgcttttttgatttgcccgtatagatctgcttttctatatgagctaaaaatgtgtttctttttacgactacgtacagcacattaccacgcccaagattcttctaaaacgcatttcctcttcgtatattttagccttgtaccttttatagttcccaagatcacagcgttcacacggacagacagacgttcgggacacggccagatcgctcaactagtaatcctagccgagaagacatatagtttatagcgtcggaaacgcattctcttattgttccatactgttcatagaatctggaataccctaccctactctacggctaatagttaaaaaatacttgatagtaattattaatgttctaagctttggtataccaagatttttggatacaaaatgttatatctttgttctttaacggtaatatcggaaatattttttaagcgcaaatcgtaaaagtatgtacaaaatataaagagtaaagaataatgtcataataacattagaaaatcgtggtataataggatactatttgcttaacacaagatggcatagtttataatgcattaaaatatatatacatatgtattagtacttaccatagttaccggtaagccacttggagaaccattggcatacgaataaggagaaactaagtaacccatgttaaagctaggggcgtgggtgtccagcttatctgcacggtttgcaccactgactctgttgatctagtccgaaacgggcgcggcattttttcatattattgcctaaggaaaaagaggcaattataatatgcaaacttaataaaatatgtattagtgaaatcattgttaatggtttgttagttagatatatgttgatagaaaggtaatgggaatatacacttatacaaaataaaagaaaaaatatctatggcgatatttttaaaaacaacatatagtaaactgtctcaaattttcaatacccgcactgcactttactttaaaaagtaacgtttgtattttttcagcaaatattgatgattaaaggtgggcgttgaaaaatttagaaaaatcatgtatctttagaaaaagtatgttaagttttagaacctgtaaaatttttcggatcgacggacagacaagaaaacggacagtcgttaagacccatctagatccatatccaaagaatatcatagactagtgacgggtatatcaaaattatttgactgttcttaataaaacagcgtatcataatttcatgcaaatacttatatactactttcaaatatattgatttcaatatacagatttttactcgaatactttcatgcaagtgacttaatttaaacaagttttctttttttcgtgccatttaaattttgttaatgaatgttataatattgaaaactagatctatacatattaaaaaaaatttttttttaattttttgccgacaaaagtttatgtttgtggcttgccaattgctttaacccaataaattttcacaattttattccgatctgaatggcttatgtatcagtgaacatataatatatatgaatgattatataaat

SEQ ID NO: 26519 - DNA, 2808 bp, DROSOPHILA
gcaagtgtgttgataaaaagtatacgtatgtatgtatgacatacaaaaatattgtgtctgattaattaatgcgtgtatgcctttaactgtgaaacctttttcaattagtatttttctcacatatatgcccttatagagtatggattatttaattattctgcagtgcaaagaagtttttcgagtctatgtaacttttgcaatttaggtaaatacgacctaaccgtcaaaatcatgcctcatacacacagcaggcatggatcatcaggagatgatttatgcagtactgatgaagtgaagatttttaaagacgaaggagatcgcgaggatgaaaaaatatcatctgagaacttattagttgaagaaaagtctagcttaatagatttaactgaaagtgaggaaaagggtcacaaaatttcaaggccggaccacagccctgtttttaataagctggacacccacgcccctagctttaacatgggttacttagtttctccttattcgtatgccaatggttctccaagtggcttaccggtaactatggtaagtgccaacaaaattggactgcctccgtttttttgtcacaatgctgatccgttatcaacaccaccaccagcgcattgcggaattcctccatatcaactggatcctaagatgggcttaactcgaccagcgctatacccatttgcgggaggtcaatatccttacccaatgctaagttcagatatgtctcaagtggcatcatggcacactccttctgtttattctgcatctagttttagaactccttatccctcctcactaccaataaatactacacttgcaagtgattttccattccgtttttcacctagccttttaccttcagtacatgccacatcgcaccacgttataaatgctcattctgctattgtgggggttagctctaaacaagaatgcggtgttcaggacccaacaacgaataatagatatccaaggaacctggaagcaaagcacacatcaaatgcgcaatcaaatgaatccaaggagacaacaaatgataaaaaaaaaccccatattaagaagccactaaatgcgttcatgctctatatgaaggaaatgcgtgctaaggttgttgctgaatgcactctgaaggaatcggctgcgattaatcagattttaggaagacggtggcacgaactttcccgcgaagaacaaagcaaatattacgaaaaagctcgacaagagcgccaattgcatatggaattgtatccggggtggagcgcacgagataactatggttacgtgtcaaaaaagaaaaagcgaaaaaaagacagatcgacaacggattcgggaggtggcaataatatgaaaaaatgccgcgcccgtttcggactagatcaacagagtcagtggtgcaaaccgtgcaggcgcaaaaagaaatgtattcgttatatggaagccctgaacggcaatgggcccgccgaagacggcagctgttttgatgagcacggaagtcagctaagtgatgacgacgaagatgactacgatgatgataaactaggcggaagttgtggaagcgccgacgaaaccaataaaatagaagatgaggactcggaatcccttaatcaatctatgccaagcccaggctgtcttagtggattgtccagtttacagagcccatcgacaacaatgagcttggcaagcccacttaacatgaatgccaattcagcaaccaatgttatatttcctgcttcttctaatgcacttttaattgtcggcgcagaccagccgacagcacagcaacgacccacattggtgtcaacctcgggatcgagcagcggttcaaccagtagcataagtacaaccccaaatacgtcgagtacagtttcgccagttacatgtatgaccggtccgtgtctcggttcatctcaggaacgagccatgatgcttggaaatcggttcagtcacttgggaatggggctaagtccaccagtagttagcacgagcaccagtaaatctgaaccattttttaagcctcatcccacagtttgcaataatcctatatttgcattgccatcaattggtaattgtagtttaaatatttcttcaatgccaaacacatcccgaaaccctattggtgctaacccacgagatattaataatccccttagcatcaatcagctgactaaaagacgtgaatataaaaatgttgagttaattgaagctagtgagtcaaagactatagttgcccatgccgctacatccattattcaacatgtagcagtgaacggctatcatgctaatcactcgcttttaaatagcaacttgggccaccttcatcaccaattaaataatcgtacagaaaacccgaatagaagtgagcagacaatgctgtccgtaagtaatcattctgtaaatagcagtgaatgccataaagaatctgattcgcaggctattgtatctagcaatcctccaaacgctggatcttccgataacggcgttattagcgtttcataactgatcgccatggatttgtagaattgattaatcaaattttaatgttaatgtgtgagaaaataattaaaataaaaacataagtgcaataattattattctcgccagcccaaagccatcttatgaaacaaaaggccatcaaaactagtgccacgactcacatcgcaatatttcgtttaataaagaaaacatagaattggtgcacaaaaatcttttgaaacgactccgaggccaacccgaaagaataaagaaacatgagtcaaatctcaggctaggccgtgccaaatagaataaacagacaatacacactaaaac

SEQ ID NO: 26520 - protein, 754 aa, DROSOPHILA
MPHTHSRHGSSGDDLCSTDEVKIFKDEGDREDEKISSENLLVEEKSSLIDLTESEEKGHKISRPDHSPVFNKLDTHAPSFNMGYLVSPYSYANGSPSGLPVTMVSANKIGLPPFFCHNADPLSTPPPAHCGIPPYQLDPKMGLTRPALYPFAGGQYPYPMLSSDMSQVASWHTPSVYSASSFRTPYPSSLPINTTLASDFPFRFSPSLLPSVHATSHHVINAHSAIVGVSSKQECGVQDPTTNNRYPRNLEAKHTSNAQSNESKETTNDKKKPHIKKPLNAFMLYMKEMRAKVVAECTLKESAAINQILGRRWHELSREEQSKYYEKARQERQLHMELYPGWSARDNYGYVSKKKKRKKDRSTTDSGGGNNMKKCRARFGLDQQSQWCKPCRRKKKCIRYMEALNGNGPAEDGSCFDEHGSQLSDDDEDDYDDDKLGGSCGSADETNKIEDEDSESLNQSMPSPGCLSGLSSLQSPSTTMSLASPLNMNANSATNVIFPASSNALLIVGADQPTAQQRPTLVSTSGSSSGSTSSISTTPNTSSTVSPVTCMTGPCLGSSQERAMMLGNRFSHLGMGLSPPVVSTSTSKSEPFFKPHPTVCNNPIFALPSIGNCSLNISSMPNTSRNPIGANPRDINNPLSINQLTKRREYKNVELIEASESKTIVAHAATSIIQHVAVNGYHANHSLLNSNLGHLHHQLNNRTENPNRSEQTMLSVSNHSVNSSECHKESDSQAIVSSNPPNAGSSDNGVISVS

SEQ ID NO: 26521 - DNA, 1962 bp, DROSOPHILA; identical to SEQ ID NO: 26518

SEQ ID NO: 26522 - DNA, 3207 bp, DROSOPHILA
tggtacggcgttttaaatctgataacattttgaaccgggaattattttagagtaccattctttgttttgtgcctgtttcagtataaattaattatgcgcctgatttaaagtacaaaatgtgtaaatatatcaccttaccgtcgcgggtgcacccaattgtgctttgatgaataaatatacatatatgcaacatatataacttcctgtgttagtataagtgtatgtcagccaaaaacaaatatatatatgagtgtttatcggcattcgtgtgctggcagagcagcgatcaaagctgcgttcggtactcgttgactggcccaagaatgaattctcgtgcaagtgtgttgataaaaagtatacgtatgtatgtatgacatacaaaaatattgtgtctgattaattaatgcgtgtatgcctttaactgtgaaacctttttcaattagtatttttctcacatgtaagtgtgcttaataacagaaaagtttgctgcaaatttgtggctttgtggatagcttttcagtaaactaacgtataaaggattcaaattttactgctctaatctctcggattgtttaatcaaatcatcactatatgcccttatagagtaaatacgacctaaccgtcaaaatcatgcctcatacacacagcaggcatggatcatcaggagatgatttatgcagtactgatgaagtgaagatttttaaagacgaaggagatcgcgaggatgaaaaaatatcatctgagaacttattagttgaagaaaagtctagcttaatagatttaactgaaagtgaggaaaagggtcacaaaatttcaaggccggaccacagccctgtttttaataagctggacacccacgcccctagctttaacatgggttacttagtttctccttattcgtatgccaatggttctccaagtggcttaccggtaactatggtaagtgccaacaaaattggactgcctccgtttttttgtcacaatgctgatccgttatcaacaccaccaccagcgcattgcggaattcctccatatcaactggatcctaagatgggcttaactcgaccagcgctatacccatttgcgggaggtcaatatccttacccaatgctaagttcagatatgtctcaagtggcatcatggcacactccttctgtttattctgcatctagttttagaactccttatccctcctcactaccaataaatactacacttgcaagtgattttccattccgtttttcacctagccttttaccttcagtacatgccacatcgcaccacgttataaatgctcattctgctattgtgggggttagctctaaacaagaatgcggtgttcaggacccaacaacgaataatagatatccaaggaacctggaagcaaagcacacatcaaatgcgcaatcaaatgaatccaaggagacaacaaatgataaaaaaaaaccccatattaagaagccactaaatgcgttcatgctctatatgaaggaaatgcgtgctaaggttgttgctgaatgcactctgaaggaatcggctgcgattaatcagattttaggaagacggtggcacgaactttcccgcgaagaacaaagcaaatattacgaaaaagctcgacaagagcgccaattgcatatggaattgtatccggggtggagcgcacgagataactatggttacgtgtcaaaaaagaaaaagcgaaaaaaagacagatcgacaacggattcgggaggtggcaataatatgaaaaaatgccgcgcccgtttcggactagatcaacagagtcagtggtgcaaaccgtgcaggcgcaaaaagaaatgtattcgttatatggaagccctgaacggcaatgggcccgccgaagacggcagctgttttgatgagcacggaagtcagctaagtgatgacgacgaagatgactacgatgatgataaactaggcggaagttgtggaagcgccgacgaaaccaataaaatagaagatgaggactcggaatcccttaatcaatctatgccaagcccaggctgtcttagtggattgtccagtttacagagcccatcgacaacaatgagcttggcaagcccacttaacatgaatgccaattcagcaaccaatgttatatttcctgcttcttctaatgcacttttaattgtcggcgcagaccagccgacagcacagcaacgacccacattggtgtcaacctcgggatcgagcagcggttcaaccagtagcataagtacaaccccaaatacgtcgagtacagtttcgccagttacatgtatgaccggtccgtgtctcggttcatctcaggaacgagccatgatgcttggaaatcggttcagtcacttgggaatggggctaagtccaccagtagttagcacgagcaccagtaaatctgaaccattttttaagcctcatcccacagtttgcaataatcctatatttgcattgccatcaattggtaattgtagtttaaatatttcttcaatgccaaacacatcccgaaaccctattggtgctaacccacgagatattaataatccccttagcatcaatcagctgactaaaagacgtgaatataaaaatgttgagttaattgaagctagtgagtcaaagactatagttgcccatgccgctacatccattattcaacatgtagcagtgaacggctatcatgctaatcactcgcttttaaatagcaacttgggccaccttcatcaccaattaaataatcgtacagaaaacccgaatagaagtgagcagacaatgctgtccgtaagtaatcattctgtaaatagcagtgaatgccataaagaatctgattcgcaggctattgtatctagcaatcctccaaacgctggatcttccgataacggcgttattagcgtttcataactgatcgccatggatttgtagaattgattaatcaaattttaatgttaatgtgtgagaaaataattaaaataaaaacataagtgcaataattattattctcgccagcccaaagccatcttatgaaacaaaaggccatcaaaactagtgccacgactcacatcgcaatatttcgtttaataaagaaaacatagaattggtgcacaaaaatcttttgaaacgactccgaggccaacccgaaagaataaagaaacatgagtcaaatctcaggctaggccgtgccaaatagaataaacagacaatacacactaaaac

SEQ ID NO: 26523 - protein, 754 aa, DROSOPHILA; identical to SEQ ID NO: 26520

SEQ ID NO: 26524 - DNA, 2426 bp, DROSOPHILA
gggtgatgccatagggcaggaggagcacatcctggagcagtgccaaaaagtttgcacagatggctggcttgtcctgcagatcaagtagctttgagcgctgcgtcgggtcgtcgggaatcttcatgtccgacagtacgggcagcagcagggcgaacagcttgtcctggtagctctccagcttgtcctcgcagcccaccactttgctggccagcgcagtctgttgttccaacgccaggcgcggaaagcccatggtaatgaatatgatggcgaagttcttgaggaaggtgctgctatcctgggcggcatactgatccagcagtgcctctacgggtatttgcacatgtccgcgcgacgacaggcgcctcttgatatgggtgagcacttctacgacctaaacaaaatttagtgcattagtcaaccggtcaattttgcaatgtcacgatgcgagaagggtgtacaaaaccacccagccaatcgttgtttgaccatccacttgcctttgtgcgcaccacattgtggggcgagttcattttgaggatcaccggggtcaggaacttgcccacagcggcttccagcttctcatccgagtccgcatttcccagacgcaacaggacgcgctccagaagctctgaaatcgaaggattgggtgggttttttttttttggcacagctttggtgtattatcagcccatctcttctattcgctgatgaaacataaagtttgatgcacacaatgctaattataatttttaccaatttctgcattcggtccagtttccattttttttgctttatttttgtttccctctttcagtgttaccagctgttgtgctgaacatttcacagatgccaatttttggctacattcgaaagctttgcaacactcgaacttttcgaaatgaaaccgccgccaaattcaaaatgtaaagcgaaaatctttgccattgaaatcattcaataaaaacataatttgtaatcaatcaacttttatttaagaaaatcatattaataatgtacattcaatgcaattcgtgtccatattcttgcggtcatctttagtttctgtaaaaaataagaaatcgtgtcattagtatggagtatttgcatttatttcaatatgcttttctttgataaatatcagtattctcatttttattgagaagagtcaaggttcttcagcaatttgttttatgaagaccgtcatgattttatcatcagaatgccagttaatagctgccttacaaaataatatattttacacaccttttaatggaatagctggctgcacgactgctgaaatgctgtggaaactgagagaagaactggagaaaacccatggttaaagttacttttttttgttttattcaaaaagaataattgctacaaatattatcgcccgaatggtagttgtccgctctagtacttcttgaagctcttcttggctccctgacccttgctgactttcaggacgttgaagcgcacagtcttggacagaggacggcactcaccaatggtgacaatatcgccatgctcaacatctctgcaaattaagaaatagcacggattagtaggaggccctacagtataagcacaaagctagcgcacaaggcttagtttcagtatttttacatttagtaaaaagagtcaagttctttcagcaatttgttttatgaagaccgtcatgattttatcatcagagtatgaggtattaggtctctttttacatcttccatgtcatgaagatggaaaaagggttttagctctagctttattgatatgtttacctgaacacaggggagcagtggacgctcatgttgcggtgacgcttctcgaaacggctgtatttgcgcacaaagtgcaggtagtcgcgccgaatgacaatggtgcgctgcatcttggccttgcggaccacgccggtcagaatgcgaccacggatcctcacatcaccggtccaggggcacttcttgtcgatgtaggtaccatcgatggcctatagcagggggagtatacgaatgttgttagtgaaggaattctacgcatttcaagggctatctcctgggcatcacctcacgtggggtcttgaaaccgagtcccacatcgcgggagcgacgcagcagcttcttcttggtgataccgggcttgaccttgcggtttaggttgacaccgaattgtttttggaaggcgcgctcgttctggttagttagtcgttcggttggaatcgtgtttggggttcaaggtggcggtggtggtggtgttgtcggatcaacaggcaggcggcaggcacgggcgggaacattcggcgtgcgtgggaaggcgtgaaatggaaaacaaacgaagggggcgcaacattagtcgtggtttgttcggcttcctcttacctccgccggagcgcggaagcccaggccaatttggcgatagaaacgggg

SEQ ID NO: 26525 - DNA, 319 bp, DROSOPHILA
tcatattaataatgttttctttgataaatatcagtattctcatttttattgagaagagtcaaggttcttcagcaatttgttttatgaagaccgtcatgattttatcatcagaatgccagttaatagctgccttacaaaataatatattttacacaccttttaatggaatagctggctgcacgactgctgaaatgctgtggaaactgagagaagaactggagaaaacccatggttaaagttacttttttttgttttattcaaaaagaataattgctacaaatattatcgcccgaatggtagttgtccgctctagtacttc

SEQ ID NO: 26526 - protein, 74 aa, DROSOPHILA
MFSLINISILIFIEKSQGSSAICFMKTVMILSSECQLIAALQNNIFYTPFNGIAGCTTAEMLWKLREELEKTHG

SEQ ID NO: 26527 - DNA, 2803 bp, DROSOPHILA
atacaatgagtgggttaggttaggtgcagacaacaagtagagtacgtgcagtagaggcgcagttcattcgtacgtgtgttttcggggcattcgaactccgaaccccgcgcacttggaatccacaatataattttatacactttttgaacggtgcaatagcaaggtatgcttagcatcaaattgcacttgtttcatcatcatttttgcaaacgaaaaattgtcattaaagttatgtttgttctgaaaatatattcaattattgcgggggaactcaaactaaaaatgctgcaggagattgagcatcgtttacagccgaacataagtggctcacgtgctttttcagtcgcacagtggaattaatccgcttaacccatgccttttatttttggctgaatactgtacttacccataggctttaatatgaatatctctgctgaaaatgtatttacattggagaagttaaaatgtattactattggacttgatatataaatagagaggaaagtttcatttttacacccactgtgcgatcgcgaccgcgtgcttttcttgtgagagagaatgggagattgctcccctttctacacttgacaaaacattatgtgtattgtcatgacttcaatagcgtcatatatagaaatcaagttttaaaccaacagggcgaatgagtaatattttccagcatatatagaaaacatgtttattttgaatttaaaattgtcggaaatattttatgatgctttcagtttggaatcacattcattaaaatacttgagactgatactgtgtgagtgattcacgaactgaagtgcagtagagagcgtgaaagtgagtagagagaatttcgctgtcttattgagcgaatttcgaatgtctccccaaaagacccgtttctttcggtgtaagacttttggcgctctcttctcgccgctctcttttcgcagcgacgtcgacgtcgttcgtttgaattccgtttcattcattttcattcgacgattcgccgtcgccgcacacgcagagcattcgctgcgcgctccgccgacaaaaaaaccaaaaattaaatcaaactgttttcccacgacgcgagttttccgcggcggttcttggccgatttgactttttggattttcacccgtctaactgagcttttccgttcaagagttcgaggctttcttgcgttcctggccaccgatgcaaatcaattacgccagatttgcagtgcaaaacaatggcgttatttgtgcaacaacaattactaacacaacggcagcaacaacagcaaaataagcaagagagaaaaaaaccacaacaaaggcaaaggagcagacagcgcaggacattcagttagttccccgaaaggatacggttcaactgcttctgtgaaaaatatatccaaacaaattacaaaaaatacaaaaaaaaaaaactcaaagagtgcccaaaatcattcgaaccgaattaagaaatcgctagagttgcacctgcgcaaaagaattgccaacaaatcgatacccgaaccatattttctttgctttttgtttaagtgaacttcgaaagtgtccgaaaatacaaatttaaaatacaaattaatgttgaacaactaaaatcacaatggagcaaataacgaactacttcgagcacatggattacgtgtccttcagcgtggtggcgctgccgtgcgtcgtcatcgccgtctacggattcctgcaggtggccagtggcctggccaagtgcaaaagtaagtcccgaatgccaggtgtatgtttccacctgactaacaatcaaaagcggatcgctgactaagccagatgccagtgacacgaaaataactcctggcttgcgggaagggtcaccttaggcacttaagtcatcaagttgaactgtgaaccgaattaaagaggatactttgggattcttgatacccagtatatacggaagtattgtattgcattgtttttaatttgtcgactgattgatcggttaaagggcattgttcatcgcaggtgataccaaattaatttcgctatctttacggtttatagctcgctgtcattgatcaaattactgtggacagtaaatggcatttaaacgttttatctagatgtggctgagaaacggagtgactggcaatggaaacggggaagcattgtgagccacatttgccacaattgtgtccaagcgaccgcaaagattttcccacttcacggatcaattagccttgccgcaagtgaagtacacttctcgaaactggaatctagatttctagaactcaacctaatccactttcggctgagaaatagaacagcattggcatttccaaaaaagtctcggctctcgcataatgtttaatcatatttgccttaaagtgtttgagctagaaaccgaaacagctgccggtctttcccacactccccaactgacgtacatatgtacatccgagaagccgcctttcaaagcttcgccgctcgaaatgtgtttatttatagcccaactatgggatcgttcgggaactgggaaccgggaagtgggaagtgggagccgggaacctatggtactgcctgacctacccctcgcagttgaggaggcgataagaacttaaattgcaattaatcagagagtttctggaggcaaaaaatgacggggcggtgggaactcgaaagatatcgtcgctctggacttgggacaaggaagcaatcgaaatcaagtttttgtgtcaatcttgatatgatttggcttcggtctggtttcggtttctttgtgcgaaaagagtgtgtttataaacccgatgtttacataataatcc

SEQ ID NO: 26528 - DNA, 784 bp, DROSOPHILA
ccgtcgccgcacacgcagagcattcgctgcgcgctccgccgacaaaaaaaccaaaaattaaatcaaactgttttcccacgacgcgagttttccgcggcggttcttggccgatttgactttttggattttcacccgtctaactgagcttttccgttcaagagttcgaggctttcttgcgttcctggccaccgatgcaaatcaattacgccagatttgcagtgcaaaacaatggcgttatttgtgcaacaacaattactaacacaacggcagcaacaacagcaaaataagcaagagagaaaaaaaccacaacaaaggcaaaggagcagacagcgcaggacattcagttagttccccgaaaggatacggttcaactgcttctgtgaaaaatatatccaaacaaattacaaaaaatacaaaaaaaaaaaactcaaagagtgcccaaaatcattcgaaccgaattaagaaatcgctagagttgcacctgcgcaaaagaattgccaacaaatcgatacccgaaccatattttctttgctttttgtttaagtgaacttcgaaagtgtccgaaaatacaaatttaaaatacaaattaatgatggagcaaataacgaactacttcgagcacatggattacgtgtccttcagcgtggtggcgctgccgtgcgtcgtcatcgccgtctacggattcctgcaggtggccagtggcctggccaagtgcaaaagtaagtcccgaatgccaggtgtatgtttccacctgactaacaatcaaaagcggatcgctgactaa

SEQ ID NO: 26529 - protein, 64 aa, DROSOPHILA
MMEQITNYFEHMDYVSFSVVALPCVVIAVYGFLQVASGLAKCKSKSRMPGVCFHLTNNQKRIAD

SEQ ID NO: 26530 - DNA, 3629 bp, DROSOPHILA
actcctgcccgccacccagttggaggatctcacttttgagaacggaatcgtgctgcgcacacaagagaatatcaaagtgaagctatcgaaaagggtaaaatgaggaatatttcctagtgtaagtttatggaaaacggtttgccaaagagcttttatttgtaatttgtttagagaaacaaataaaccagtaaaacgattgaaactctaaaacgattgatcgcttgtcttattatctgtcatgtaaaatataacgatttatgattaaacgatgaaatgattgaactaaagatatcctaacatgtaattaatttaattaacacgttcatcacaatcggtaacgtttaaataaattgctggttgcttttttatggagaggatacattgtgatcaatttgcatgtttgtaatagtgaaactaccgactactttatacagctttatagctttatatacaaattaaagcttacgtaaaaaaaatcaaaagccaatatacataaatatcgtaaatttcaaaaaattttgttacacaagactttctaaaaacagtgcagtatttgcaatttaatatacccatcaattgcatgccgcaagggaacatgttttatactaagtacctattgattttacagaactcaattgttccgatcactgagttctaatcagtattcgtcatttatagatcggagcttaatctgagaggtattggaacctctgaccggaatataatataaacgtagaaatgtttttggaagtcctgttcgctgctccacttgtgattttcatttttcgcaagttatgggctcatttgaataggacctatttcatcctgagtctttgcaaacgaattcgaacagaagacggtagtttgttggaaagtaaaatttacgtagcgccgagcaaaacccgatttggaaacaactttgacctcgtaaactttacatctggtaagtgaaaccaaattaacactaaaactatattcaaatcgtttggaatatttgacagaaagcatatttaacttcatgagagatgcatctgcaaaagcgaaaggtcgaaactatctatggtattttttccatgcacccatgtataatattgttcgggccgaggaagccgaggagatattgcaaagttccaagcttattaccaaaaatatgatctacgagcttttgaaaccgtttttgggcgaaggactgctgattagcacaggtatttttacattttcattcttaattcctactattttaaagagttttaaaccaatttagatcagaaatggcactctagaagaaaagccctgactcctgcttttcactttaaggtgctgcaatcttttctgatcatattcaagtaagtttacaaaatagttaatggttgttaagttgtaagcactctcgatttttagagaagagtgcaataaacttgtgaaagtcctgcatcaaagtgtgaatatggagttggagctcaatcaggttattcctcagtttacgctaaacaatgtttgcggtaagttcaagtacattaataaaacaataacgccagctttgaaatacatatgtataacttgagagcagaatgaccagcaaatatagaaataaatttgcaatgtttattagtaaatcacaacaattttcactggccgtttattcaactatgcagagaattttagtgcgattaatgtaattgcagaaaccgcactgggagtaaaacttgatgacttgtcggagggtattcgatatcgccagtcgattcacgccattgaagaagttatgcagcagcgcttatgcaatccgttcttctataacattgtgtatttctttctattcggcgactatcgaaagcaggtgaataatttgaagatagcccacgagttttccagtaacatcatagagaaaaggaggagcctcttcaaaagcaaccagcttggtcaagaggatgaatttggcaagaagcagcgatacgccatgcttgataccctgttagcagccgaagcagatggtcagatcgatcatcagggtatctgcgatgaggtcaatacctttatgttcgagggatacgatactacgtccacctgtctaatatttaccctattgatgctggcactccacgaggatgtccagaagaagtgctatgaggagatcaaataccttcccgatgatagcgacgatatcagtgtgtttcagtttaatgaactggtctatatggaatgtgtgatcaaggaatctcttcgcttgtttccctcggtgcctttcattggacgtcggtgcgtggaggagggtgtggtcaacggtttaatcatgcccaagaacacccaaatcaacattcacctttacgaaatcatgagggatgcccgacacttttcaaacccaaaaatgtttcaaccggatcgattctttccggagaacacagtgaatcgtcatcccttcgcttttgtgccatttagtgcgggacaaaggaattgcattggtcaaaagtttgctatcctagagattaaagttcttctggctgcggtcatcaggaattttaaaatattacctgttactcttctcgatgatcttacttttgaaaatggaattgtgctgcgaacgaagcaaaatattaaagttaaactggtgcatagggaaaataaataagccaataagcttgtttatagagcatgtctacttttataaattcaatggcgtcgtagtatccaaaccaaacagattttattataacagaacgtcaaaacacaatttctagaaataaacaaccattagaaattccgataacaaagagctttttcattggacttttcttttcgttcctcagtgcgttttcaagatcgcagtagttcggttccccaaagcctacaaaatgtggatcgctctgcttgggtcttcacttttgattggggctctttggctcctgctgagacaacttaataaaacgtattttattctttcattatgcaaacgagtgcgaacagcggatggaagtccattggaaagcaaagtgttcgttgttcccggaaaaacgcgatttggcaacaatttggatctactcaatttaacgccaggtataggaaagattggtttatctgtacaaataattattaatatttattacagctaatatttttagctacatacgagagtccactgccaaagccaatggacaaaattatatatggaatttcctatttgcaccagaatataatattgttcgtgccgaagacgctgaagaaatatttcagagcaccaaaatcactacaaagaatatgtcttatgaattgataagaccatttcttggagacgggctgctgataagcataggtgaataatcgtatataatcgtaaatatataataatcccattcgttttagaccagaaatggcacacaagaagaaaaactttgaccccagcttttcattttaatattctgcagtcttttctctctatttttaagtaagtgagagtgacgctttttaacatattacctatttaaataatcgataatattaatttttagagaagagagcaaaaagtttatcaaaatactggacaagaacgttggcttcgagcttgaacttaaccagataattccacaatttactctaaacaatatttgcggcaagcataatcatctatttat

SEQ ID NO: 26531 - DNA, 1281 bp, DROSOPHILA
gaaagcatatttaacttcatgagagatgcatctgcaaaagcgaaaggtcgaaactatctatggtattttttccatgcacccatgtataatattgttcgggccgaggaagccgaggagatattgcaaagttccaagcttattaccaaaaatatgatctacgagcttttgaaaccgtttttgggcgaaggactgctgattagcacagagaaatggcactctagaagaaaagccctgactcctgcttttcactttaaggtgctgcaatcttttctgatcatattcatggagttggagctcaatcaggttattcctcagtttacgctaaacaatgtttgcgaaaccgcactgggagtaaaacttgatgacttgtcggagggtattcgatatcgccagtcgattcacgccattgaagaagttatgcagcagcgcttatgcaatccgttcttctataacattgtgtatttctttctattcggcgactatcgaaagcaggtgaataatttgaagatagcccacgagttttccagtaacatcatagagaaaaggaggagcctcttcaaaagcaaccagcttggtcaagaggatgaatttggcaagaagcagcgatacgccatgcttgataccctgttagcagccgaagcagatggtcagatcgatcatcagggtatctgcgatgaggtcaatacctttatgttcgagggatacgatactacgtccacctgtctaatatttaccctattgatgctggcactccacgaggatgtccagaagaagtgctatgaggagatcaaataccttcccgatgatagcgacgatatcagtgtgtttcagtttaatgaactggtctatatggaatgtgtgatcaaggaatctcttcgcttgtttccctcggtgcctttcattggacgtcggtgcgtggaggagggtgtggtcaacggtttaatcatgcccaagaacacccaaatcaacattcacctttacgaaatcatgagggatgcccgacacttttcaaacccaaaaatgtttcaaccggatcgattctttccggagaacacagtgaatcgtcatcccttcgcttttgtgccatttagtgcgggacaaaggaattgcattggtcaaaagtttgctatcctagagattaaagttcttctggctgcggtcatcaggaattttaaaatattacctgttactcttctcgatgatcttacttttgaaaatggaattgtgctgcgaacgaagcaaaatattaaagttaaactggtgcatagggaaaataaataa

SEQ ID NO: 26532 - protein, 420 aa, DROSOPHILA
MRDASAKAKGRNYLWYFFHAPMYNIVRAEEAEEILQSSKLITKNMIYELLKPFLGEGLLISTEKWHSRRKALTPAFHFKVLQSFLIIFMELELNQVIPQFTLNNVCETALGVKLDDLSEGIRYRQSIHAIEEVMQQRLCNPFFYNIVYFFLFGDYRKQVNNLKIAHEFSSNIIEKRRSLFKSNQLGQEDEFGKKQRYAMLDTLLAAEADGQIDHQGICDEVNTFMFEGYDTTSTCLIFTLLMLALHEDVQKKCYEEIKYLPDDSDDISVFQFNELVYMECVIKESLRLFPSVPFIGRRCVEEGVVNGLIMPKNTQINIHLYEIMRDARHFSNPKMFQPDRFFPENTVNRHPFAFVPFSAGQRNCIGQKFAILEIKVLLAAVIRNFKILPVTLLDDLTFENGIVLRTKQNIKVKLVHRENK

SEQ ID NO: 26533 - DNA, 3187 bp, DROSOPHILA
accatcaccttctgcaccttgggatttcctttgaacgacatttttgctgatttccgacgacttaatttgagttaaacaaattttcgcttctttttgccggcgtcttcttttcgtccaggcgataggcagaaatatcgatggcacagcacagatggtcacacataatcgcggcctaccgaactatcgaccagcctaaagataccaaaatggtaaatcctctggtagcataaccatatcgatagaaacactatcacaatcgcactgttaagtttttgtggttgggcagaagttgttgccatttattcatagctgaattaaactatagtttataaagaaaaccaaacaaatggctatggctaatgtggacaaaggtgaacttatggaccaggttaagcaacagattgctgttgcgaatgcccaggaattgctcacgcaaatgaccgaaaagtgcttcaaaaaatgtgtcaataagccgggaacttccctcgattcgtccgaacaggcaagctatacatatcttattttgcactatagaatatgtatttaaatagtatttcattaatatccaatttagaaatgcatttccatgtgcatggaccggtttatggactcgtggaacctcatttctcgggtgtacggccaaagaatacaacgtgaacaatccaagttctaaacacacgaatcggcttctgcattttggagcagcttgggactaactatatctgccagctattgattagttgttatatctaaagtttgataatgcaataaaaacatgcattgcgtgttacgtgattctgataacacaacgtgcatatgttttttcttatcgatatgtgatgtggtacaaaaaataccaaaactttcagaatggttagtctcaatacatttgacatagcatattatgtagaatgtataaagtgttttggcgcgaatatgcaacttcacataattgcttacttttaaaggtgtgattttctaaaagagctactcaatattactaacctgctttttcgtgtatatccataacggcggttaaaaatgtgcaggcattatccaccgacaatgtcgatataacgtgatcctcgcaggcagttcgtagctcaaccacaccgatatcctgtgccaatatcatcatttgaaatacttgcgagtcctggagaaccaactgaaaaatgaattttggttataattttattatgttagatgttactaataagtagttttcttacctttgcggtgtaaacgtacaagatgaactgcctgaatagttccggattcacgtgtggtaatcgtatggtggtcggagttgaagctcctggggctgctggcgatactgtgcatccgggaattcgacacacttcacctctcttcgcagtcttgaagctcttgcacctgaaatcgaattgagtgaatggaaaggcaagacaaattaattaagtgaccaactggaatacccgggattccagcacgcaacattgtaagattccgaaaaaggcaaccgtaggcaattatcttattccacagagaaaaattatacagttattggcatttataagattttaaggtatcaccaaaatttattaatctcttaagtatttgtttgaaaaaacaatttaacttaccgagccattagcattaatctatgggcatatatgcgctcatctctgccacaaatgaataccacatctgcactatcctgatcctcggaaaggcgctgcagatcctcgatcaactggggcagactcatgattgatttttattattaagtgcggtattcttgggctcaaaaaattgcaatcattcgtgcagaagtgcacgtgttgccttgtccctctgcaagcactgggttttgttattattttgcgattgggtttgtttatgttttcaacttggaaactctctttatttctctcttttaatcgctggattcgtgggagcgcagaaaccggttcctggctgaaaattcttggccgacaccaagccacaatcgatttggcaaacaatatggcctgggaaacaattgcaacaagattaaatggtataacttttctacaaatattattgtaatagtaatattgtgcactatttattttacacagctgcaaactaagcgttttttcaaacaatttcgacctttcctccgcgaaatctgattttctttgaccgctggtcgttcttctcgcgatcacgatttgctaaagactgaagaagagacttgggacaggttgctcttttggatctttctcagtgtttctcccaagcaggtaaacgggattagtttttgttttgcttttctccattccgctctctctcagtgttatcttttttgagagactttttatagcgaatgctatagaaattttcatttatgaatgaaactaattaaggacgagacgaatttttctttattgtattcgcaaaaattcactttgcgcaatagataaaatggtgtagagtttctcgactattagatacccgttacattctatatggttatacggtcaatgggattgctcttcttcaaaggatcaacgactcggccacggaaatatatgttgtcatcatcgcgaatcatgaagacaaagggactattgactgtaaaagtaaccacactagtcgcataatctgaaaaataccacaggcaatcaagcaggaacatgatacaaatgtgccataatttaccagataatcctcgaatggggctcgcagaagcggatcctgcggacccgccttcttcgtcaatctctataaaggctttgtgtacgacttggctgattctagtgccagactggttcagtaggacgctgatatccgacgaactattgaagagatcctgtattcccatctgcaaatttagaaacatgtagtatattaaataaggtgagcagaatctactaacgcttttaagagtttcgacgagctccatgcggaaatcgattttaaatttaggaagctgcacatgtacatccatttcagtgagaactatctgagggtaactttcgattgtggcttctgcctgagttagggacccattgtccttgggcagaacgattaccattgaaaggtttgagtatgcaaatggaagctcaataatttggtctatggtcgaagtacgcatcttaaatcgacccacttgcgacatcatattgacatttacttggtaacttttggatacatagaatac

SEQ ID NO: 26534 - DNA, 893 bp, DROSOPHILA
cgcgagaagaacgaccagcggtcaaagaaaatcagatttcgcggaggaaaggtcgaaattgtttgaaaaaacgcttagtttgcagctgtgtaaaataaatagtgcacaatattactattacaataatatttgtagaaaagttataccatttaatcttgttgcaattgtttcccaggccatattgtttgccaaatcgattgtggcttggtgtcggccaagaattttcagccaggaaccggtttctgcgctcccacgaatccagcgattaaaagagagaaataaagagagtttccaagttgaaaacataaacaaacccaatcgcaaaataataacaaaacccagtgcttgcagagggacaaggcaacacgtgcacttctgcacgaatgattgcaattttttgagcccaagaataccgcacttaataataaaaatcaatcatgagtctgccccagttgatcgaggatctgcagcgcctttccgaggatcaggatagtgcagatgtggtattcatttgtggcagagatgagcgcatatatgcccatagattaatgctaatggctcggtgcaagagcttcaagactgcgaagagaggtgaagtgtgtcgaattcccggatgcacagtatcgccagcagccccaggagcttcaactccgaccaccatacgattaccacacgtgaatccggaactattcaggcagttcatcttgtacgtttacaccgcaaagttggttctccaggactcgcaagtatttcaaatgatgatattggcacaggatatcggtgtggttgagctacgaactgcctgcgaggatcacgttatatcgacattgtcggtggataatgcctgcacatttttaaccgccgttatggatatacacgaaaaagcaggttag

SEQ ID NO: 26535 - protein, 151 aa, DROSOPHILA
MSLPQLIEDLQRLSEDQDSADVVFICGRDERIYAHRLMLMARCKSFKTAKRGEVCRIPGCTVSPAAPGASTPTTIRLPHVNPELFRQFILYVYTAKLVLQDSQVFQMMILAQDIGVVELRTACEDHVISTLSVDNACTFLTAVMDIHEKAG

SEQ ID NO: 26536 - DNA, 2629 bp, DROSOPHILA
gacgttttatgaatcatttccattttcgggggccgttgtctttgttcttgtctctgtttcggatatcacatccaaagagcgttcacaccgaaaacttcaaagtgcacgacttctaggaaagctcgagcaataaacccctgcgatgtcgactgggaagagtctacactttcttggctccccagctcgctaacttaaatatagaatatttaagtagatcgttaatctgcgagtcaagttcaagacagagaaagctaagtctgggcatttagttaaggtttgagcatctattagactagtacacacaggtgctttattcagcgcagtctgctgatatttcaaaagtatcttaaaaagtatctcaaattggagcacccagctcaggattgatagcgtgggtgtctctgggagttcagtgactttgtcgctctgcagcttccagcggttgacattgacattgacccaattggtgagtttagataatcgcgtattattaaatagctatattcttgtttgatcaacgctgcacgagctaagctacgctttcaaagatcgccggacaggttctcaatcacaatggagaaatcaataacatctgcgcacaaatcaaataaaaatgtcatttgcatatgctaaggcacatcgttatgagttgttggccaataacaaacgaaagttctgtgtgccaaaccagtctccgaagtctccgaagactgggactggctttctttgtgactcgcattgtttattttggtcgatctccgttggcttacagcacaaccagtgggtttttaactcaactgggatattatgcaatgccagacgacgggtcagaagtcagcgacggacccccgatgacgacggcacatttaaataaattatgcaaactggctggaatcgatgcgatcatttattggcttgtattcgatctaaagctacgggctactaaatactcttggcagttgtacctgagtggagggaatccccctggagtggcgaactattaccaattgggatcgtacacctcgcgggtggaacataatcccggatagaagtggctcttgcccgtggtgcaacgggaggccgctcgtccagtctcataaactggagcgcccaaggcgtagagtgaagcatagttgcagataaagttgtagatatacacggatggatagtcgggacgagtaaatctcatgatggagcagcccacggcgaagtttttgtccacacttaactcggcaaagtgaccgtagtcctcactgtttcaaagaataacgttagttgccagaagattaagttcatcgcccctttcactcacaatatgggcgtgactttaaaagaatcgatgaagctgctgtctatcagatcgaactcgttgaaccagagacccaggcactcctccaccaagctagtcacattcacatgtggactccgtggacgccacacggcacacagattctgacccgagttggcgtaccggtaggtgttgtggcaatcatcgtggtccaacttacaggtgcgggtatttagcatggacaagtactgcagctcgtcgtcccacacctaaggatttaggatatcgcaggttagtgccattacatgttttcctgtttgggtgcctaccattgtggccattctggcggcaggataatagcctggcacttttcctagagccaggaagttcctcctcttgttgtgggcatgcaggaaatccgccttgtgccggcttacatccacttggactgcatctggttggcagcgcctgtggaaattctatgggaagagcgcaacagtgccatgtaattaataacgaactcgggctcataaatctctttaatagtttatttaaatttatatattttcgaaaaacccccgaatcttttgccgaaacgaaactatttattgattagtgaaaaaatgaaaactttggacagtatcattgtagaaaaccgcagcacaaaaaaaatatcgcgatctctaattatgatatccatttgaatttaaaacaagattacgccatttgattaaagatcaggggcgattaaatttaaatataaataaattaagcgaccagaaacgttcaactctataatatatttgaatttctctgctttttacagcacttttatctcttactccgtcctcaatatgcatgtgattattattcagggtataactttttgattgttaattttaataaccctttcgttatcgtacgcacgagcacattaataacttatttgccaaccacttactccagttgttcggcacgcgatatgtctgacgccattgccgcataaatctggatcacaccaggaataatccttggccaggatcaactggaaaatcagctggaatatggccaagcagatcaaaggcgacgacatatttactagctcactgacaaaaataaacttaaattagaaactaaattggtatgctccgcctatctctccgggacttggcactttcaatcagattctggccaaaaccgtggccgtctttattggatgtttccgtttgaatgatcacagaaccgagatcggggactaggtcttcaactaagcaagagtgctcggctgccagccgacttttaatatatctctctccggccgattctaatgccatttcgcaa

SEQ ID NO: 26537 - DNA, 510 bp, DROSOPHILA
atggccacaatggtgtgggacgacgagctgcagtacttgtccatgctaaatacccgcacctgtaagttggaccacgatgattgccacaacacctaccggtacgccaactcgggtcagaatctgtgtgccgtgtggcgtccacggagtccacatgtgaatgtgactagcttggtggaggagtgcctgggtctctggttcaacgagttcgatctgatagacagcagcttcatcgattcttttaaagtcacgcccatatttgaggactacggtcactttgccgagttaagtgtggacaaaaacttcgccgtgggctgctccatcatgagatttactcgtcccgactatccatccgtgtatatctacaactttatctgcaactatgcttcactctacgccttgggcgctccagtttatgagactggacgagcggcctcccgttgcaccacgggcaagagccacttctatccgggattatgttccacccgcgaggtgtacgatcccaattggtaa

SEQ ID NO: 26538 - protein, 169 aa, DROSOPHILA
MATMVWDDELQYLSMLNTRTCKLDHDDCHNTYRYANSGQNLCAVWRPRSPHVNVTSLVEECLGLWFNEFDLIDSSFIDSFKVTPIFEDYGHFAELSVDKNFAVGCSIMRFTRPDYPSVYIYNFICNYASLYALGAPVYETGRAASRCTTGKSHFYPGLCSTREVYDPNW

SEQ ID NO: 26539 - DNA, 3883 bp, DROSOPHILA
acgcccctcatcccgccgcagacgcatcagcgtgacccttgccttctcccttcggccctgggacatcaggaaacgcggactttcggggaaccagaagatgggtgccaatccgatcaatacgaaaatggcggaaccggacagcgcgtagggccacagtttttccgtgcccagtaggaaatcaaagctaaagacctgtcccaaaacaatgccgccggttaacccgatacaagtaaaaacgcccacgctgccactcagttctgctggagccaactccaccaagtacatgggctgtgtggcatagattagggcggcagccagtcctccgatcagacgccccagcagcagcatctcgatggagttggccatccggcagaagagctggcagatgcaggacaccaacaagagcaatccactaagcgtcagaatccctcgacgtcctagccgggcactgaagatcggggcaaacggagcacccagcatgccacctatcaggaatatggagaccacggtcgacattattatggtcatctgggagtcgcccagacgtgatgagtaccgctctagaaccgactccattatccacgacctaatgaactagttatgtcattcagttgggactattttgtacaattccttggtttactcacggcggacggagcattcatcacaccgaaggcatatccaacggggatgacggtgcccacggtgatgcacacacatatgagcaccaggaggcatgtccagccctgttttccatcggccataccgaaatttatggtagtgtatatacttcgatctcaaggtattttcatattactttgttatgatttaaccaaaatgttgacagcttacaaggcaagttactaaagcatacttttgggcttcctaattctgtcagatgtaaaaaattaaatgcataggtcttatgaagatacttactaagccactttccgttaggacttcaccttatactataatcagaattgaatagaaaccagattaacatataaattaaatatctttcaagcaaaattcatttttcaagaaagaccagcttgtttcattttcaatgtaaaggtgaatgccactttagttcagcttggaggaaagcccctggctcattagcagcttcacatcctttggctcccggccacgtgtctctggaaggtaacgccaggtgagcagaaggcagtagatgcacacgcacatgcacgggatgaaggcaaaggagctccagacactctgcagcaatggaaagcacatgcccactaggaagtttccgatccacgagaaaaggctgcccattgacatggccacaggacgaggcgaatcctcgaggagctctgattaaaatgtaaaaaaatatgaatttataatgttacgctggttctgctcttcgtacctgagccaatgaagtaagcaattggtcccagacccagctggaaaccgaggatgaatgttagaatgaaggcggcacagaagtaggtgaggaccgtgctctctgatctctccaagaagaagagccccaaggacatggcaagcagggccagagcacacatggagcaggaaatcatcattagaggtcgacgcggaaacctgcggattagtaatggtcccagaagggatgtgcacagattgaagcttccgattcccagatttaaccatgtggctgctccgtcagagaaaccagcattagttaaaatagagagcgagtagaagaatatctgcaaggaaaccagaaattaatacaaaaatcaacatgggaactatgtgaattacgcacagcattgatgccactgagttgttgggtggcctggaaggaacagactagcaggagtggtagccacagctcactattccttaaaaccgagcacaaagaacttacttcggagctggacttggcctctagagtggccttcatctcaagcagttcctgatgcacctcctcctctgtgttccttccacgcaatcggagcaatgctttctcactggcggccgaatctcgcttgtgcaggtagagccaccgcggactctccggaaaccaccaaagaaggaccaacgatgccatcaccaataacgagtagaaactcaaggcataaggccacagtcgctcgctccccagcaagtgggataaagtggccacctgggcgagcaggataccaccagtcacaccgatgcaggtgaacactccgacgctcccactgagctccgatggagcggattccagtagatacatgggctgagctgtgaagatcaaagcggaggcgatgccgcctagaaagcggccagtcatcagcatttccagcgatttggctgctcgacaccaggtgaacaggatgccggaaacgacgaatagtacgctactgataaccagacatcccttactggaacgataagctattaaatataatccaatcaccatattatatttaaaccttaccggccgtatttatcgcaaagcacagcgctgaagcaggatccgcagatgcctccaatcaggtagatggacacaatgctagtccatagaatatcaagctgaccggcagtgacgatagtgtcgtattcgttcgccaatatgtcctggcaccacttcttgatgatctcggccggggcattgagaaccccaaagaaatagcccactggaatggtggtgcccagcgttacggtcaggcagatgagcatcagaagcggggtccatccattgacttttggaggagtcacgtgctgtaaggaaagcagagtgatttacatgattagcacgttgcaaaaagcgcaaacgaaagacttaagcaacaaactcgtcccgggtgaaggggaaagtatcaagaagatgttttgaatcaccattacaacaaccatggcgatggaacgatgctggcaccccaaaagctagaccgaaagtgactcgcatccgacggttcactcagtgccattcgacagcttgttgagtcacccacaccgcttgtatatcaatcacgtaaacacatcttcactttggttgccccggacttggaatacatttacagcatataaccagccatagataaattcagcgtttttgtcttgcgaatacttgttttcttatcgttagatgggagcgtttgtttgctccaactatttcccggcaatataagtcaatagttatatactcttacgaattgatcagagatctttcgtagtggaaaatacaacattttattaacctacccacaggcatatatatatagggagatcaggatatatttgccttccaaatgctaagcacttattgctaaacaattcaagcgttggcacttaattaactaacgcacccgccgtggaagagtatccagtgattccgcgtcgctcttgttcaacaataaatctaattaacagagtattacttggcggtccgtcccaaggcgttttaattgaacttgtgcagtgataagaggacgcagcgctcaaagctttcttacagggtgactcttaaagttagatcaattttcgcatttattggtttgtacaaaagaacttacaggctaggcgggaaattacatttagtaagagtaatttatccctgaacaacgtggatttcggcttattgtcgacacatacaaaaggcacacgacatggacgaatcattaagcgacccactgcacacatgaagttaaaccgtattaccacaaaccaccggctacttatggctaattggaagttgagcccactgggctatgtcctatttgactttggagcggaagcccttcgatacgaggggagccacctctgagggatcgcgtccccgcgtttccggcagatagaatttcgtaagcaagaagagcagcacgcaggtaatggagaagggcaggaagacgaaggcgccccatgcgttctgcagcagggg

SEQ ID NO: 26540 - DNA, 1589 bp, DROSOPHILA
gggtgccagcatcgttccatcgccatggttgttgtaatgcacgtgactcctccaaaagtcaatggatggaccccgcttctgatgctcatctgcctgaccgtaacgctgggcaccaccattccagtgggctatttctttggggttctcaatgccccggccgagatcatcaagaagtggtgccaggacatattggcgaacgaatacgacactatcgtcactgccggtcagcttgatattctatggactagcattgtgtccatctacctgattggaggcatctgcggatcctgcttcagcgctgtgctttgcgataaatacggccgtaagggatgtctggttatcagtagcgtactattcgtcgtttccggcatcctgttcacctggtgtcgagcagccaaatcgctggaaatgctgatgactggccgctttctaggcggcatcgcctccgctttgatcttcacagctcagcccatgtatctactggaatccgctccatcggagctcagtgggagcgtcggagtgttcacctgcatcggtgtgactggtggtatcctgctcgcccaggtggccactttatcccacttgctggggagcgagcgactgtggccttatgccttgagtttctactcgttattggtgatggcatcgttggtccttctttggtggtttccggagagtccgcggtggctctacctgcacaagcgagattcggccgccagtgagaaagcattgctccgattgcgtggaaggaacacagaggaggaggtgcatcaggaactgcttgagatgaaggccactctagaggccaagtccagctccgaagtaagttctttgtgctcggttttaaggaatagtgagctgtggctaccactcctgctagtctgttccttccaggccacccaacaactcagtggcatcaatgctatattcttctactcgctctctattttaactaatgctggtttctctgacggagcagccacatggttaaatctgggaatcggaagcttcaatctgtgcacatcccttctgggaccattactaatccgcaggtttccgcgtcgacctctaatgatgatttcctgctccatgtgtgctctggccctgcttgccatgtccttggggctcttcttcttggagagatcagagagcacggtcctcacctacttctgtgccgccttcattctaacattcatcctcggtttccagctgggtctgggaccaattgcttacttcattggctcagagctcctcgaggattcgcctcgtcctgtggccatgtcaatgggcagccttttctcgtggatcggaaacttcctagtgggcatgtgctttccattgctgcagagtgtctggagctcctttgccttcatcccgtgcatgtgcgtgtgcatctactgccttctgctcacctggcgttaccttccagagacacgtggccgggagccaaaggatgtgaagctgctaatgagccaggggctttcctccaagctgaactaaagtggcattcacctttacattgaaaatgaaacaagctggtctttcttgaaaaatgaattttgcttgaaagatatttaatttatatgtta

SEQ ID NO: 26541 - protein, 472 aa, DROSOPHILA
MLICLTVTLGTTIPVGYFFGVLNAPAEIIKKWCQDILANEYDTIVTAGQLDILWTSIVSIYLIGGICGSCFSAVLCDKYGRKGCLVISSVLFVVSGILFTWCRAAKSLEMLMTGRFLGGIASALIFTAQPMYLLESAPSELSGSVGVFTCIGVTGGILLAQVATLSHLLGSERLWPYALSFYSLLVMASLVLLWWFPESPRWLYLHKRDSAASEKALLRLRGRNTEEEVHQELLEMKATLEAKSSSEVSSLCSVLRNSELWLPLLLVCSFQATQQLSGINAIFFYSLSILTNAGFSDGAATWLNLGIGSFNLCTSLLGPLLIRRFPRRPLMMISCSMCALALLAMSLGLFFLERSESTVLTYFCAAFILTFILGFQLGLGPIAYFIGSELLEDSPRPVAMSMGSLFSWIGNFLVGMCFPLLQSVWSSFAFIPCMCVCIYCLLLTWRYLPETRGREPKDVKLLMSQGLSSKLN

SEQ ID NO: 26542 - DNA, 3655 bp, DROSOPHILA
tggtcaatgtaaaggataacgaacctgtttattgtttcggataacggatttggtgatgctcctcgccagatgctcacccgtgacgtcatgagcggcggacgggcggctgttgttctcgttgttgttagagctccgaacgctccgtttattttagcagctgatgtatttgcgagctatgcatgtggaatattatttatgtttgcgcgctctgtatattattttatcagtgttattcaacgcgcgccaaggaatgccgtcggccagctactttggagattttcccgagagtttgccgatcccgattccggctgatctgcacagaacaacttcttggcttgtttcgcgtgccttgtttatttataaccgaaccacacttcacctcacttcatttggccaccgccatctccgcccgtttcccgatgccgaatgcgattccggagcaagtgcctcattcgccggccgtgcgcgctgctcgacgttccgctgcccactgagacccgtactcgcacccgtatttatagacggccatattgacgcgctacctgtgacgtcactgtgctccactgttcgattacgaatggggatcggtgatgggcgatctgttgttaagagaggaatcccctctcccaggtagccaatagcatcgacttccaaatgctctataattaaaatgattccagcaatattatatactgatatatttgatataattcaaatttatatatttttatattgtatatggaggtcttgtgaaacgcaaaacaaaattgttttcatattaccaggcagatatgtatgtagatattatattgagtttggaaaactcactttagtttatttgctgatttaaagaactttaagcttcggataacaaaaaaaaaaactattggatgagatcctacaaacatacatatatatttgaaatttgtagaaatgttaccaaaagcatgggcaaataatcaccagtcaaaaagtggttcctcatcgttcacagatggatctactttatcttagacttgaagccgttctccattagctgcgccacatccttggcatcgcgatttctcgtctctggaagatatcgataggttaacaggaacccgtaggcacaaaacaccacacataataggaacacaaatggtccagtcgccgagttcagggtggggaagatcatgtttagcacgaagttagccagccagttaaaaaagcttcctagggccattgccgaaggacgcgaagctgtctcaaatatctctgtgggatcggaagatataagcaatacaccggttaccaccgcggatatcaacctgagccaataaagtagggagtgggtcccaaacccatgttgaatgtgatgatgtacagcgacaggaaggcgatgcaggtgaatgagaactcatgtatagtcgactatgggtggattagaaggatgtaaaaatagccaaaccaagagggcagctaaattatgtcaccattagttccaggccaacgacaagtaggaccaaaaagattgcagagcagaggcaggagatcgtcatcatgagacgtctgttaaagcttctcattaaccagggtcccatgagggcggatatgaagttcaaaaggcccaaggcgaagttgagccacatggccacggctgcagtgaatccggattgggtgaagatctctatggagtaaaaccatatctgtcaaattggaagtggttagtatggattatgtatttgtatttaatgttgcccaccgcactaatgccgctcatctgctggacgaagtggaaggagcaaacgatgaacagcggcaacttgagcttactgttacaaagcacctgcttcatggtgacctgaccctcatctgtagagctgacctcgaactccgccatctccgcgttcacacgcccctcatcccgccgcagacgcatcagcgtgacccttgccttctcccttcggccctgggacatcaggaaacgcggactttcggggaaccagaagatgggtgccaatccgatcaatacgaaaatggcggaaccggacagcgcgtagggccacagtttttccgtgcccagtaggaaatcaaagctaaagacctgtcccaaaacaatgccgccggttaacccgatacaagtaaaaacgcccacgctgccactcagttctgctggagccaactccaccaagtacatgggctgtgtggcatagattagggcggcagccagtcctccgatcagacgccccagcagcagcatctcgatggagttggccatccggcagaagagctggcagatgcaggacaccaacaagagcaatccactaagcgtcagaatccctcgacgtcctagccgggcactgaagatcggggcaaacggagcacccagcatgccacctatcaggaatatggagaccacggtcgacattattatggtcatctgggagtcgcccagacgtgatgagtaccgctctagaaccgactccattatccacgacctaatgaactagttatgtcattcagttgggactattttgtacaattccttggtttactcacggcggacggagcattcatcacaccgaaggcatatccaacggggatgacggtgcccacggtgatgcacacacatatgagcaccaggaggcatgtccagccctgttttccatcggccataccgaaatttatggtagtgtatatacttcgatctcaaggtattttcatattactttgttatgatttaaccaaaatgttgacagcttacaaggcaagttactaaagcatacttttgggcttcctaattctgtcagatgtaaaaaattaaatgcataggtcttatgaagatacttactaagccactttccgttaggacttcaccttatactataatcagaattgaatagaaaccagattaacatataaattaaatatctttcaagcaaaattcatttttcaagaaagaccagcttgtttcattttcaatgtaaaggtgaatgccactttagttcagcttggaggaaagcccctggctcattagcagcttcacatcctttggctcccggccacgtgtctctggaaggtaacgccaggtgagcagaaggcagtagatgcacacgcacatgcacgggatgaaggcaaaggagctccagacactctgcagcaatggaaagcacatgcccactaggaagtttccgatccacgagaaaaggctgcccattgacatggccacaggacgaggcgaatcctcgaggagctctgattaaaatgtaaaaaaatatgaatttataatgttacgctggttctgctcttcgtacctgagccaatgaagtaagcaattggtcccagacccagctggaaaccgaggatgaatgttagaatgaaggcggcacagaagtaggtgaggaccgtgctctctgatctctccaagaagaagagccccaaggacatggcaagcagggccagagcacacatggagcaggaaatcatcattagaggtcgacgcggaaacctgcggattagtaatggtcccagaagggatgtgcacagattgaagcttccgattcccagatttaaccatgtggctgctccgtcagagaaaccagcattagttaaaatagagagcgagtagaagaatatctgcaaggaaaccagaaattaatacaaaaatcaacatggg

SEQ ID NO: 26543 - DNA, 1431 bp, DROSOPHILA
atggccgatggaaaacagggctggacatgcctcctggtgctcatatgtgtgtgcatcaccgtgggcaccgtcatccccgttggatatgccttcggtgtgatgaatgctccgtccgccttcattaggtcgtggataatggagtcggttctagagcggtactcatcacgtctgggcgactcccagatgaccataataatgtcgaccgtggtctccatattcctgataggtggcatgctgggtgctccgtttgccccgatcttcagtgcccggctaggacgtcgagggattctgacgcttagtggattgctcttgttggtgtcctgcatctgccagctcttctgccggatggccaactccatcgagatgctgctgctggggcgtctgatcggaggactggctgccgccctaatctatgccacacagcccatgtacttggtggagttggctccagcagaactgagtggcagcgtgggcgtttttacttgtatcgggttaaccggcggcattgttttgggacaggtctttagctttgatttcctactgggcacggaaaaactgtggccctacgcgctgtccggttccgccattttcgtattgatcggattggcacccatcttctggttccccgaaagtccgcgtttcctgatgtcccagggccgaagggagaaggcaagggtcacgctgatgcgtctgcggcgggatgaggggcgtgtgaacgcggagatggcggagttcgaggtcagctctacagatgagggtcaggtcaccatgaagcaggtgctttgtaacagtaagctcaagttgccgctgttcatcgtttgctccttccacttcgtccagcagatgagcggcattagtgcgatatggttttactccatagagatcttcacccaatccggattcactgcagccgtggccatgtggctcaacttcgccttgggccttttgaacttcatatccgccctcatgggaccctggttaatgagaagctttaacagacgtctcatgatgacgatctcctgcctctgctctgcaatctttttggtcctacttgtcgttggcctggaactaatgtcgactatacatgagttctcattcacctgcatcgccttcctgtcgctgtacatcatcacattcaacatgggtttgggacccactccctactttattggctcagagatatttgagacagcttcgcgtccttcggcaatggccctaggaagcttttttaactggctggctaacttcgtgctaaacatgatcttccccaccctgaactcggcgactggaccatttgtgttcctattatgtgtggtgttttgtgcctacgggttcctgttaacctatcgatatcttccagagacgagaaatcgcgatgccaaggatgtggcgcagctaatggagaacggcttcaagtctaagataaagtag

SEQ ID NO: 26544 - protein, 476 aa, DROSOPHILA
MADGKQGWTCLLVLICVCITVGTVIPVGYAFGVMNAPSAFIRSWIMESVLERYSSRLGDSQMTIIMSTVVSIFLIGGMLGAPFAPIFSARLGRRGILTLSGLLLLVSCICQLFCRMANSIEMLLLGRLIGGLAAALIYATQPMYLVELAPAELSGSVGVFTCIGLTGGIVLGQVFSFDFLLGTEKLWPYALSGSAIFVLIGLAPIFWFPESPRFLMSQGRREKARVTLMRLRRDEGRVNAEMAEFEVSSTDEGQVTMKQVLCNSKLKLPLFIVCSFHFVQQMSGISAIWFYSIEIFTQSGFTAAVAMWLNFALGLLNFISALMGPWLMRSFNRRLMMTISCLCSAIFLVLLVVGLELMSTIHEFSFTCIAFLSLYIITFNMGLGPTPYFIGSEIFETASRPSAMALGSFFNWLANFVLNMIFPTLNSATGPFVFLLCVVFCAYGFLLTYRYLPETRNRDAKDVAQLMENGFKSKIK

SEQ ID NO: 26545 - DNA, 3044 bp, DROSOPHILA
acaatcggagcacaatgattggattcgttaacgaggtagcaggtcctagagagggcaaacagcgttagctacaatatctgcacaaacgcacaaattcacggcaggactcggatggcacacatcactaggtacgctccggcacttggcaacactgaatgcgagggcattgaaaccgaatgaagcgcacaaagtggaatgcaaaaccggacaaagtggcgtacactgcgccgaaataagcgaaatgtacgattcgttgttggcgaaatttgtccaatatgtgacatacccggcaaggataacgcactcccagttgcacattgcggggcaaacgggatatatagccttaatagacccagccatgtgcacatacttcgacgccatttctgcaacgccacactagccgactctttcgctcttatgtaaaccaagggacccagtaattgacgacgaccgccgctccagacagcggccactattgaattttcaaccgagtttttcgctgacaagcccccgggagacatgtcgaaaacacgttgcacaggtggggggacacttaaactaaactttaacacctcagcagggttccggtcacggctttaaattggataaacaaattttcaaaacggagtcacactcaatacctgcaaatgcgccgagaaacgcacttttaatgtgaccgctcgttagtcgatcgatatggctttatctgggcatgcagccctggactcagaaatctagcggtgccacgaatcagttttactaatttttaaattgataacatttctataccattattaaaaggcttcaaaaagctaatttatccaattttccattagctaatataagcagcttacctattagaagctgatttcgatcttaaatatgttgtatgctccttgttaaaaggttttgaactcgtattaaatcaagtggtatatcgataccaaatgaaaagttgttggcatttgcacacctctatcatcaacaaaacatactacttttgaaaaaaaaaacaaacaaaatcagttcatttaccaaactatggacaaaatattgcatttgatgacaaaacattaagtatatttacccaggcgagcaatgagcacacaccaatgccccaaatattcgagtgacgacgacgtcgagatattgaaagatgcaatggaggagctgcaaaaataagcttgaaaagatcctaaaaaaccaaaatgacttttgcaaggtggaactggactattttcccgtgtatgatcccgacgagctttccaatctggatgcgaatctttcaaagccgggcaatagcacaaaacgtaagcctgattattggggtattacaaacttgatctttttgttttccaggctcatattattcaccgcatcctgaggccagaaggtcgaatagaaccgctgaaaaacaatttgtcaaagatgttcaactacgatattctcatggcttacaactgcgacggtgagctctcagtcagcagtcagtcatctcatacaaatatattaacgaaactatttttggtgagttaagtatagctttgtgcagatttaaagcattcatttcgtttactaaattaggtgttgctatttataatttggcgtaaaaaaaactatcctggcttataagctaatgggtcaatttagtttataattactagtcattctaaataactaaattatatttgcatgggatatttttatgcttgaagaccgcgatggttccttttttatagtgcatcaaactttccatatctattatattattatatcttaagttgttcgtatttgtgaaattaaattagtaagcaggaatatttttagaatcagtacttttagttagttgcgctaaaatttaagaaaacattttctggtaatctctcatctttaggggtcctgaaaacagacattaaggcgacgatatcataaaagaaaccacgacttacggaggaggattagacagaaccaaaagtgtgagccagattctgattgggattagccgataagctggtatcaatgctgcatttcgtttatttgcaacgtttatctcaacgaaaggaatattaagccaaaccggttttggctctctgcagtaagttgtgttctttccgctttaatgaggttattttcggcttgcatagcgcctcgaaacgccagtcttttaaaccgtaacgttctggtcgacatccccttggaaaaatatggatcaaagatttcaccacatgtggcttttaagtggttctaataattgttattatttaccatacttttgttttccattgcaaagcaatcactgatttatttatttattcgatttttaagttctgatttcacctaattagtcattttttaaaccttattgtaaattaactgacgcaataaagaaaaaaatgtatttaattcaaaaaatgtgcatttgaagagacgcttctttctcgtttctaaaggtattataaaatgtttatatatatatatatgggtttatatattttatatttgcatatggaaagagaccatataccatccatcgatataccatcctcaacattcttcaaggtttcgcaatcatcgtaaaggaattgcaagattttaaaaaaacgcgatgcccaagatattttgttaatggatacttaatcgccagtgccactgagacaagtgattcgaaatgaaaacgacgagtgtcgctgctcttggtgaaaaaggcaacctggcagggttcagtaaacttgtttccaatttgaaaatggttatgccagccggataaaaacattttccgatggttttaggcattgcaacaacaagtaccaggccagtgctcagttgcacagtcggtgtagcgggccataaatgagaactcaattagaacgtttacatttctgtaagaaacgagttgctgccgctgctgctgccactgctgcctgccgccgtagttgctgtggtacattattttttggcctaaatagtaggccttgaggaatcggaatcgcttgagttgtttttgtttcaccgagcgccacggcagagcagccggcagcgacgcg

SEQ ID NO: 26546 - DNA, 628 bp, DROSOPHILA
ttgaaaaaaaaaacaaacaaaatcagttcatttaccaaactatggacaaaatattgcatttgatgacaaaacattaagtatatttacccaggcgagcaatgagcacacaccaatgccccaaatattcgagtgacgacgacgtcgagatattgaaagatgcaatggaggagctgcaaaaataagcttgaaaagatcctaaaaaaccaaaatgacttttgcaaggtggaactggactattttcccgtgtatgatcccgacgagctttccaatctggatgcgaatctttcaaagccgggcaatagcacaaaacgctcatattattcaccgcatcctgaggccagaaggtcgaatagaaccgctgaaaaacaatttgtcaaagatgttcaactacgatattctcatggcttacaactgcgacggtgagctctcagtcagcagtcagtcatctcatacaaatatattaacgaaactatttttggggtcctgaaaacagacattaaggcgacgatatcataaaagaaaccacgacttacggaggaggattagacagaaccaaaagtgtgagccagattctgattgggattagccgataagctggtatcaatgctgcatttcgtttatttgcaac

SEQ ID NO: 26547 - protein, 92 aa, DROSOPHILA
MTFARWNWTIFPCMIPTSFPIWMRIFQSRAIAQNAHIIHRILRPEGRIEPLKNNLSKMFNYDILMAYNCDGELSVSSQSSHTNILTKLFLGS

SEQ ID NO: 26548 - DNA, 8368 bp, DROSOPHILA
atatatatttatatatataaatatataaacatttatatataaatatatatttatagacgtatatatttttgtaaatgaaactgcaagaagtatacatttagcttttaagcgtaaaaatggaaaagaccaacaaaaatgaaagactcaaaagcaatatttaatatttaaaagcaatcgaaaatcaaataaatgtgtttgtaaactttgtgtttatcatcgacgcgataaacgagccaagcctaaaataagtttcaatttcaattccatatacttataactacttacattaaacgagaataaaaacacccaaaacatgatgatctttaatatgatttattgtttgtactcgagccgaacaacttcatttcatgcgaaaataaacaagaaaataaaacaaggaaaatcgaagcaaacatgtgaaaatctatcttatcgttgggttgtggtgaagtttcagttggatcgtactctaatatgtgtgtgttggttctgtttgcccagaacaattacaaaccaaattctgtggacactttaaaggttctgcctgtgttgtttacccgccttgtaaacatggctttttatgactagttttcccaaaacgtgtttgcgcgacgcaaactttggagcgaaccttgccgcttaagttcggatggtctttgaccccggccctttccccaaccctccgcccaaacttttcttgagaagaacagcttaacactgttatatcccaggattttccctttcacaaatacacgcttacacgcatgtgtacaaatcttattttgggcactaaaatcaacattggatccagtgcggcttttgatgacaactgcttgcataatatatacactcattcggtctactcgtaaatttaaattattttaggagagataaatagtcgctttgataacgatatcagacagggctctagaagtgtttttgtttttcaacaaacttataaatacagctgactcaaagttttcccagactgtcaaacggtgtctcaccatatcctgctcatatgaaatttcatctatcgcattttcgcacgtgccgaagtgactttaccaacgtcatatgtttggattcattggttctttacgctgttgaacacacgtacttctccgcttactcaaaggtcctattgctataaaagacctcaagtgtagttcctgtcaaatgagctgtttgctctactttgcacacatcatagcacacaatataccctgtaaataattgtaataagttatggttataactgcacaacttgctttctaccgcgttttacacttggtgctgcaatcgtggggaatctggtaatcgggaacttgagtagcagcaacccactaagtctacatgtctcttgagcaatttacgtggcaagtgtggcaatagaaggctgggaagatgttgagcaaattagcatatcaaattgagttaaacgctgcaattggcctcaataaatacatacgtaaataaatattacggcatggagccgaggaaagcgaaatcgttatgggaatgcgaatgcgaaatgaaaatggaaactgggttcaaggaactccatctttcgcaaatgtcaaagtgctctgctaggaatatttccaataatttcatagctgaaatatccaagtgcatattttgttggacaaatgagaatacatcaaatttagcactattatctattgtgataatccagcatttcctggtcaaagctcgtgctgcatttcccccaggtatttggttgcattttcctggtgtaccacagatgggtggcctacacacacacaccttctcgatgaccttgcacttgcaattgtcaaattaatttcgcgctgtttggcataaaagatttacggcaccaaatacacccatgtacatcccatgctatcaattttagtggcgtcctcttgcggcggttgcgacaactgcttacgtaagctccatttcgcacgaacccttaaatttcgctttagacacaatttatttatttaaaaaaaaaaagaccgctttgcgctgcgagtctgtgaatcgttgacggttttgtcgtctctgatttattgtaatgcctgtttttttgttgttgttgttgttctgtttatttgccttttttttgtcacaattgtgtctggtttttgtttaaattctttgtgctctctacttaatgcgataaattaacttcaacagggcgaaaacagacttccagtttggcctgttttaaaaaaattttctccattctttagttgttatttataggaaatgtattgcatgcggcggcatatttaatatctggatgtattcaaatactataagccaagatgcatgttgaactaggaattgttccccctccgtcaaagtaatacctttcattatctaagcgacctctaacctcttataaatcgattaattaaaaacaatttgtgacactgggtaattagtcgccgcacatgagacaaaatacaaaaatgaaatacatatatgtattcagtgacttttggcattagcatatcacagatatcggtggaataagaaaataccccatgtctcggtatgcgtaagcagtttatatattcgtttattttgtttatcgcaagttggggtctttgaatggacaggggatcgaaatgttagtcatttgtgattttgtttatctgcaaaagctgagagtgaaaaagtgatcaaaactgcactcaacttcgtggcatatatgattcgaaattatgttttgattgtgatatggatagtggttgtggtgctgtttctggattttagttcgaatggcggaagtttcaatcgtttttaatgagcctcatcgcagtgacacagaaagtccagtttgtggaggcgtctttatgtcgcaaatgccctctgatccaacggctatgctagctttttaaatgaaacatatttccctagctgaatatcaacaatttgcatttttagtacaaaaaaagggaagaacatgcatttaatgccatgagtgaaatctgtttcaaatctactgttgggtagctcatattccacccacttgccccgcacttacttgcggagacaatcagcgcttctaattagccagccagacgggcaagtgcttattagacagggggttcgtgctctggtttcaatatagttttgaaaccatgtgggacgatccaattggcacggccggcattcaacacctttcgcaaagttgggcaaacagcaatcaaagcagacaaacaaacaaacaaaggcaaaaagcacaaagcacagagcaaggcaaacactgcgaacaagcagagtttaaacatttgcttagtgcaccggcgacaagttgcataaattattatcgaatggcgaatgcaattgcacgacctgctacagtaacccccttcactatccccccgctgactctctttggggggtaagttggggtgcaaccttgttgcgctaatgacaaatgcttgttgtttgtctttcactcgaatttgtttggggccaaaggctccattagctctggtgaacttttcgaggcttcgtagcgcatagataatataactgatcaagagattttactgatcagttatgaaataaataatcgaaagattcaagtgcttttccatttttccttggaaatctcattaaatagttggtcgaaagagaaatcggtctgtgatttatgtaaatgccattgcaagtatacataattttatagcaaactcacgatgtacaaactacactatcgaaaaaataaagcatgaaagagcattttcatatttacatacaaattaaacctcgagctgttcaaacacttcagtttgaaagtagatcaaatgcagttctgcatttgcatccagtttttgaaaccacttagcaagatgctaatggttgagcattactggagcaaagacgtttaccaaacagaagctaaaaaaacatctaatgcattttggttgcacaggactttgaatcaaatgcacgaaatcacgtgcattctcgattaaatgggaaacttatgaggcttcatcgacacctcaaacgtctcattagaaatcacattcagatgccataaatccgttcatgaactgcaacaattccaagtgcaattaacattttcaacacggaatctaaagtgctacttacatatgataccctatctgatttgttcgtaatttaaatggaatgcatttataatcaaacggagtaatttttatttaaagtaagccacactatgtggctactaaagtgtgagatattattttttttttagccggcatcccattaagttatgtatatccctgggtatttatgtattcgactccctgatgctgcccttaaattcttgattttaaattgttctcccccggcgatggaaaatgcaaatgagatgggaaacatttacaatcgaaccgtatgaaatgcgctatcaattacggcggctaaatgccagcggatcttcattctgaggcgagaaagacagagatggcgatagggaagccctaggagagcagaacgaaagactgaggcaacgaactcgtgtcgcccgctgcaaataagggatagagctggtgggccctggattttggagcatgccgccatgctgtgtggcgaattgtgctgccccccatcccccgcctcctctcccctttcattctgttcttaaggaacttgcttggctcttaacgactgtttcccacgcttgaaaaatgactcgcgaactggactcgaaatctgagttattttctcaacccgtttggggtccgagccccaaacattttgtgcccgttcaagagctggctctctctgtgtgtgtgtgtgtgtgtgtataacatgtctagccatggtcgacgtcgcctttcggtggcgcttgttggctaccgttgcacgccgcgcccaaaagcctagaagctgttgctgcttgcggctgccatgggtcaaggggggcggtccaaggcatgcatcgggggcgtggcagggcaaaccggttaccggtctcggccagaggcaaaaatgcagctaagcttgtagaaggagataacgaggcaacacagtgaaacctcgtgtgcttgttaattgcattaaaaaaaaactgattctaatagggatttaacgaaaaactcattgaagagtcaaatagaaattgaatttgggtttcttcttaacaaaatgcgtggggtatagtgtaatgtcacaactcgataatttgatcagtctttcacttttcagcactcttgcctagaaatgtacgttagcgagtctctacttcttcgcattgttcacacacattgataaacaagatgtatacacactattcgtatgctaaatgcgttggcctggctgcaaaatcaagttttgcattttcatttgaatttattggtttcctcgctggctgttgccaggcgcactgcgatcgagtggagtgacttgacttggagtgcagtgcagtcgacggtgccattgccatgcgatgccatgccaagccacgccactcgaagacttgcaacttcattcccaatcaattctcgcattcttactcttcgaatatggcgacggcgtccaagaacaacgacaaggcgactacacttgaagttaatattttatgggtagagatatagatacataaatgagatacacagggagagagacgagggctagaacatcaaatgaaaaaaaaaaaaacaagcggaatacacttaacgttagctattaattaaagctggaattggaatccggatgatgattttgtctacatccgcacctggaacttgcccgccttggtcaggtatttgacgcccttgaaaggcttgtacttctcgccgtacatgtccaggcgatttacctttagcccagagacggccagctgcgagatttggaactggacattcacggatggattggcatcgatgttggtcgtaccgggcgtaatggaaacctaggcgtgcaaggacagtatattattaatgggataaaaatataaataatttaagacgttagatacatgaatcgtgtaaaagtgtaaagggtctcaatagttattcttaccgatcccctaatatttggcaacttggaaacatcgatccgtcccacatcccaggacagcgtcttggtcaccgaatcgaaggtatactttccctgattcggcgtcaataggcaattaagcacacaccgcggcatggtcagctccagcttcaccttgtcaacggtgcgaccaagggtgttcctcgggccaatcgtgaggtccagacgcccctgctcacccgttttgatcgaaaagttgtgcctgatgtagatgggtatggccaccacggactgagagctaatgtgatatgacatcaggcggaagtttccgtcgggcgggataaaggagagcaggcgctccgcctcccagcgcttgtagcgcacgcaaggatggaaggaaacgtcgtcgaagaggcgaggattcatgaaagataacgtcagatctggcatgccggataacttaatgcagcagtcgatctgataaaaaaataaaagagatagaaattatttttatagacttaagtgaaacttacgtgtccctggatctcggcaaagaccgtggatccggatttatcaatgatagcgtccacctcctcgatgacatcgaagtacgcctcgttgttggtgtacctcacgccgcttctgcgccagcgaaccgccgacagctgacccgagggcaaagtagtgcttacacttcggaaatcggattattaattggattattaaggtaaatgaaagacaaagacggagggagcatcattcaacttacttgctcttgcccgtcaccgtgttggcaatggtgcgcaggatattgggcggcttgatcagctccttgaggatgttgctctcggtggccagtgggaagccattatcgagcatctcgtccagcagctcgtaaacgaccacatagttgtccttgatcacggactcggagcagtcgccgaaatagtcctggaaggtgtccaccacgcgatgcaggaactcgatgacaaagagcggcggcacctcctgcttgcaggcggcgaccaaagacaccgtgtccctttgcactgtaatcaggtagtagtggggcgtggctatcaccggcggcacatcctgcaacaaagagatatggtcagcatacaacccatacgtggcacgggcgactcacatatggagcagcgcgctgggcgtcaaggaagtattcgcacacagatctcgagacaaccgagcgccaatgcttttccaggaagacctcgctgaaatgcggatatatgggtatatgggtattacatcgtcttcacatttcacttataggtatggcttacccgccgctgtttacaataaacagactgtgtatcataattcgacctaaattgcttgctagtttaagctatgtttttttttcagggatgaatcattagcgatgacagcgtgaaggtgttctactaccatgctcccgaagcgcttcagtaactgttaaataatttcattaaattgaaattaagataggctgaaataaacgaacatttatttaaggggccttatacatagttaacttatgaatttatttactaacgttgtgttgtcatcacatcagctcatcactagctcactcgctcatctctaatcgaacagctgattgctgcgaaccggaacaaatggaaattgtatcgtgaggcaagtggagtttcccctttacttttggcaaataataaataaacaaaggaacaagcctaaacattttcaattaaaccatatacagaactaacgcacacatgtgacggaggcaatacacaaacacggcacctttgaatctcgccttaaaattggcgaaaccaacacggaattatataaccgccggctgaaaacacatgagtccgtacagcggatccgtgcgtcgtctgctggacagttggccaggaaagaagcgcttcggtgtctaccgcttcctgccgctcttctttttactgggcgccggcctggaattctccatgatcaattggacagtgggcgagaccaatttctgtgagactgctacgcttaaaaccttacttttatttactaatacggaatcttttccatgcagaccgcacttttaagcgccgccaggcgaagaactacgtggaagagcagcagcatctgcaggcgcgagccgcgaataacaccaactaagcaaaatgcccgccggagtttcctggggccagtacctgaaattcctcggctgtgccctggcatccatgatggccggatcgcaggctgttcacctttactataagcctctggaggacttgcgcgtctacatcgaacaggagcaacacagcacacaggtggatcccaccgcaaagccaccggaatctgcataacactgtgtactagacaagttattggt

SEQ ID NO: 26549 - DNA, 1491 bp, DROSOPHILA
ttaaactagcaagcaatttaggtcgaattatgatacacagtctgtttattgtaaacagcggcggcgaggtcttcctggaaaagcattggcgctcggttgtctcgagatctgtgtgcgaatacttccttgacgcccagcgcgctgctccatatgatgtgccgccggtgatagccacgccccactactacctgattacagtgcaaagggacacggtgtctttggtcgccgcctgcaagcaggaggtgccgccgctctttgtcatcgagttcctgcatcgcgtggtggacaccttccaggactatttcggcgactgctccgagtccgtgatcaaggacaactatgtggtcgtttacgagctgctggacgagatgctcgataatggcttcccactggccaccgagagcaacatcctcaaggagctgatcaagccgcccaatatcctgcgcaccattgccaacacggtgacgggcaagagcaatgtaagcactactttgccctcgggtcagctgtcggcggttcgctggcgcagaagcggcgtgaggtacaccaacaacgaggcgtacttcgatgtcatcgaggaggtggacgctatcattgataaatccggatccacggtctttgccgagatccagggacacatcgactgctgcattaagttatccggcatgccagatctgacgttatctttcatgaatcctcgcctcttcgacgacgtttccttccatccttgcgtgcgctacaagcgctgggaggcggagcgcctgctctcctttatcccgcccgacggaaacttccgcctgatgtcatatcacattagctctcagtccgtggtggccatacccatctacatcaggcacaacttttcgatcaaaacgggtgagcaggggcgtctggacctcacgattggcccgaggaacacccttggtcgcaccgttgacaaggtgaagctggagctgaccatgccgcggtgtgtgcttaattgcctattgacgccgaatcagggaaagtataccttcgattcggtgaccaagacgctgtcctgggatgtgggacggatcgatgtttccaagttgccaaatattaggggatcggtttccattacgcccggtacgaccaacatcgatgccaatccatccgtgaatgtccagttccaaatctcgcagctggccgtctctgggctaaaggtaaatcgcctggacatgtacggcgagaagtacaagcctttcaagggcgtcaaatacctgaccaaggcgggcaagttccagggtatattgtgtgctatgatgtgtgcaaagtagagcaaacagctcatttgacaggaactacacttgaggtcttttatagcaataggacctttgagtaagcggagaagtacgtgtgttcaacagcgtaaagaaccaatgaatccaaacatatgacgttggtaaagtcacttcggcacgtgcgaaaatgcgatagatgaaatttcatatgagcaggatatggtgagac

SEQ ID NO: 26550 - protein, 422 aa, DROSOPHILA
MIHSLFIVNSGGEVFLEKHWRSVVSRSVCEYFLDAQRAAPYDVPPVIATPHYYLITVQRDTVSLVAACKQEVPPLFVIEFLHRVVDTFQDYFGDCSESVIKDNYVVVYELLDEMLDNGFPLATESNILKELIKPPNILRTIANTVTGKSNVSTTLPSGQLSAVRWRRSGVRYTNNEAYFDVIEEVDAIIDKSGSTVFAEIQGHIDCCIKLSGMPDLTLSFMNPRLFDDVSFHPCVRYKRWEAERLLSFIPPDGNFRLMSYHISSQSVVAIPIYIRHNFSIKTGEQGRLDLTIGPRNTLGRTVDKVKLELTMPRCVLNCLLTPNQGKYTFDSVTKTLSWDVGRIDVSKLPNIRGSVSITPGTTNIDANPSVNVQFQISQLAVSGLKVNRLDMYGEKYKPFKGVKYLTKAGKFQGILCAMMCAK

SEQ ID NO: 26551 - DNA, 8724 bp, DROSOPHILA
gcgcggtatgtgtgctccgctatcctcgttgtgcttgcgttttacagcaaacaaaacactttaactagccaatttaatttttatttatttatttctctcctgagaaatataccagatgtgcagaaaatgtgcctaaaaatgccattgattcgatgacaaaatggattagaactcagatagatatctagtgatgacgcaaccctaaagatttagccgagacaactatttcaaacactgaaaacaatttcatactctttggcttaggtagttacgataagtaagctttttatgcccaaaacaaaatacaaaaagtttattgtaaaatcgaacataaacatgtcatatttttgccagttgtaaaaagttttttatttcatattatattttagttttatataaaaccttagcaattctcgcctaaaactacacaataaacttaacatagcgcatttaattctcatttgtatccccaaaaaaactgtatgtgtaatgcaagcaatattatgttatgaaagactcaaagcaatatttatttgttattatattttcggttggttccgaagcgttcaaacattactccatattatgcaaaaatagtatctcttcatatttttctgggggtctactatcttttttttagcgatgtttcctatttatacataagaactaggtattaaattagattttataattaggaaaaaaaagattttgtctgcagaaaaaaacacaaggaaaatctcatcattttttttttttttgttttgtttgtttgtcttgttatcattgatggaaaatcaaaaataaaaaaaaaattaaaataaaagaattgtcttttctgccaagcgattcgagttgtgatcattgattaatccatgtgtatgatagcttttggcttgggtcaggggatgggaattgggttcgtttttggaaggggttaaaaggtcagggcttaatcacagaactaccaacggggcgttgggggcgtggccctgtcctggtctcgagtttcaactaagtagtatgatttgtgctaaataaaaataaaaaatccaaaacagaattcggaatttcgggtttcggacaaaatgatggggactaataggcagggtgattgatatatcgaacggcatatcggggggcatcatctcgtacatctggtctacttggcacggtcgtgcttggagggctccacctgcttggcaaactcgctcatcacgtccttgtagatgaccggatcaagattgcgacccagcatatagattagccaccagtcaccgatgtccagtttgcgggacagcgagcgacagatctccatcggaatcatgcgattgctggcgttcaggaggcggggtcggaatttcggcataaagataatgcagccactgcaacaaataaataaaaaaaagtgaataaaaaactatatattcgcttttagaaatttgcaaactttcgaaactaaccggaacactatcagtccgatgagcaggacgagcaggatccagaaccagaaccagatgaacacgtacgtcttctcgttcacaatgttcagcggcaggatgcagagtgagtcgtgcttctgcagcgaaccagagggaccatacttgtggaaggtgcacttggtcacccgggggaacacatagaccatgggatccaccctttgctcctgcggcacatccgaaagcttcatgatattcgtaccgtacgagaggaactcgccatcgaaaaagcgattcatcagatacatctgcacgataatgttgatgcagcagagaaattcgcaggcccagtaccgaatggcgtacagcttgtggcgctattatagagtatcgaagttcgatcagtcgtggtatcaaagttattagcactggtccttcactcaccttcacgtgcttgatcagatagtccagcagggcatcgcgtttggcctccttctcctcgcgggtgcagatcgtgatattcagacccatcacaatcatgcgcatcagtccgccctcgaatttattccacaggaatttgggcgtataacaggccatggcctaaaagcattaggaaataggattaggaaaaattacttatgcgaagtttttgcttcaaaatgacgatacaaaaaaaaaacacttgattcattcgtggaggcagatatatccatatggcaatagttcaagacaaacatttttattgaaatctgtcgaagcaattgacacgttacagctgaatttgttgcttttgtatgtgccactgttcatgtttcccaaactatttagcaagtaattaatcatatttggtatttcgcaagttcggagcacatttgttgcgcttttcccatttgtttatatcgcttgagcaatacgttgacccatagcccattccgaacccaagacgcttagtaagaccccagcatttcaagcagctacacacatttttatcagtgcatatagcactcccctatatctccatatatgtatatccacgcatgccacgcactcaattgaacttaattggagcgattgcgtctgcgtcgaagaatcgagaccacgagaatacaatagtgcacagagaaaaaaaaaaccgaggattacctagaatcttctcatgctacatcttgatatctcaatcttggaaggttaaccgagataggtgtaaatttgaaatttactcacaccatagagatatgataattgtatgtgcaattgaaacatgtgattatcaagtttcagaatctagaagtaaaatcttatgctacgaaactcacctggaagaaaagcacgaagcacacccactggtagtaggtgtagtacttcttggcatcctcgtcgccaaaatcattggccacaccgggatgagccacctctcggccaacctgaaaaaggtaacaaaaatgtgctataaataaatggagttaagaaaatgaagctggtaatctacaccccccaatcaatgtcatctccaccaaatagccacaatggaacacactaagcggacacttgagttcccagacatcgaattctcctcatggtttccctgattcaattcgcccatgtgctctgtgtgcacttagttagtgcgacttgactggtaatttgatcggctaaactgccaaaaacaaaacatatttccacgaaatcgtggcttaaggagctatcaaactgtttcctgccatgcatgaaatatgagcccaatccccggaggagctgtgcacagcaagaaatggattttaagctttcagttctctattggattagtcatacctttctggggatatttctaggtacgaagttactaatccaagagacctaagtagtagtatctgaatgcaaatctaagcaattttaatttatctgaatgtgtggttttttttcacagtgctagggggacactggagttccaatcgtgagggaattcaatttcggttttttttttttgttgttcttgatttggctcttttatccactacaaccgattgtagaaatcgcggcccgcagcagaaaggaggcagcagcagacaacgcccagtttataattgctttataggccggccatgaattatgagtgttgtactacacatatcgtatatgtgcatatggataccttggatgatgtccaaagggtcggacgtgtcccgcgtacagaaaacttgacaggcgggcaaaaaataaaaacaaaacttagccagacaagcgaatggcattgaaagcgatctgcaggagatgggaacacatttttaattgtgctggatctggaatgaagcggaagtgccacaaaggctctctcaacgaacggatgcagttcaaataggtttaaagatagccactccaaaagagctgttcaaaagtatgctacgatataattatattgaacattcaattcccatccgaatccccaactcacctgtctgcgaaaagcgtccggcatggtgaaagtgctgtggatccagcagaacgtgttgaccacgtgcggcggtacgccattgacgatgcagctaatcggctggcccacgtactgggtggcggtgatgatcaggctgcaggttagcaggagcaccgtggtaaaggagttgtgcagccggaagacggcgttgtccgtctggatgtcctgccacttgaggtagctcttcaggctacccagcaacttatacatcttggcacagtttggatctcagtgggcaaggatcaggatctttcgggagcttctcctccgggcagtgtgtttgatcttcccaaacggaaacgttgttatgctagacgcgactttaactttctcttgccggttcttgtcttgtttcgaattctcttcgccttcagctttcgatgcatatcaactgtaagcggataaaggatacaaatctatgaaaagtcttgaatagttatttataccttcatcctattcaatacgagtacaatcaaattgattcaattagacttaatttaatttctgtgtaggtaaacttagcaaatagaatgctgctatcttgctatctgtgaagtacatatcgctgattggaatactacgagatacacctcgcaattgaagttcgccgaaatgtgtacaatttcgtggtgaactgtgagcttctgattgataaatgcgcagagcgtgagtattttggcataaatcaacatcaactaatagaatcttgagacggtttcaatttcaattaaagatacatctcacagccacgacgtcgagcagccccagagatccctccatgtcggctgggaaaattgatgcgccatttaagtaaccaattgccatttgctccacttgcctgtgtggcccgctgccaactgagacggatttttgctcccgcttcggctttggtttctcttctctttttgtccgcccgagaagacacccaactgggggcaatgcacctccagtggcactggttcctctcgcgatctttgcgcaacgcatttgacccaagcgccactggaagaccccgtctcaattatgttaaatcgtttcgttttctttgtcatgcggtatttggctctttgggaatctgctcgatcagcactacattacttttccacatcattggtatattacgtgtactgtactgtcaatatatatcccttgacggcatcttaataaatccttatcatttgcaaccagaagaagaaactcgatggcatataggctcccaaaaccaactgcaactcagccatttcgcacataaattgcctccttgcgttggcccaaaagcccgccccttttttccccattcccctcaacgcttcgctgactttgccatttaggtttttaagttgcagccacatgaacaatggccaacatcctcccaccttccacctcccgtttgtacactcgcacacacatgcaactgccacttgttgttgatttttctttgcttttcctaggcattttcattgtcaaggccgtggggcccatggactgcagcaagtgttgccagttgatagacgcgtatatggtggaattttcgctgtgcaaattgcaatttgtttcggtttctaaaatggggagaaatagcgaaaagtgggcgctagttttaggtgtcagctctgccaattgttttgcgaaaaggtcgtcgcaactgcattaatgttatttacgtgatgtcgctggacaatcgtctatttcgaaataccctaaaatacccattgaaatggggggaatgctggctaagtaatttgatactaaattggagaactactcgtacatctataccaaataaataataataaataacttttagttaaaattaaaaaaggtacaccatgttcatacttcaccttttctaatttttagtgactattttacttgaaaatttatttagtgattgtaatttttcattttcctagtgtccgtacactttgttgtcgggtcttttgaaagctttaacatgcttaaccttaacatgaatacaaacacgagaactgcaatggcaattgcatttggaatctgagttttttttttttctagtctctttgttttgtttcaatttgttgcgggagtctgtctcttaaagttgtgacgtcaactcaaatgcattcgactgtacagcgagttgctattgagtcgagcgaagttgaatcattttcattagggtttggttgctgttttactggattcggttttggttagcagctggtctccagagcggaagttgcccttcgggtgtgcgtgtgtgagaaatacaaggggtggcatcaataaacacataccactcacgcacatatctacatataggttaacattatgatatttctaaagtaagatatgtacctaaatgcaaccccgtagccaaaaccaagtaaagtattgcaaccagctaattcattttgcgctgcaaaacttcaaaatgacagtcagtcattacgatattcaatgctctgtagaaagtggcaaaaactaaacttatccagagattaaacaacctgtttcacaagacccaatatttgttgtccaatcaatatggttttaagggtaaccagtttttcaacttacgtggaattcgatgataaatgaatggttttacaaatatatataacaaatacctatcggctagcgatctatttacgcggcagctggtccagaacaaacctttttggtcatccacttctgtggctagttacttgcatgcagctcgggtgggatcgtatcggatcggtttaaatagcatgggatgggatagtatggtatggtatggtatggtttcggatcgttagaatgcagaaaccgcaacgtagcgtgctcataatagggataccgggaatgggaaagagcgaaggtggctggctaggtatagtagtggccactacgtgctcctccccctatttgattccgtcattggagacacatgctcggaaacaatgagtcgccactgttctgcgtcacttaaattgaccatttccgtttggtgggggcaagaatttgttgtttaggggaaggggggcgatgttggtagggagcatctttgggatggcagagatgccatagatgtcgccgaaaccgtacccgtcagacggcgtacttctaaagcggacttctaatgtcgggaagattcatgggaaattataaggaaacgaaagaagagtagagactctgatgaggggcagatggaagtgggggacgctaataggagaaatagaaaaaaaggaaatgagaagaatggtggaaaaacaagattcatgagactttgggaaaacttagagtcaagaccaacgtttgaagtgataaaacactgtaaacacaatcgtaaatcatgacaataaaaactcatatttaaaatatcataataaaatctggtaaacttccagttgagcaaaattacatttgcaaacaaatctttgtatcgtggcaagataaattattgctaactataactgacgtagtgacccaaaacaacgactacgattgttgccccatcgtaaagagtagtttcagttttaagtaaagctgtcatttaacaatgctgatgatatacctactattattacgaacagtagcataatagtttcggttttagagttctggtagaaccgacaatatcatcaagaaccctgaatttaaagcgctcggtagagactcaaaacgtccttgatatcacctgactttcgacgactgtcgatcaattccaattggctccaaggggctttaatcaaaatgatgcctcggggctgacatctcgcttaatctcgggggatcgtattatagttatacaactaatcccactgtctctatctctatccctgtcgcccaggtgggctttctcgttcttcagaagtcatcggtgttattcgaaagctcggctcgaaagcttcttctctcgattaggcagctttcgttggcaagatgaagaatgcattcccccgcatttccccatatcccccagatttgtttttggatatttttgattacgtttttgtgatagacttacgcagaattccgttgtcttgtcaggctcttcttctggctttttgttttgctgctcttctttatatttttgattttttgtcagagcatggcgcgtgtgtgtgtttgttttgggactgcttcctcttctttaaatttttttgttttattttttgaatcagctgccaggtggccgtagaatttgcatgaaacaggttctcgaatgcagcccacagggcctcaaacaatatattttcgaaaaatgactgtcaaaagaaaaaaccgcgcacacacactcactgcaaaaaataccaacgcaaaatggaaatttccaaaaaaaaaatgtatactttagtttctttaagcaattcggtcgtattccgtttgtcgtgtacaaggggttttcacgattttcgctgtgtttcgaaattttcttataattttcctgtgttttcgagcgccgcgtagacgctcgcaatggcttttgtagcacgctgtcgccgtcgccgtcgactgccgcttggttttcaaatttcacagcaaaactcaaaacccattccattctcattccatttcccattccgcgccattccgctctccgttccaagccgtgctctctcgctgcgctcgcagcgaaacagctggctatgaaacttcaattactagcatgcgtaagcatttttgattttacgtttttaatgaaaaatgagctgagagagtttctgttttttaattcgctctttttttccaactctctcttgtgctctcgctctcactctctctcccgctctccacatttgtttatttaaacgaattaaggcttaaattaaa

SEQ ID NO: 26552 - DNA, 1565 bp, DROSOPHILA
agatagagacagtgggattagttgtataactataatacgatcccccgagattaagcgagatgtcagccccgaggcatcattttgattaaagccccttggagccaattggaattgatcgacagtcgtcgaaagtcagttgatatgcatcgaaagctgaaggcgaagagaattcgaaacaagacaagaaccggcaagagaaagttaaagtcgcgtctagcataacaacgtttccgtttgggaagatcaaacacactgcccggaggagaagctcccgaaagatcctgatccttgcccactgagatccaaactgtgccaagatgtataagttgctgggtagcctgaagagctacctcaagtggcaggacatccagacggacaacgccgtcttccggctgcacaactcctttaccacggtgctcctgctaacctgcagcctgatcatcaccgccacccagtacgtgggccagccgattagctgcatcgtcaatggcgtaccgccgcacgtggtcaacacgttctgctggatccacagcactttcaccatgccggacgcttttcgcagacaggttggccgagaggtggctcatcccggtgtggccaatgattttggcgacgaggatgccaagaagtactacacctactaccagtgggtgtgcttcgtgcttttcttccaggccatggcctgttatacgcccaaattcctgtggaataaattcgagggcggactgatgcgcatgattgtgatgggtctgaatatcacgatctgcacccgcgaggagaaggaggccaaacgcgatgccctgctggactatctgatcaagcacgtgaagcgccacaagctgtacgccattcggtactgggcctgcgaatttctctgctgcatcaacattatcgtgcagatgtatctgatgaatcgctttttcgatggcgagttcctctcgtacggtacgaatatcatgaagctttcggatgtgccgcaggagcaaagggtggatcccatggtctatgtgttcccccgggtgaccaagtgcaccttccacaagtatggtccctctggttcgctgcagaagcacgactcactctgcatcctgccgctgaacattgtgaacgagaagacgtacgtgttcatctggttctggttctggatcctgctcgtcctgctcatcggactgatagtgttccgtggctgcattatctttatgccgaaattccgaccccgcctcctgaacgccagcaatcgcatgattccgatggagatctgtcgctcgctgtcccgcaaactggacatcggtgactggtggctaatctatatgctgggtcgcaatcttgatccggtcatctacaaggacgtgatgagcgagtttgccaagcaggtggagccctccaagcacgaccgtgccaagtagaccagatgtacgagatgatgccccccgatatgccgttcgatatatcaatcaccctgcctattagtccccatcattttgtccgaaacccgaaattccgaattctgttttggattttttatttttatttagcacaaatcatactacttagttgaaactcga

SEQ ID NO: 26553 - protein, 362 aa, DROSOPHILA; identical to SEQ ID NO: 5163

SEQ ID NO: 26554 - DNA, 9079 bp, DROSOPHILA
gcgtacacgctcccattcctcctgacgtctctgcctttgctcggtcgcctcagcttcagtcacaaagcccgaactcatgctgtactttcgtaaaattgctcttttttacagaccacaactattgccagtgtggtgaacgtcgaattagcagctgtgcgatgatatagaagtgttggtagtggctcgtgaaaatttgaactagtggcgggaattgctaatgcttctgtgtcattttaagttaaacgttgaaaaactttccaagtcccactaaaatgaactatccttataaactcttttaatatgacagcgccttactctaccaactggaacactggggcgaccacgggccctaagcctggctcgatttatttcggctatctgcacaaaaactgatttttgggcggttgtcatttctcgccattttctgccggctattttggccaaggaaatcggtttcagatggcaaatgtcccgcttttgaagattaatccgaaagtggtcaaagaaaataaagtagggattagcggatgggaacttgcttggtcgcattgtccatggtaaaggcgagacactcatccggaacattctgaaattttgaaaattcttcctcaggtaaatcgaaacaaatacccttcacatgaaaatcactggttacatgactttatttcaggaatatctcaataggaaacatctatataggatggggctttgctaaattctccaataaagagctacaggattagcaaaatacacgatattcatacacacatatgcaggcgttttaggtgaagacggtttctcgtattttgtttatacatccataaattctcggttcgtccgtttccaatgtatatacttagtttatagacataattgaggtcagcacacttacaacgaacagcaaataggtaatacgactgattctgaacttcgccgtgattgagtatacattataggataatactgttaggattgggtccggatcatgatgtatccgaatctacaggatgctgcaggagcttttctcgcgaaacggattcaccttctgtgtgaagccgctgagcaggcagtcttcctcctcgtgctccaacatgtacttcatcatcaaggagcatgccaccgagacgggcatacgctccatctccacttcccgccgtagctgcaagttgatggagcgctgctgttgcaaattagcagccattatgtccaggacggctgtctccgcgagacctatggtggttgctgggatgctaatactgctgtaatattgatttgattcaatttgagttgtgcttatttcgatttccccaatattgtaagcgagaaatatgcgctctacttctcgatgaaatattttattgggggcgctgaaaaatcaatatttataaaaagtgtgaccgcgttgagaatggtgctttagttttccgacttttgccagccgttggtgaaagcttcttgttggtgtggggaaagatttcacagtttttgaatcttggaataactataagctttcataaattgtatcaatatatgtcctattggctatagattttttttatcaatgttttgtacaccgtttattttatttattgcaaaaatatatagtttacaactgtttttatttaaagttaattatgtgagcatgctggaaataaaaatgaaattatgagtaaaattaattaggtgatgtttctaaaaacttactctggcataaactctgtcgactgcttagcatgcgcctcctccggattcaggttcaactccttggtaatgtctgagtccggtttccggaatgcattggccataatcagaatgttcttggctattcttttctgatcgattcgcttttgagccgtatctgtccgtctattagcgttctccgacatccgctgctctattggtaaatctggtcctggtggagattggagcggttctggatttgtccagatctcagtgccaggtgtttcctttcctgtcgttggggatatggccggacgtgctggtatcaatggggaacgcacacagactctgtaaaagaatattaataaacattaaatcataatttaatcatagtgtttttactttgtaatgaaaaatgtagagaagctacgagcttcataggaacaaaaacaaacttttattacaaatccttacatgactagtcacactcttggcttgtttttttttaacatttacgaatacattttacataaaactggttaaaaagtagaaaacattcgatatatgtatataggtaatatttcactccttattcggctggaccttctggcttggctcactgtcctcattcccgttcggattcgacctagaacgagtcagaaatgggagagaacaatgagccagtcctggagaaggaatcaaaaaccagttcaagacttaaaactatcgttccgacccgaattcaacatgcaaagcatcccacttacttattgacatcctccagcttcttaagcaggcgctcgttttctcggcagactatctcctgatccctaagaatggtttcccgcacggtgaacagatgattattctcctgcctcagggattcgttctccaccatgtatagcttaacaagctcggcgagttcggagccatcaagctccggtaatcgctgcaaatcaactttgggcactggtactccgccaccgctgctaactcgatccagttgaagctccagaagattctcaaccggcccaccatttggagctgcttgatgatgaagattcaatgccgccttcaggtgatcgttctccatttggagtgcatggatgtcacgctttagactgagaatcagcgcctccctcggatccatctttatcacgggcttggtgcgtatcctcttcgcccgcgacgcatatcgcagagtgttgagggtttccgcatgattatagtgggcgggggaaacgcaagcgatcatcaaggtgacaccattccccgccagactgtcggccagtagcttggtgagctggctatctcggtacggaatgtgacccgtccttttcttggaatcgctcaacgaggagatacagtagccgaggaccataaggctcttgtttatgttgttggcttcctctagggttttcccttcgctcatcgtcttcttggttaactcactgccagccaggtctacgaagttaatctttccgtgcttggaaaggaacaccccaccgtccgtctgctgatcggataggatgtggaccgtcaatattgtatgagaacgtgaggagtggtcgttcatggcatgagagccaacagcacgatttctcatacctaccataatgacaatatagaatgtgagcaaaacaactactttatgaatgtatgtacatatgtataaatactgcttaccttcttccagtacggccagaaggtcatccaattcttcgcagtccaccgtgaaaaggttctccacgaagaaaccacccgatttcttggaccagcgcaccgccaacggttttcgtgcacttcccgggtttagcaaatcgattacctaggggattgataaaaaatgcaattcaatttgcgaaaccaatatggaaatggtgggtaggctaagaaaacaaatcaatgaaatgccacgcaaaatgcagaaacatttcacgcatagtgacaatccacgatagctggattgactaccagtctgtctgttttcggtgggtggagcgtactgacatccatggatggatggaggtcagtggaatgcatgtttgcggacaagcaatcggtattatggcaaatgcaattaggatttaaattgatattgcagaggtcaatccaaattagaggtccctcgttgggcgccacttacccgctcattgtagatttccatgaaggaggcttttagcacgtaattgacgtccttgcgattcttaatcaattggaagagatacaaaaacgagcggaagatgaggccatgacgcggatccttgggattcggcttgccaacgaacttaaagagaaaagaaacaacttaggatttacggattttacaagtctgtcagacctggactgaccaaatcggggggtccagtgagggtgtgcgttttgccggatcccgtttggccgtaacaaaaagccgtgcaactgaaaccctcgatgcccatttcaatgatgcgctttatacccgagtagtccagaatatcctcctgtgtggctcccggctcaaataccacgttataggtgaaaacccgtacactatcgcgattatgcgaccttttctggcccacatcgttgccttcaagctgcagcggattggtttaagcatcatgttgaaatgctcgtaaaaataatacgtactataacctggccgtttccaggaaactgaagcgtggacccatgtcgatcccttttctctttgtcgtttaaaggacgcactcttacaaccacgttaatattgtcctccggcgttgagcactcctcgctgcccgtggacttggaggccacgatttccagcgtgtcagcgctaccaatcctgagaagatatattttaattgtatttaatgtcccatacattacttgtacaatatattgtagcaattaatcaataacaagtaacacgtatatattttaaggtttcaaggatatggttgcttaactatgatgccaaatgtagctcgcaattaacggaatcacaattaatcaatcaaagtgaaacaaagctcccattgttttatgagctccatttgctgtgggccctgcgaatttccagaatttgtggatttgccttgaacttgatggagctcacacttcgaccggcctattattagtcaaggttaagggtggatggtatggcgcgtgacttttgggttttttctgatttatttgaccaccgcatcgactaactcactattgtgaaggtgagctaggagtcgcaggtcccattccaattgaattaacgaactcgcttcggaggaatttaatcgcagctttttggaaatatggtaatatgaagcaataaattattgataaggattccaaaaacttttggtttcacttgctcgctaacccagtaattatccagaaaatgtaataatctctaacaaagcaaacgaagtttccaatacaaacggtttattgaactgcaaataggctggacaacacggcgtatgtgcgatgccccatcttggcgtgattgtatgtggcacacagctgacatttaacattttcacgtaaatgactcgttaaacattcatgccctaatggccatacttcactctactattattaatcagacatgagttgggcctgctgtggtaaatatgtgcacttggtaaatatttcataaggcgccaatagaaaggaattaacacgaagccccaaagtgccgacttgaggagctaacgccaagaaaagttcaatcaacttttggtctagcccttaatatttaataggccaatataaccactacaaaggcttaacttaaagcgaaagttttgattttggttacaaatattccttgttacccagaatggactttgcaatacaccaattaatattccaaatcaattacagaaatttgttttatcgcagacaattaatagccacacaaaaataaatgcaatatgaaatatacatttcatacctgtgcaaatggaagcctactacttgtaagtattgttgatatttgcatggggtaaatatttttccagcaccgatttaaaagtaacgagaaaatttaggctaaatcgtatgagcaataaaaaaaatgggttttcctcggccacttgtttgccaatcaaataaactgtagcgagtggacaaaaaaaaccaaactctcacttttatttcccgggcatagaattcgaaacctattccgactccgaggcaaccagagccgctagtaggagatatttattagccatgcgaggtttaggcaacaaaatgtcaggtttgattatctgcggagcgtaataatgacctaactcgtgttgtgcatgccagaaaatccatatatgaatttgaaaagtataaaatcccacacggatatttaaactgaaacttccgactgccacgtaaattcatgtgggttgagcactgtagggaaattgcctatatacacatatactgttccacatatggattgtacatatgtacatatatgtttatgactgattatggcaccactgtcttcgatgtgtgtcgtcaatcatacggctatcaacgcattaattaatcaaaagactgaaacacatgcgtgcttcaaaataattataacgcccaccattccgttagcctggtgggattaatcatatcgtatctcttaaataaatttcggttccgtatatccctacaattcattaaattactaagtgacaaacgtaggtgtcaattttgggtatatttactcaaattaatactcaatagtttggaaatttctgcagacaatgataaatctaatggtgcattgcgattgtctgtattttatggcaaattgtagccttagttcaaactttctttttacccttcaatcacctgtgcttcgctaaattattaatgatccttccgaaagcgaggcaggtccaaaactagcacttaacccacttgccacttgccagagcgctaggaaactggggtccttaaccttaactccattgtgtcttctgcacctgaacccgcatcgaatatacaaaaaaaaaaaaaccaacatacacaaatgtgtcactttcgctctcgactccggtcataccgggcatacagacatcgggcacagctatagacttcaatatggtttaattgcaaaatcgatttgtgtcgtgtgctcgttgggtatccaaacccctgatctgtgcccatacttcctccgcttgctacccacagagagtgtttaaatggaggccggtcagtctggctaacgtggtggtcgtccgtttgtctgtccgcttgattgccgcctgtccgttcggctgtccgtccgttcgactgtctctcttggattattgtgcgtggtcattatggttgggtttgtgactttccgtcattttcgttgcctcaagggtttttaatggatcgcctgttaggggtgagctactccggctcccggcctgtcgtgttatcattaccccgacctccgttttcgatttccgccctgccacacgttctgatgcaaattaatacattttctcggcgactccttacagaaatgtttaataaataatggacactattccgacttggctcttagtgttcctgtgactattaaacctccaaaagtacattttcagtggccaaaacaattaaattgttttacctttaactctcttctaaaataattttagaaaccaatatttttcgaagactacagtttaaggattatatgtatctatttttaaatggattgattgaatatttgatttatggctctttactgtttacaacttatcgcctattgattacggtgggaagcatcgccgcaatccttatcccacactacttactcattctcgcgtgaacgcaggaaatacggcgtattgcgggagctacctcctcctccaccggtgccaccgctactgccagtccccttttgtggactaagacgacgcatgccattggtcagacttcgtgatcgtggcatactgctgctgctgccggaactctggcgctggctctggccggtggatgtggtcgagggcgtctttcgtccgcgggagccagccaccggagcccgaccacgacgactgcccgacgttccggcgctgtccgcactgctgccgccactactattcagatgaggaacactcgatgcccggcgaaccatggtcacctgtgtggatgccaccgaatgggcaaaagcgggatagggggtcgattgtttgctcagcactaggatgtcccgtggacatggcactgtggacacgcaggtctactaatattcaaaaattccgttcttcggttgtccgcgtttccggttaaccgctcgccgcgaaaactcaacacgaactggctggccaagttcaccagagcagccttttttattcgagccttcagatttatggtaatttctacgcacgcacacaactggccactggccaccagtggtcaccacctacccaaccatatacccatacaggcaacgtagggaacacccccggcaccacctgtaattgaactacgttgtggttgttgctttcactcgccaaaggctctcgcccggagcgactccttcccacaacagcaattaaatctacgtgctgtttggtaaacaaaccgaaactcccctgaacgaggaaggtttctgaatggatgggtggatggtgggatgaccccactgctgaccctggcgccattcgtgtccattcatcgtgcgcaactacaacaacattagccgccgggaacgtggcattcctttccaggatattaaacccacagtccggacgggtgggttaacgagtattggccacgttagaggaatttctctgaaaggcgaaatccgtaatgttaactttttttcgccaattattaattcgaaaaactgcttttagattagctcacaaaatcggtacaaagctagtgatattctactggaattaaaaaaattgattccatattccatgtgacctttaataaattgcaatttattattcaaaaggcccatccacctgcttcacttttagaacaaccaattatttatccaaatgatccgctcattaccttataaattgatgaactcatattagacccaccagcgagcgagtgaccaaacaaattagtacaattcgttttaataattgtttttgtatacgtctcacaatgttgcatgtttattttttcataatccattgcattccgatttgcagctggctttcgattttttgttctaatcatagtcattacgtgtatatatatgtataattagttatgaactatacttgggactgctatttataggtgtataacctatttcctaagtgtttatggtgtctatcttgtaatctagctattttacaaagtgcatacgaaatatgcagccatcgatatttacaaacgatttaagcgaatatagaaatgtatatataatgggatactcttcttgcgaatatttatattacaattagcttagcttagg

SEQ ID NO: 26555 - DNA, 2535 bp, DROSOPHILA
atgggtatatggttggtgccatgtccacgggacatcctagtgctgagcaaacaatcgaccccctatcccgcttttgcccattcggtggcatccacacaggtgaccatggttcgccgggcatcgagtgttcctcatctgaatagtagtggcggcagcagtgcggacagcgccggaacgtcgggcagtcgtcgtggtcgggctccggtggctggctcccgcggacgaaagacgccctcgaccacatccaccggccagagccagcgccagagttccggcagcagcagcagtatgccacgatcacgaagtctgaccaatggcatgcgtcgtcttagtccacaaaaggggactggcagtagcggtggcaccggtggaggaggaggtagctcccgcaatacgccgtatttcctgcgttcacgcgagaatgagattggtagcgctgacacgctggaaatcgtggcctccaagtccacgggcagcgaggagtgctcaacgccggaggacaatattaacgtggttgtaagagtgcgtcctttaaacgacaaagagaaaagggatcgacatgggtccacgcttcagtttcctggaaacggccaggttatacttgaaggcaacgatgtgggccagaaaaggtcgcataatcgcgatagtgtacgggttttcacctataacgtggtatttgagccgggagccacacaggaggatattctggactactcgggtataaagcgcatcattgaaatgggcatcgagggtttcagttgcacggctttttgttacggccaaacgggatccggcaaaacgcacaccctcactggaccccccgatttgttcgttggcaagccgaatcccaaggatccgcgtcatggcctcatcttccgctcgtttttgtatctcttccaattgattaagaatcgcaaggacgtcaattacgtgctaaaagcctccttcatggaaatctacaatgagcgggtaatcgatttgctaaacccgggaagtgcacgaaaaccgttggcggtgcgctggtccaagaaatcgggtggtttcttcgtggagaaccttttcacggtggactgcgaagaattggatgaccttctggccgtactggaagaaggtatgagaaatcgtgctgttggctctcatgccatgaacgaccactcctcacgttctcatacaatattgacggtccacatcctatccgatcagcagacggacggtggggtgttcctttccaagcacggaaagattaacttcgtagacctggctggcagtgagttaaccaagaagacgatgagcgaagggaaaaccctagaggaagccaacaacataaacaagagccttatggtcctcggctactgtatctcctcgttgagcgattccaagaaaaggacgggtcacattccgtaccgagatagccagctcaccaagctactggccgacagtctggcggggaatggtgtcaccttgatgatcgcttgcgtttcccccgcccactataatcatgcggaaaccctcaacactctgcgatatgcgtcgcgggcgaagaggatacgcaccaagcccgtgataaagatggatccgagggaggcgctgattctcagtctaaagcgtgacatccatgcactccaaatggagaacgatcacctgaaggcggcattgaatcttcatcatcaagcagctccaaatggtgggccggttgagaatcttctggagcttcaactggatcgagttagcagcggtggcggagtaccagtgcccaaagttgatttgcagcgattaccggagcttgatggctccgaactcgccgagcttgttaagctatacatggtggagaacgaatccctgaggcaggagaataatcatctgttcaccgtgcgggaaaccattcttagggatcaggagatagtctgccgagaaaacgagcgcctgcttaagaagctggaggatgtcaataaagtctgtgtgcgttccccattgataccagcacgtccggccatatccccaacgacaggaaaggaaacacctggcactgagatctggacaaatccagaaccgctccaatctccaccaggaccagatttaccaatagagcagcggatgtcggagaacgctaatagacggacagatacggctcaaaagcgaatcgatcagaaaagaatagccaagaacattctgattatggccaatgcattccggaaaccggactcagacattaccaaggagttgaacctgaatccggaggaggcgcatgctaagcagtcgacagagtttatgccagacagtattagcatcccagcaaccaccataggtctcgcggagacagccgtcctggacataatggctgctaatttgcaacagcagcgctccatcaacttgcagctacggcgggaagtggagatggagcgtatgcccgtctcggtggcatgctccttgatgatgaagtacatgttggagcacgaggaggaagactgcctgctcagcggcttcacacagaaggtgaatccgtttcgcgagaaaagctcctgcagcatcctgtag

SEQ ID NO: 26556 - protein, 844 aa, DROSOPHILA
MGIWLVPCPRDILVLSKQSTPYPAFAHSVASTQVTMVRRASSVPHLNSSGGSSADSAGTSGSRRGRAPVAGSRGRKTPSTTSTGQSQRQSSGSSSSMPRSRSLTNGMRRLSPQKGTGSSGGTGGGGGSSRNTPYFLRSRENEIGSADTLEIVASKSTGSEECSTPEDNINVVVRVRPLNDKEKRDRHGSTLQFPGNGQVILEGNDVGQKRSHNRDSVRVFTYNVVFEPGATQEDILDYSGIKRIIEMGIEGFSCTAFCYGQTGSGKTHTLTGPPDLFVGKPNPKDPRHGLIFRSFLYLFQLIKNRKDVNYVLKASFMEIYNERVIDLLNPGSARKPLAVRWSKKSGGFFVENLFTVDCEELDDLLAVLEEGMRNRAVGSHAMNDHSSRSHTILTVHILSDQQTDGGVFLSKHGKINFVDLAGSELTKKTMSEGKTLEEANNINKSLMVLGYCISSLSDSKKRTGHIPYRDSQLTKLLADSLAGNGVTLMIACVSPAHYNHAETLNTLRYASRAKRIRTKPVIKMDPREALILSLKRDIHALQMENDHLKAALNLHHQAAPNGGPVENLLELQLDRVSSGGGVPVPKVDLQRLPELDGSELAELVKLYMVENESLRQENNHLFTVRETILRDQEIVCRENERLLKKLEDVNKVCVRSPLIPARPAISPTTGKETPGTEIWTNPEPLQSPPGPDLPIEQRMSENANRRTDTAQKRIDQKRIAKNILIMANAFRKPDSDITKELNLNPEEAHAKQSTEFMPDSISIPATTIGLAETAVLDIMAANLQQQRSINLQLRREVEMERMPVSVACSLMMKYMLEHEEEDCLLSGFTQKVNPFREKSSCSIL

SEQ ID NO: 26557 - DNA, 3087 bp, DROSOPHILA
cacctcgttgtcgacgtccacctcgagcagctcctcgcacatctgggtgcacagatcgaacctctccagctcgtacgcacactgtgccgaccgccagcgggcctttgtgtagtctggcttgtagaacagagctcgctgggcgtcgctcagcgaggatctgtagttcttgatgaagaagtgagccgccgagcggttgttgtagagaacggctagcacgtcgggattgtccgtcttggtcttgatgccctcggtaaagctgtagattgccatgcggaacttcttgtgcttcatgtaaaagttgccatcctccttgtagttgagcgccagctcgtcgcgcgtgttctcctccggatcgtacttgagcttctgcagaccctcgaacatcggatgcacgtcatcccctggctgaggagcacgtttcatgaagaacgggtgcttgtccatctcctcctgccagcggtcctccggccagccctcctcgtaacgtttcttctccaggccatcgataaacgcatccagttccgcgtccagctgggccgccagctccagacgctcctcatccgtccaggctttttgtgccgccatttgtttcatttggtctaatcagaaacagtgtgaccgcagacgaaccgttacaatataccaactggccaaaggtgccgcacatttcctaaaggtggcgcctctaaaataagggtggccctccgtctatcgatagtcgtacgcttccttctttaaacgagctaaactcggaacgaattatgatcttaacatcttaaatcttaacatggtaaaactttaagccttttgacgctttacgcagctgttgtgatatatcagaaacatcgatagtcgccataacatattgttattgtatgagagttttaaaattatcgatgcgctgatgaccccttcatcggcgttttcccacccctaattggcagagacgcgactgagctgggacgtaccgttaccgttggcagagacgcgactgagaaataaaattaaaacgtcgacgttccttcctcgtagaagaaaccaatcaaaataaaaacaaacagagcgtgcgttcgcgccaaatacttaacaacaattagcaaacaaattactgtcaccagcgatgcacagctggccactgccgtgggcaaggaccaaaagccatacttctacgagccgccgctcaagcgagagcgcagtgaggaggagcacagcgacaacatgctcaacaccatcaagattttccaaaacaacgtctcgcaggcggtcagcgccgaggaccagtcgttcggcatggtagtcacggacatgctcaacacgctgggcgtgcgacaaaaggcagaggcgaaggtgcacatcatcaagtatctgacggacatgcagcttctggcacagcacaacaagtactaactgtcgggcggctgtcatcggcagctgctgcagctgctccaactggagagcgttctgccctgagatcaaacgagaacagacccacggctacccacatccacatctacacgggtttgggggtcctgtgcggtcattttctacagttcataggtcttaaagtcaaactacagaataacattagacgtaacatcccacagcgtaaaccataacgcgtaatgatacttccccacgcccatgtagacaaacatatatatttatatgcttagttgaccccatgatcggtgatttaattcgcgcccagttctcagctctgtacaaaaaatgcgattgaaaatagcgattctagaattatgagtagcttgttaaaagaccgtggaaacactttatatgcagcgtattgtaaattttgactacgatttagttgtaatttgccatcgggtcttagctctaaaactaagtatacacgtaaaagttattttaattttataagttctgttgtaatatgccgaaaacgcttgaaagacactttgaaatgcttaattaagtgtgacaaagggaaacataaaacacctttttcatagtgatcgcatattacacactttacatggatacgagtaaaatcgaaatagttgccggcaacgccagttgctaaacatttttaatgattaattgtgcaattatttggtattaaatgaaacatttgaaagtaaccgactagtttcaatcggggtgatatggcaacgccgcgagccagcggcataaacaaaatcagctgtgcgggctaatgattgattttatgtaattgaaatggccacaaaatcggataatgctgactcaaaatcggacaaatcaaaggaatcactagatgacgcatgggcagtaagtatccagctacgttaacagatccgagactcaggaatcccctttacagatccgaccctgtcatctgtacaaggaggagtacgacgactgcacgagttttaaggcgcgcttccaccagtactttatatttggcaaggacacagattgctcccaatggctaactgattaccgtaactgcgaacgatatcagcagtccaacgggaacgatgtggctgccggcaaagcggtgattaaaagcgaggaggagcgccgaaggatccgcctgcgcgcccactttgccaacgacacttggcagaagcgtaagaagccaccgctggattgggctgctcctctgccggactggatggagaagcgaaacgagaatacctatcttgagcttaagcaaaaagagctctctggacaggcggcgccgcaaggagaggaacgctcgctgtgcacgatcatgtgaagataaatagtaaattattagttaagaaaagaaggaagttgtttcattgttcttaaaagatttcagtttttcagcaatggtttctaataatcggcggtctggcaacgctcgtgtcagctgtatttgtttctgatagtgctgctacatttattaacatttattacatttattattattattgctttcattaaacacgtaaagacacatttttcttataaaactcatttgctttcaaagtctaggtgtttgtattacgaatcaaacaagttgtgtaaaatctaataaacgttagcagtggtaatcggtctaagaacagtaatgctgagaataggtaatctagctaaaaaata

SEQ ID NO: 26558 - DNA, 1570 bp, DROSOPHILA
aaaattaaaacgtcgacgttccttcctcgtagaagaaaccaatcaaaataaaaacaaacagagcgtgcgttcgcgccaaatacttaacaacaattagcaaactgcataccctcacggcggccattgagatggacaagctggatgccaatcttgagcagcagtttgatctcaatctcatcgaggctgtcaagctgaacccagtgatatacgacaggtcgcactacaattacaagcactttgtgcgcaaggcccagacctggaaacaaatcgccgaaacgctcggtgtgcctgaacaaaaatgtacgaagcgctggaagagtctgcgcgacaagttcgcccgcgagatgaaactatgtcaggaatcgcgctggcgttacttcaagcagatgcaattcctggttgactccatccgccagtatcgagagtcgctgctcggcaagtgcgccaatgggagtcaaagcgccaaccaggtggccgatccgtcgcagcagcagcaggcgcagcaacagaccgtcgtggatatatttgcacagcccttcaacggcagcgccacaacctcggcccaggcactgacccatccgcatgaaattactgtcaccagcgatgcacagctggccactgccgtgggcaaggaccaaaagccatacttctacgagccgccgctcaagcgagagcgcagtgaggaggagcacagcgacaacatgctcaacaccatcaagattttccaaaacaacgtctcgcaggcggtcagcgccgaggaccagtcgttcggcatggtagtcacggacatgctcaacacgctgggcgtgcgacaaaaggcagaggcgaaggtgcacatcatcaagtatctgacggacatgcagcttctggcacagcacaacaagtactaactgtcgggcggctgtcatcggcagctgctgcagctgctccaactggagagcgttctgccctgagatcaaacgagaacagacccacggctacccacatccacatctacacgggtttgggggtcctgtgcggtcattttctacagttcataggtcttaaagtcaaactacagaataacattagacgtaacatcccacagcgtaaaccataacgcgtaatgatacttccccacgcccatgtagacaaacatatatatttatatgcttagttgaccccatgatcggtgatttaattcgcgcccagttctcagctctgtacaaaaaatgcgattgaaaatagcgattctagaattatgagtagcttgttaaaagaccgtggaaacactttatatgcagcgtattgtaaattttgactacgatttagttgtaatttgccatcgggtcttagctctaaaactaagtatacacgtaaaagttattttaattttataagttctgttgtaatatgccgaaaacgcttgaaagacactttgaaatgcttaattaagtgtgacaaagggaaacataaaacacctttttcatagtgatcgcatattacacactttacatggatacgagtaaaatcgaaatagttgccggcaacgccagttgctaaacatttttaatgattaattgtgcaatta

SEQ ID NO: 26559 - protein, 253 aa, DROSOPHILA; identical to SEQ ID NO: 25149

SEQ ID NO: 26560 - DNA, 7491 bp, DROSOPHILA
tcggttccgaagtagcttcttataacttctaatttgttgggattttacaattttttttgttggatttttctggtagatttcgtgttgctaatgtggttgttgttggtatgagtttcatttgcaacattcgtctacggtttttgggttctgcttgcacgacttttgttgtgggtattcttgtttgttggtttataattttgctactacaatttcttgttaatattttatacataatatatatttatatatataatattttctttactatacaataacagcggaaaaagtgtgtgttgtggttgttgatttgcagtattttttagtttgtcgcattacattcattcacatgatttgtattgtttcgtacgttttataacaactttctcgtgttaatatgtataattgtttatgatttcttgttcttgtttatatatatatatatattctgtatatattatgtatatcaataccgtaattgtttgcattaccatctgttcttatcacaaaaaatcataattatatatataatttattattattaatttttaatatattattcttagaattgaacaataattaaaaataaacgtaggacttagttacattttgtatgtgtgtgtgtgtgtgttggttttgtgtgtgtgtgtgtgaatgattgcatgtagttggtttccgcagttgacgataaagtattgccaagcgtccgcttgccgtccgaaatccagaggcaccactgtactgggcttccacccccaccaccaaagaagggggcggggcgcgcccaaacagcggcaatcggacaagagcggtacgttgccgcaccggatgacatcgggcggtagcattgatgttgtggttgctgcttgtttgtttgttgttttggccctttcgctaaatttgttgatctgaattggttgcagccgcgtcaggctcaatgcaaatgtacaaagtttcttctgacaattgttggttgttgatttctttacaattttttctttttgtttaacgaactttacatatacactaaacattatttaataataataatggaaaaaacaaataacaaagagcacacaaaattgtggagcgcaaaataaaaagtaaaagagcaggatttcttgatatagcaaaaatcataattattacatctttatgaacttaattgcaaattgttttcctcgtgtttaagactgattttgaacggaaaataactaagctaaaccacgcgccagcgaatcgaggtaaactgaacaacaggtgcaaatcggcggccaccaatgggcagtgcgtggcggagatcctgcagtccggcaggactggttttggttgttctccctatgtacaaacggtccacgccgggcttgcaccgcacacgcactgttgtggtttttgcttgttggaagttgcatgttgcacgttgctcattggcttgacacaattttacctgctcctcttgaagctgctgctgatgttgatgtggctgctgttgaccgctgggcgccgtttgtctatctgttgttgttgtgtgtttgcattgattgatttatttcgtgtacaggtaaatggccacaatcaagccgtagagacccaacacttcggcgaagatgagaatcaggatcatgcccacgaacagtctaggctgctgtgctgtgccacggacaccggcgtctcccacgatgccgatcgcaaaaccagctgccagaccagagaagcccaccgccagaccggctcccaagtgaatgaagcccctggacattgacatagttagtaagttgaatcgtacgaggtagacaatcaataattacctgtatagtgagtactttgatggctcttccagcgcgccggcaataagcacagccaccaccagaccgtaaatggcaatgatacccgccatgaccacaggaatgatggatttcatgatcagttcaggccgcatcactgacatggcagcaataccggtaccagacttagcagtgccataagcagcgcccagggctgatgaagaaaatcaaatgcataacaattagttttgggcaagcttttctatcacaaacatattaatgtggcagttttctagtgatttgaccaggatttatcccatagctacacctaaatacgatatcaaggaatcgcccattatattggacttcaagcgcgattttctaattatgccagaacatttaacattatgatgtaactcttaaatttgtcagccattcgagcgctggccaaccgaatactcttcgatacccttgctccaactttggccgcgggcgtaacagtttgcagtcacatgatcgcttttaactgacgttgtttgtttcataaaaaaaaaccccaaagtccctccacccgcaaaagtgccactcattgcccagagttgagtttcagctggagagcaataaaactcgctccgctcacattccaaatcgcctctccccgcaaatcggcgggttttattactcgctctctctctctctcgaaaagtcgggcaaatattgataaggccgagctgaagtacatagtataaacggcaggtttccgaggggggccagctgaactcggatcggtatctatcgagcaggcaggtgggcagaataacccagtggcgagagattcagcttattttgtgtatcgatggggcattaattgaagtacaaaaccagtttcatgtgacggtcaactgaacgttcgtgtgttcgtgagagactaataaatcgaattaagccgcacgcacaccaccaactcagctgagtgttcagatatatgggtgtattcaaagctggcggagcgggagagcagatatccaccgagtcatgtgattcgatgttaattacttactttccgcctcgagccaagaattgctgatattcgatttggaagacagcagcgcacttcgggaacacataaagcgcaccgccgaatcgaatctaccaataatcaccataacttatgggcagttctgctcttgatcaatgtcggctggcgactatctacgtcactaaacaggaaaatgatgggaaatgcccatgataaaaaccagaatgaacttgaacaagcaattggttagagccacaatagatatctacgcgcctagcaccagcacacagaaatctgtgaggtcgaggttgtcgtcacaaaagcacgaacacacatcctcaaaaaagcagattcctctcaagcacaagtacagaaatattctggtgcgtttgtggcccgtattgcgtgaaatggcattaacattataaacatttatttatcattgaaagcctaacataggctgttgacccagtactttctccgattgcttacaacacgtggttttcctagactatatgcacaaacaaatgcatagctatcgtattatattgataagtaggaacaaattcttgggcataaggtttccttcaaaacacaacagaaaagtggaactcatcgtttagaatttcagaactatttgtttatatcgttgtattggctactgtgcagcaacagcgtatactgcgccattgatgttttttcggcattattggcgccgcattcaaatcgcagaaattattcgaaagtgccgaaatggcattgacttttttcgccttttaactgcctgtagagctgctgtgcattttaagttattgcacacacacacgaaccagtacaaggcatttatcaagaaacagacggcatcgcagacgcttctgtgggcgttgaaatttaaacaatatagcaaataatcggtcgaaagaagaagagaacaacaacaaatgccagcacatccgaagataattataaaacaggggagataccaagagacgggctggcaaaacactgtaccgaaaaaaacccagcaaaacaaaaacaaatcgaaggcgtcacagttgagtgagcagaaatcaaagggaattgcgagcgatgcaaatagtggcgagctttgggatgagacaggttgtagtcagaaataagtgcacttcggacatatgtgtagcgcagcaggtgtgtttgtttttctaatctctcctgcgagcgagaagaatttgaacgggaaacggaaaataagataagataagataagcgcccactgtattctaggctgtaccatgaaaacagctttgacgttcattgattaaaatgcaatacgaatgaaaggcatgagctcactcacacagcagcatccctgttgccgagtcaatgtgtgcgctcgtttaagtcggggattacaatggtggggcctggccagtgtggcatgtgccgatatgatgaaaattcatcacatgtggcagcaaattatgcgttagtataaccgcctttacataatttactagaccaactaccattctatgtatatctgctactattcccgctactgcgattgcgcaggcaaacgtgcgagtgtgtgtgtgcgtcctcgagtgtgttggaggagctgaatgtcattgtgtgaaggattttcgtggcatttgggtatttttagcccagtgcgaagcgaggatgtggaccagcattccaagtggcgacaagtgctgataaagcgcagctgaaagcaacgcccattgttcgcagtgcagtgactcagtcatcgcatctgtcatcgaaaaagacaaatgcatttgccagctgaaagagagtgagagctggagaaataagtaactggaactctcattcgtcggcactcatgtgatcgtcaagcggcgttgccagatcaccaggccagttagcgctgataaaaactggaaattgatttatgctgttgactctaattgcataagcagtctttaagtcagataaatttactcattgggtgatgataatggggcaggtaaacaccacaggaaaccttattgtttactatcaaattgaaatgtcgggtgtacggtgttaagcgcaaatcacaagacattacagggtaacatgacataagaattgcgtcacaatttgatggaaagcggtgtgggggtagcctaaattagctctcataagcagcagcgcgtgctcggttttttttttttttttttttttttttttcatataatgccttaagttcgtcttgcgacaatcgcttgggaacttgctatcttatcatggccaactgaattggtaaataagccacttatcagtaaggtaactgagaatgagtggtcttgataagcccctgaaaagatcgtcagctaaccatgtgatgtgggctaaaaagtcgattgatcatgcacccaacgatttgggcatgtgattaacgacgatcatttacattgggtcatacataagttgtctgctaattgggctggagaagatatcgataggaaaatacttcatacttctttcgcgccttaacaaaaatatttgttgtcttttatgtgatttttctttggcatgcaattcccgacaactattgttcgttgttcgaacaataaatattgaatcataagtagtcagttaattgggtttacaaagagcgaaaggcgagggttttatgttcttcaatagggtttctagtccattgtgtgcccaagctctaaccaacaagatgaaaagaaaaaactttaatatggcaacacttcccaacggtcttgtgactgttgtgagaaaaggaaagcgcgcttcataaacttcaccaaacacagtaactttgctcgctctcacacacacgcgctcaatggcatcgagtccgagagagtgcgcatcgctcataagagcgaagcgctcacatgagtgtgtatgagtaatgccgtttttagcatgctgaaaaagcgaaattttttttttcaacttggccactgcgaaattaaaattgctaattcttcacgttgtaaaaagggggaatactattcgtttcaaaatcgagtttgccaatccaaagagttttggatattctgcttgtcacgcgcatgcatatgagcaccttaatccctatgtgtgagtaagcccgtgtccgtacaccgttttcgtacacttgccgctatttcccgttactaccacctacagaagccagtacgcccacacgcttatccccgcatttcctcttcttcttctaccctttacgccacacaaatgttcgatttttcacagcacgggcatggcatccttattctagtcagatttaaacttacccgagaagatgatggcggaggcggctcccataactccgaagaaggggccatagatggggttgtcgctgctcacttcagaagacattttgctttgtttgttgtgtgttttttaggctacaaatgatgagaaatcgaaattttagttcgttttgctgctgctgtggtgattgcactatagtttttattcggcgttttgcacagatgaatctgaatgttatgcgcgctcgttatatgtatgcgttgcttcaagtcgaaacaaagtatttttattatatgtacaatatatgtgctatatacgtggggttttacgctgctctgcgaccaatgctgctgcgacgacgaacgaattgcgagtggccgctcacggaatattcttaaatatactttttaatcgagagttggcaagtcggagcgagtggccaacaacgaaaactgggagagagcagcaagagagagtgagattgagcgagaggccactcgtcggattattgcgcttgtgtggagtgtgacctgtgtgcatgtgcatgttgtcatgtgcttgtgtgcgcgcgagagtgagcgcatgacaggcacacatcacggatagtaagtccaattggcaatgacaacggtctggaaaattacacacgtacacacaatcacatgggagctgttaaaaccctggtttccaggcttttgcaaaatgaaaatgcaatttttgcactttctgaagatgcctgtgctccttgttcaattcccattgctcaacgcgcaaaactcacactcacaaggaatctcattgtcattggctaagtgtggcttgcctgtgtgtgtgcatgtcgtggcagaaaatattgtacaattttttttctgtttgaactctgttcaaattcaagttgtcgcagcagcatgttttatcgcaggcccgaaacttttccgcagggctagcctcacatgaccgcctatcttttgactgctttttcactcacgtgattagaaatctaattaaaagcaattcgctgctctgtggcctcttcgggttactgctggctgctgcttaaaagcgcggatcggatactgaacaccaacgagttattatgctttgcttttataaacgttagtcacgggggcggattttcggcgatagttgtgccagcgctgccacctgatggacgtcaaaatgcactaacaatgtttccactagagccaatacaattaaagcattgctttcacaccgattttaaaaggatgcacgaaattgaagaacataagcacatcaaaattaatattttattttatatttctgatagcttggtcaattcgttcatgaacttgtatggaaaacatctttttgtaccatagaaaaattcaattgctcgaactaaatgggtcccaagaacggtattagcta

SEQ ID NO: 26561 - DNA, 1145 bp, DROSOPHILA
taaaaagtatatttaagaatattccgtgagcggccactcgcaattcgttcgtcgtcgcagcagcattggtcgcagagcagcgtaaaaccccaccctaaaaaacacacaacaaacaaagcaaaatgtcttctgaagtgagcagcgacaaccccatctatggccccttcttcggagttatgggagccgcctccgccatcatcttctcggccctgggcgctgcttatggcactgctaagtctggtaccggtattgctgccatgtcagtgatgcggcctgaactgatcatgaaatccatcattcctgtggtcatggcgggtatcattgccatttacggtctggtggtggctgtgcttattgccggcgcgctggaagagccatcaaagtactcactatacaggggcttcattcacttgggagccggtctggcggtgggcttctctggtctggcagctggttttgcgatcggcatcgtgggagacgccggtgtccgtggcacagcacagcagcctagactgttcgtgggcatgatcctgattctcatcttcgccgaagtgttgggtctctacggcttgattgtggccatttacctgtacacgaaataaatcaatcaatgcaaacacacaacaacaacagatagacaaacggcgcccagcggtcaacagcagccacatcaacatcagcagcagcttcaagaggagcaggtaaaattgtgtcaagccaatgagcaacgtgcaacatgcaacttccaacaagcaaaaaccacaacagtgcgtgtgcggtgcaagcccggcgtggaccgtttgtacatagggagaacaaccaaaaccagtcctgccggactgcaggatctccgccacgcactgcccattggtggccgccgatttgcacctgttgttcagtttacctcgattcgctggcgcgtggtttagcttagttattttccgttcaaaatcagtcttaaacacgaggaaaacaatttgcaattaagttcataaagatgtaataattatgatttttgctatatcaagaaatcctgctcttttactttttattttgcgctccacaattttgtgtgctctttgttatttgttttttccattattattattaaataatgtttagtgtatatgtaaagttcgttaaac

SEQ ID NO: 26562 - protein, 159 aa, DROSOPHILA; identical to SEQ ID NO: 5832

SEQ ID NO: 26563 - DNA, 2906 bp, DROSOPHILA
ctcgcacatataaatattacctgtaacggtaccggcaactcgagctcctctgtcgtcctgctcttgctcctttcgcctgctctttcaacttctatcgtgcccgctcactcgcacgcacacactgcttccaggtccagatgcacgggaacggtaaccaaaaggcaccggaaccgggcgcacacatccagccgagccgagccgagccgcgccaacaggagggggtggtggtggtggtgctggtggcgttgatggttgtctggaacggggagggggccgtgtggtgggcaccgcttcttcaaatttctgtgtgtatatatcttgtgtgcgcgccagaaagtgacagctatacgcacacgcacaccaaagcacaggcaccgcacaccgacacgcaaggagcacacacacagttaaacgagcgcacagacacaaacacacagaggcacaacaagaacagagaacttattttgataaatatttaaacgcctccttgttgtttgttcttatgttatgctctttgtgtttattttctatacgttagtagttcactttacgttcgaattgtgctttatgggagtaatataattttttgcgtttcgcgattttgctattcgcaaagttgcagtgtgcccagacttgctgcccaacaatagtgtgaccgactgtgtagtgtgaccgttggctgaaacgcgaataagcttcgacgccacggctcaaaataaaataaggcgtgaaaacattctaatgatcgttttgataaattcatataaacaacataaatattgttacatattttaatactaaaatcataaatatacttgttcgcaaatatatttgcgccacaaaagaatgggattggatggccaactaattagttactaaatcgatgggtgatatcaactccctgcaagaatcaagtcagacagcttttatttttgaacgtagtggattttttgtttttattcacttattggtaattgtcaactaccaggatgaactggagtcaagtgcgggagaagcgccaggacttctgcagcgcctgcttgacgagctcatccggcgagggagtatcaaagcggaatctcttcacctggatgccgtaatccttatactggcacattcgcaggtgctgccgttccagcggagtgacggcgtacactagacggggctttctcggctccggatagcccaccatttcgtccagcatgagcccaatgggtcccggttgctcccggtagtcgctattcgctggtgaccgatcggccagcacgtcctcgtcgtagttgatggatcttttgctggccaagagagttacaccggtcgtgctccttcttccgcgatcgcaggcaatgaagggtatggcaaaaggctcacaattggtcaactggcgcgccttgctggccagctccttgggcggtgcgcctttatgcctggcgataatcgtggacgtgaggtcaatgagtgggggtgctgacgtggctgtattcacctttgtcccatcgcctatatccagcttcttcatgccgctctccaaccttgtcagcaggggtatgttcaggggctccttgggcatcgcgaccagttggggtaacacaaatcccattgattgcggcttgttttcgccctccgatcgctgccgttgcctcaactggatctcattgagtagcatttgattgtgtgcctccgcctctcggcggtattcctgctcggcagcggcatccgcattcgtctgcagctgcaattgtggaattctaagctgtggaattttgagctgcggaattgtgaattttggcatcgcttctgggctcgtgccacttatactgctcaatttggacaaatcgctggtgggctggagaccaaactcggcctggatcgcctggtggagggacttcttcggattgcttgccatttttcaaggcccaaactccagcgacgatgacgaatttgtttatttttttttttctttcttcttttttgcgtctctcctttgttgttttcttcgctcgtttgacgttgttttgtggcaaagttgtcaaatagtttcaactgattgactgattgtcaaacatgtttttattattctcacatattttaggattctcactctaagcagtttctttaaaaattttccgaattttataaacccgatatgcttccctcaaacaataacctaaaatgcagatagcataaatcggctgcacttgacaaccctgaacaacagctgtttggagggaaaatacaaaaatggttcgccaaatgttatatttcccttatcaatatagacccagtttctgtggcggaacttttatttataaatatgttttggaacattcatgtgtgaaaaaaaatgcaatttgatcgcaggtcctattgattttttaaggtattaagcatgatccagccggcagatggggccctcctccaccatctttagatccactttgggtccgaccaaatcgcgaatgttgttgatgccgtacttgatcatggtgggtcgctccagcgacagaccccaggcgattacattcacgttctccggcagtcccatgggcagcagcatctccggccggaagacgcccgagttgcccacctcgatccacttggccaggccggggtgatagcagaagatctccatgctgggctcggtgtacggattgtacgccggcttgaattcaagctgcgtgatgcccagctttctgaagaactcgtacagcgtgccaatgagatcgcccagcgtcagaccaacatctgcaatcacgccctccacctgatggaactccgccagatgtgtggcgtccagtgtttcgttgcggaacaccttgtcgatgctgaagtacttggctgctttgaagccgccctcctggttggccagcttgtacagcatcctcgcactcacggccgtcgtatgc

SEQ ID NO: 26564 - DNA, 906 bp, DROSOPHILA
atggcaagcaatccgaagaagtccctccaccaggcgatccaggccgagtttggtctccagcccaccagcgatttgtccaaattgagcagtataagtggcacgagcccagaagcgatgccaaaattcacaattccgcagctcaaaattccacagcttagaattccacaattgcagctgcagacgaatgcggatgccgctgccgagcaggaataccgccgagaggcggaggcacacaatcaaatgctactcaatgagatccagttgaggcaacggcagcgatcggagggcgaaaacaagccgcaatcaatgggatttgtgttaccccaactggtcgcgatgcccaaggagcccctgaacatacccctgctgacaaggttggagagcggcatgaagaagctggatataggcgatgggacaaaggtgaatacagccacgtcagcacccccactcattgacctcacgtccacgattatcgccaggcataaaggcgcaccgcccaaggagctggccagcaaggcgcgccagttgaccaattgtgagccttttgccatacccttcattgcctgcgatcgcggaagaaggagcacgaccggtgtaactctcttggccagcaaaagatccatcaactacgacgaggacgtgctggccgatcggtcaccagcgaatagcgactaccgggagcaaccgggacccattgggctcatgctggacgaaatggtgggctatccggagccgagaaagccccgtctagtgtacgccgtcactccgctggaacggcagcacctgcgaatgtgccagtataaggattacggcatccaggtgaagagattccgctttgatactccctcgccggatgagctcgtcaagcaggcgctgcagaagtcctggcgcttctcccgcacttga

SEQ ID NO: 26565 - protein, 301 aa, DROSOPHILA
MASNPKKSLHQAIQAEFGLQPTSDLSKLSSISGTSPEAMPKFTIPQLKIPQLRIPQLQLQTNADAAAEQEYRREAEAHNQMLLNEIQLRQRQRSEGENKPQSMGFVLPQLVAMPKEPLNIPLLTRLESGMKKLDIGDGTKVNTATSAPPLIDLTSTIIARHKGAPPKELASKARQLTNCEPFAIPFIACDRGRRSTTGVTLLASKRSINYDEDVLADRSPANSDYREQPGPIGLMLDEMVGYPEPRKPRLVYAVTPLERQHLRMCQYKDYGIQVKRFRFDTPSPDELVKQALQKSWRFSRT

SEQ ID NO: 26566 - DNA, 6483 bp, DROSOPHILA
ccaacgactgggacgtgtctgccggtctcttcgagaattcctgggaagtcttcccggcaaacatttcgcaattagtcaggcattcgttccagttccacacagcaaatccccttccaagtggcgcagagtggatggaaacacacaatagtggcggtggaggcaattgcaatctagtgtgtgtacttacaatgttttcattcggcaatgacttattatttagcacactgatagctgataacacagtgctaatgtgagctggagcacttttctgagtcggggttgtgagtttcgagctctgactcactcagaaatgtcccgaaagcgcggcagtcatctagaaatcttgaaagcattaagttataatttacattttggagaagcaagtttatgaaattagctaattgtggagcaagaactaagtaaaggaattccttatgtacattgaaatcaaatccttgatcttcgcaataatggatactaaggactacatagagtaagcagtgctaagataaagaaagtgaatagattataaatcatatagaataattcttgattagttatctaaaaaccaagaaactggttcgcgtagctaggaggaaccacattatgaatcaactgaaaacattgggttgctcggaatgatgggagatgggaacgcatatatctttaggattgacgcatgcgaaaaagacgtatcgtgatctcaggtacttggaactccggaatacagccgatccggaattctttggtgcgctgcgtttctgtcatggtctcctaaatcgggtcccgagtttattcgcgaaaggcactatctaatcggggactgattggcggcattgccctcctcatcgcagtcataggtatattatcgttgataaatgtgccgactaaaaaaaaagaacaacacaaattccgacgaggccaattgatatgtggagaggagaagtattgatggttaaaacgcctcaactgccagcggatcggtttagtttgccaacggagccgtcaaagggcggaatatgcgcggaatctgacacatcctccagagaatcatcaattggagctatcagtggtgtttgtgcagtagtgttgtggaacaagaagaatcgaacaaacatggccaggtagaagaagcgtgatttgaagagaatccatctagagatgtgcaattgtttactcagtgacctagtgaagtgtccttggataatcccacagttatatgaccagcatttcttaggaatcttagaaatcctaccagtcacaaatccattgcataatcgtttcttttatggttttacccgccgcgtatcagcagaactggagcagtcgtccaataaagcaaactcttaccacttgcccacttcccttggccccatgaaatatggcattgataaggtgaattgcacctgcccaccattacttctatggatctataaataccccagattgggtatttgcattgggactcatatagaatattatattggatatgtctgatgagatcatttggaattgatcaacaatatccacattcacgagtcactatcatttgcctgattcatttccgcaggactgttataaaatattgtcgaatagcgaaaatcttatctttggggtttcggctttctatggggcttttctgaattggttttcaagaggtttttcctaatcaaggtggttaaacatggcaaccctttcagctgggcagtccgattaggttcgtcaaagataagacctatgaagaggattttcttaggaagttgaaaaattaacaatgaagcaagcaccaatcgtttctgtgggatctgtatttaaggaatcattttgatgcttatgtgaacccctttctttgctttagttttaattcccaactgaaaatggagacgggcctgcacgagcgtgatcgtgctggagtccaggactttgtgctcctcgagaactaccagagcgaagaagccttcatcgggaatctgaagaagcggttccaggaggacctgatctatgtgagtaaaaatagttaaagaagataggtcaaaataatgataacgatatcccctttcgcagacctacattggccaggtgttgatctccgtgaatccctacaagcagctgcccatctacaccgatgaccatgtcaaggcgtacagaaacaagcacttctacgagatgcccccacacatgtgagtctcaagaccaagttgcattgaaccaccaaataatgagcattcctgtccagctttgcggtgactgacaacgccttccgttcgctgatcgaggagaaccgcggccagtgcgtgctcatctccggagagagtggttccggcaagacagaggcctccaagaaggtgctgcagttcatagccgcctgctccggcaaccagacgaccgtcgagggcgtcaaggacaagctgctaaagagcaatcccgtgctggaggccttcggcaatgccaagacaaaccgcaatgacaactcctcgcggttcggcaagtacatggacatccagttcgatttcaaaggagctccgatcggaggcaacatcctaaactatctgctggaaaagtcgcgagtggtggctcaaatgggaggcgagcgcaacttccacatcttctaccaactcttggccggcgccgacgaggcccttctgcaggaactgcgcctggagcgggctctggacacttatagctacctgacagatggggtaagtgggcagcctggagggtattgacaattggtctctgatcttcgagttctaatccacagctcaatggcaccgtgacgagaattaacgatgcggacagcttcaagcaggtccagcaggctctcactgtgatcgatttcaccaaggaggagcagcgcgagatcttcggaatcgtggccagcattctgcatctaggaaacgttggcttcactgaggtggagggcaatgccaaggtgaacagcagggatctggtagtcaccgctgctcgtttgctgggtgtaaacgcaagcgaactggaagccgccctaacgcaccgcacaattgacgctcggggagatgtggtgacctcaccactgaaccaggagctcgccatctatgccagggacgccttggccaaggctgtctatgatcgtctgttctcctggctggttcagcgcctcaacatctcgctgcaggcgaaggaaacgcgggcatccagaaataatgtgatgggcattctggacatctatggcttcgagatcttccagaagaacagctttgagcagttctgcatcaatttctgcaacgagaagctgcagcagctgttcatcgagcttacccttaagtcggagcaggatgaataccgccgggagggcatcgagtggatacctgtggagtacttcgacaacaaggtgatttgcaatctgatcgaggagaagcacaagggcatcatctccatactggacgaggagtgcttgcgaccaggagagcccacggataagaccttccttgagaagctcacccagaaattggcccagcaccaccactacgtttgccacgaaaaggcgcccgcccacatcaagaaaatcatgctgcgcgatgagttccgcttggtgcactatgccggcgaggtcacctacagtgtcaatggattcctggacaagaacaacgacctgttgttcagggatctaaaggagaccctcagcaaggctggcaacggcattgtgaggaactgcttcccggagaaggagctgcgcagcctgaagcgtccggagacggctatcacccagttccgggcatctcttaacaacctcatggacattctgatgtgcaaggagccgagctacattcgctgcatcaagccaaacgacctgcagactgccaacgtcttcaacgatgagttggtactgcaccaggtcaagtaccttggcctgatggagaatctgcgtgtgaggcgagctggtttcgcctaccgacgaacgtatgagctcttcctggagcgctacaagtccctgagcaagtccacctggcccaattacaagggtcccggtggcccgaaagcgggtgtccagcagctggtgaaagatttgggctgggacgaggaaaagtacagggtgggcgagacgaaactattcatccgctggccgagaaccttgttcgatacggaggatgcctaccaggagaagaaacatgagatagcggccatcatccaggcccactggaagggattgatgcaaaggaggaagtatctgaaactgcgtgctcaggtgatcataatgcagagctattgtcgccgaaagttggcacagcaggcggccaagaagcgcagggaggccgccgataagattcgtgcctttatcaagggcttcatcacccggaacgatgccccgaatggcttcaatgaagagtttattgccaacgccaagcgtatgtggctgcttcgactggcgaaggagctgcccaccaaggtactggataagagctggccccatgcccctgggcactgcgaggaggcctccggcatccttcaccgcctgcaccgtctccacttggccaggatctaccgccttaaactgacgccgcagcagaagaggcaattcgagctgaaggtcctggcggagaaggtctttaagggcaagaagaacaactacgcgagcagtgtgtccacttggttccaggaggaccgcatccccaaggagcacatccagcgagtcaacgacttcgtggccagcaccttcggcagcgagcagcttaagtaccagtccttctgcaccaagttcgatcggcacggctacaagtcccgcgaccgctttatcctgctgagcaacaaggctatatatgtcctcgacggcaagacctacaagcagaagcaccgcctgccgctagacaagatcgacttcacgctgacgaaccacaacgacgacctgatggtcatccgcataccgctcgacctgaaaaaggacaagggcgacttgattctgatcattccgcgcataatcgagttcagcacgtatatcattgacaccgtgggaactgcctccatcgtctccattgtggacagaaattcgtaagttgcacatcggttatcccagtggttttctcttgactaagtgttgcattcgtttccaggttggagcacaacgtagtcaagggcaagggcggcgtcatcgacatccaaaccggcgccgagcccggagtggttcgtgataagggccatctagttatcgtaagtagtgcgagctccagctcctcatgaggaaacgcccattatcgtgctgacctcacacaccaaatatttcttttcagattggaacgcaataaggaatttactatgactttcttcagaaaagtggctttaaatcaaacgaccttgttttgttatattcgtgtaatttatagtgtaactatgtatttttgttactgcagcacctgagagttgtgtattcggattttatatgactaatgttccaactaaatgtatattgtttaaaaatacatataaatatattacaatttgtatatgaattgggttcttatcactaacttgtggtttttcaaagaggaaacgtggcaatttttctagtctcttatatcgtttctttcaaaaagaaccgcccactcgattggcaaaagcagcagtcgataactttgctttgaaacgtcagttcggtgctccagactttaaaaatctcgttaaagtcgtgcccaactcacaaaagaagatttcagctaacgttactactgaaattcatgtgaattaatataccactaacaattatttaactgtaaattatagttgggaaagttacttactcattattcaagtattaagtatttttagtatttatttgcgtaagttgagaaacagcttagtacattgcgcatacggtcacactgctaccttgctgtctttttcttgctccagcacttttacataatcttgaaaactcagcgtaaatatcgcccaaaatacgagacctgcactcgtgcaccgtctgcagagatgcgatactaacccgctgcgtttccgttgcaggagaaccgagatgtcgttcacacagatcgcgcgcagctgcagtcgactggcggccactttggccccaaggagggtcgcctccggcattctcatccaatcacaggcctccaggatgatgcacaggatcgccgtgccatcgatgaccagccagttgagccaagtaagcgaacgtccaaagcggtcccttccgttgcaggagccccaatcgcagttgaggacctaacctcatcgcaaacggcggggtttcgtgatctacgagtttcaaaacattcaattaagtgcttgcaatcatgaacgcaacagaagatcctcgccatgtggccgtcgaaccacccaattcgattgcatcacattattttgcataaaacatgattgtttccctatcgcacacacacacacatacacctgcaacaccggtgctcgcacttgtgtgcggttgattgtactacagtgaaaatcctctagaagtgaccttaaaatgtagcggtt

SEQ ID NO: 26567 - DNA, 3406 bp, DROSOPHILA
agccgtcaaagggcggaatatgcgcggaatctgacacatcctccagagaatcatcaattggagctatcagtggtgtttgtgcagtagtgttgtggaacaagaagaatcgaacaaacatggccagttttaattcccaactgaaaatggagacgggcctgcacgagcgtgatcgtgctggagtccaggactttgtgctcctcgagaactaccagagcgaagaagccttcatcgggaatctgaagaagcgacctacattggccaggtgttgatctccgtgaatccctacaagcagctgcccatctacaccgatgaccatgtcaaggcgtacagaaacaagcacttctacgagatgcccccacacatctttgcggtgactgacaacgccttccgttcgctgatcgaggagaaccgcggccagtgcgtgctcatctccggagagagtggttccggcaagacagaggcctccaagaaggtgctgcagttcatagccgcctgctccggcaaccagacgaccgtcgagggcgtcaaggacaagctgctaaagagcaatcccgtgctggaggccttcggcaatgccaagacaaaccgcaatgacaactcctcgcggttcggcaagtacatggacatccagttcgatttcaaaggagctccgatcggaggcaacatcctaaactatctgctggaaaagtcgcgagtggtggctcaaatgggaggcgagcgcaacttccacatcttctaccaactcttggccggcgccgacgaggcccttctgcaggaactgcgcctggagcgggctctggacacttatagctacctgacagatgggctcaatggcaccgtgacgagaattaacgatgcggacagcttcaagcaggtccagcaggctctcactgtgatcgatttcaccaaggaggagcagcgcgagatcttcggaatcgtggccagcattctgcatctaggaaacgttggcttcactgaggtggagggcaatgccaaggtgaacagcagggatctggtagtcaccgctgctcgtttgctgggtgtaaacgcaagcgaactggaagccgccctaacgcaccgcacaattgacgctcggggagatgtggtgacctcaccactgaaccaggagctcgccatctatgccagggacgccttggccaaggctgtctatgatcgtctgttctcctggctggttcagcgcctcaacatctcgctgcaggcgaaggaaacgcgggcatccagaaataatgtgatgggcattctggacatctatggcttcgagatcttccagaagaacagctttgagcagttctgcatcaatttctgcaacgagaagctgcagcagctgttcatcgagcttacccttaagtcggagcaggatgaataccgccgggagggcatcgagtggatacctgtggagtacttcgacaacaaggtgatttgcaatctgatcgaggagaagcacaagggcatcatctccatactggacgaggagtgcttgcgaccaggagagcccacggataagaccttccttgagaagctcacccagaaattggcccagcaccaccactacgtttgccacgaaaaggcgcccgcccacatcaagaaaatcatgctgcgcgatgagttccgcttggtgcactatgccggcgaggtcacctacagtgtcaatggattcctggacaagaacaacgacctgttgttcagggatctaaaggagaccctcagcaaggctggcaacggcattgtgaggaactgcttcccggagaaggagctgcgcagcctgaagcgtccggagacggctatcacccagttccgggcatctcttaacaacctcatggacattctgatgtgcaaggagccgagctacattcgctgcatcaagccaaacgacctgcagactgccaacgtcttcaacgatgagttggtactgcaccaggtcaagtaccttggcctgatggagaatctgcgtgtgaggcgagctggtttcgcctaccgacgaacgtatgagctcttcctggagcgctacaagtccctgagcaagtccacctggcccaattacaagggtcccggtggcccgaaagcgggtgtccagcagctggtgaaagatttgggctgggacgaggaaaagtacagggtgggcgagacgaaactattcatccgctggccgagaaccttgttcgatacggaggatgcctaccaggagaagaaacatgagatagcggccatcatccaggcccactggaagggattgatgcaaaggaggaagtatctgaaactgcgtgctcaggtgatcataatgcagagctattgtcgccgaaagttggcacagcaggcggccaagaagcgcagggaggccgccgataagattcgtgcctttatcaagggcttcatcacccggaacgatgccccgaatggcttcaatgaagagtttattgccaacgccaagcgtatgtggctgcttcgactggcgaaggagctgcccaccaaggtactggataagagctggccccatgcccctgggcactgcgaggaggcctccggcatccttcaccgcctgcaccgtctccacttggccaggatctaccgccttaaactgacgccgcagcagaagaggcaattcgagctgaaggtcctggcggagaaggtctttaagggcaagaagaacaactacgcgagcagtgtgtccacttggttccaggaggaccgcatccccaaggagcacatccagcgagtcaacgacttcgtggccagcaccttcggcagcgagcagcttaagtaccagtccttctgcaccaagttcgatcggcacggctacaagtcccgcgaccgctttatcctgctgagcaacaaggctatatatgtcctcgacggcaagacctacaagcagaagcaccgcctgccgctagacaagatcgacttcacgctgacgaaccacaacgacgacctgatggtcatccgcataccgctcgacctgaaaaaggacaagggcgacttgattctgatcattccgcgcataatcgagttcagcacgtatatcattgacaccgtgggaactgcctccatcgtctccattgtggacagaaattcgttggagcacaacgtagtcaagggcaagggcggcgtcatcgacatccaaaccggcgccgagcccggagtggttcgtgataagggccatctagttatcattggaacgcaataaggaatttactatgactttcttcagaaaagtggctttaaatcaaacgaccttgttttgttatattcgtgtaatttatagtgtaactatgtatttttgttactgcagcacctgagagttgtgtattcggattttatatgactaatgttccaactaaatgtatattgtttaaaaatacatataaatatattacaatttgtatatgaa

SEQ ID NO: 26568 - protein, 41 aa, DROSOPHILA; identical to SEQ ID NO: 4614

SEQ ID NO: 26569 - DNA, 10374 bp, DROSOPHILA
cagcttaaccgaatcgttaagattatcctcgaagagtcgagatatctgctttttaggggtcttatcgagtttcttgggcgaagcactaatgatctcgatttctgtattagtattagctccattcacaaagcttggcgggaaagctgctatggacttgctgcgctgacggagggtggtgttcttttttggcaccttaaccgccttcttatcgctttcctgtgtcgatggctcctctatttccgctaccttagtcttcttggcgggctgctcctgtaccctgtccaccgtctcgcggaccttctcgattagtgccgcgctggacatgaatgtggaggtgcagacgaagcatatcttgatgggcaaggatgatgggatctgaaatgggatgggatgatttagatgacgagaagggaaatcagaatgccgccatttccaactcacgcttctgtgggtgatggtctccagtacgtctgttattttcctgcccaggaacaccttctgacctgaaaaaacactcttggacccttggcttgtgccgcaatggtcgcatcgcacctctttttgcaccttggtcatattttcactaagttttccagcaaaaacaaaaacagaaatcaaacaacgtgcgcacgtttttttttttgcggggctacagttaccaaacactgctatctatgttaatcaactgcagtgctgccagaccgagtcaccaaaatataccacatagtgtgcttatatattatggttgcacgttaaaagaagcaactgcagaacgttcgcagaacgaatcttaatcttaataatttttgcatcaaatttagaaagagtgtagaaaacagtttttaaactacctataatggcagtagcaactttaaaaaatattaccaaagcagtatattgcgcattccggtcacactaagttacattaacattctgttaatgctcacgtcgcgttatgcaacagctttgcgtgtcgatatataatcgataactctgaacttggtttccaatttaaaaatagtttatttaggcattagaagctacagtaatgcaaaatgatatgtttagtttgtttctttgtgttggtgctgacctggatgggctgtgccgttactttgtcttggattttttgagtcggttcccgcgcctgcaaacaaagagatgaaaaatgttatgaatgacaaggacatggcaagggaatgcgccaggatcaagcggttcgcagttttcatgtcttaaacgtatagctttatttgaatactttctctgctcctcctttctctttctctcataggcataatattgtatagtactgtgttgtgttggatttgtttcagtgtacggttggtgtacttagccgacgtttagttaactaggcattactaggtattgttcatgttgtttctgttaaatatacttaatataaatatgtatttcctttatttgttatcctcctgggcccatccgatttcatatggattcatagtgcctcgctttcgggggtggttacttgaattttgttaaagtgtgggttacacatataaaaaatatttgcgtcctctcacgctacacgtttatataaatatgtttcttgggattgggactgcacacttactctactggaaaaaccattgaatagtctttcgccttcttcgttctctcgttctaatacaaaatggtttcgctatggcaaaacctggattataattaaatcatacacctatacttcgcttagcgacttagtaaaccgattttagtttaatttgatttgcaactagccacgtgcaactagtccacggtcacaatttgaaaaaagaatcactttattttgatttcagatcgatcgggggcgagtgtgcgaaatgaacaattttgattataacactccttaaaagcgttaaacgagatataggtgtacatcgagctgttttgtttaaccgtaagttattgctttaatggcgctgaatttcgattcattaataaagtgctcgtttaaggggggacagggtctttaattttaaacacaacaattcaaagttagtggtagtggtaggcgggaggcaaagtaaaattaagagtcgtttaggacacttcgtacaattctccgattcggttctttttggcacattgctgcactttatattttgccatgtactacaacaagtggtggtttctcataatcttcataaataaatatacataggtcgtatgctataagaaattgctgtacaacaacaagtgaagcgtgtagtgggtggttgtcgggtgcttgaaacattggtagttatgatattcttaatattttaagcatagcgagcaagtagggtgagctttgcatttggtatggctcgtttggggcatctggtcggttatcaatccatttttagagtgtagaaaataaatttgatctaaaatgtcagtctattgcgcaaaatctacatttgacgtgatttctacccgattttcgttagtttagtttagttgcttcttttctttcatttgtttcttttgttttccttcttgtatttcgtatataaaaaattccctaatatttatgcatcttgtatcgttcgttcagctcaatcaatccgccatccgcaattcgtgtgcgattgcatggcgttgcgatgcgattccgtccgatctctgatcctttccgatccgttgcacgtcgtccttgattcgttgcccgcattagatgccgggtcaggcggacgagcaggtggggatcggaagtcggaaatcgggtatcaggggaggaatcggtctcctacggcaactaaatacgtcatacagctattgctactactgatctacgactacttagtggctacggggcacttaacctagcttcgtgtatgcgtaggcgcagatcacgcccaccacaacaccagcggcaatatatgtgagtaatgaccttcgtttctttgccgccagctgtttgtcctcgttctcccgctgcttccgcttcatgtcgttgaccttctgctccaggctggcctggtattcgttgcgttttcgccgcttcagctcgttctcgggactgaaaagtacgaatttggaaggggattagagggatttttgtttgactaggcggttgaaaaatagatactgagcagatctaagactagattcttacctggctgggagctggcctggaattggatcgatgccgttcgccttgtgctgctcgtcgactggcaccgctggcttctcgttgttggcattaacatcgtcggcatgtggctgtgttgtcgcgggcacgtgtccattaactggatcggcatcgtgctcgttaatggtctcgtactcctcatcctcatcggtgtcgtcctcgtcatcgtcatccagcaagtaatcctcatcgctgtccgaatcgttgaaagcccttacgggtaatggcggcaagggacgactgtcggccacctcggcatcgtggatcatgtcgtgctgattaatgaagttgttcagggcgtccttgctcagctctttgccgatactttcagctccattagcctgggccgcgcgcatattgagcgaaagtataccgccggaattgggggccagtggcagattaagcgattggacgcgtgggggcaatggcggcggcagctcatccagtgtgtgagtctctgtgtcgttgctaatgaggggttcttcagcgtcaagaaaggtctgaagagaaatcaaatgttctaattagtcgcggaaaataatcagggccttcacagaaatctctgcaaaccaaaaacaatggtttctttttcgcatcaattaaacaataatcattaagctgatactagatcacataataaaaaacaaaactaaacataatacagttttcaaaagtaatcataattccattaaacaatatgaattctagtaaccataaccaagcccagagatttctgtgaccccccagaataaatagcgatgtgcaatatatacggcggtgcttggcagcccccaagtttgactcccaaacgccgaccgctggtcgcgcatacatacgggatcgtgcagctttttaatgccctcgatgatcgcctggtaggagaagtccagctggtcggcggtctgtatgaggcccatgcggtagctgcgcagctcgcagagcaccttggacacattgcactctccgtacttgtcgataagtaccaggcaacagtccaccaggcagaaggtgcccgaccgcccgattccggcactgcagtgcactacggctggacccacgtcgcggctgaggcagccggagtcgcgaacctgctgcaagaacttaaggaatgcgttcggcgagctgggaatgccaaagtccggccatgtggtgtagtggaactgcatcacttcacgactctgctgcgtttcgagatcggttaatctagagaaatagtcaaaggcaattagtccacatgtacaaatggtttgaagcagaagaagaataaagagttctactcacttgaaccatcgccgcacaaagttctggtaggtctcgagacggacgagctccacggtgagtttgacgtggggcagtttcagggccttgtcggctcccatctcgttgggccagtagaggtggcacttgatctgtttcttctccatcagcttgttgagcatgagaactgctctggacttctgctcccataccatcagccagaagtggcccactgtgtccaccagcggtccttgggtcaggatgtactggcgctcggcgcgctccagctagaaaggattgattgatcgcattaggcgtttaattaggggtgtgtgtatgcattaaaaacgtgacccacctgaaccaggttcgcattgatgtagtctacgctgccgcgcttcaaaacaatgcgggaatgatcgtacggattcacatcccgatagcgattcaggccgcggttcgtgtggcgttccgattccgaggtgctgaactgcttctccttcgcctcccggtcgcaggtctcacaaatttcctggaattccgaaaagagcgattagtacaatcgaaactacccataacaacaaaggttgaggtggtattaaaattcggtcgctttactgacaacttatcagtcaatttgcaggcggtaattcaggggattttgtgagatttgcgctatttacctaagcgttccagaccccagaagacaactactatagtgtcttactggaagatctcttctttctggtacaaaattcgtaaaaaatatagttttcgtgttactcaattatctaagacagtaataagaccaaaagttcaaactaattaaacatttatgcatgaaatgacccaacgaattcttcgatacaagagcaaacagcaaatagcagtgcacaatagtattgaatggcattgttaaaacgaatatcagagcttccttttagaaccatacaaactgagaaactgtaaggcgcaattaagctttttacgatttgtgttccgagaaaatgaaaacgttcagactcataatggtctgataataactagttttaaagtgatacatttgtttgactgactcgcaaacaaattgtcaagaaacgaattgataagatcctgttagaagaatgctagaatgttacagaaatcgaatttgtttttttccatgggggttgccccctttgcagtgattcatcacttggcccagcgacaaggggctcctccggattggcaaaccctgcgattgaagcgatagtagatacatgtaaggggcatcggactgggagggaaccatgcggcatatgaaaagcccacccagtctacatagcgggcgtgactaattagccatgcgatgttggtgatggcgatggcaaagcaagctgtcggtaatggcattatcttgggcatgaccggtgcggcattatcagcagtgtgaacggggaattgctggcgcagctgaaagtggccccgccaattgaaccatcgaatccgactaccgaaccgttaacaaggtcaatggcaaccacctggcgacgacaagtgctccttaaactcggctcaaagctaatcacatgcatgcggtgatgagtaaccatttaatatggttacccatcagctcgcgttgattgcagctcgaaaatcagttgttaattgtcagttcgtcatgtttcaacaatgaatcagctgcaaattctgcagctgacctgttatgaaataactttaaagagtcatatttttacgtaatctccaaatctgagacgggctaatgaccgataaggaagcttttcaaagagcaaaatctcaatggctatcgctacatttgataattcgtaattagaaacggaaagaaatccatggttgcacttaatatttctcgaaactcctcaactcaatagcatttctacaatcacctatttaaggtctgataatcgacgagtcacgtgagaatacgcgcagataattgagctgctttatttaaatgtttgccaatgataaagactttcagtgtacttatgatgtataaagttgtattccttgtactatatcaaactagatatgatatataaaatcaacaatccatccggaacttatgtaaatccatagcttggattggattcattctgatggagaaaacagttcttcggctccgttgaacattaagtcttgggccgtttaccagctacatactgttttttatgctcggtggctatccaggtgacccttctaaacggagtggcgaaatccaagcgaaggcgcggaaatctcgggggctttggtttccaaagcgtgtcgtgcaaaccgttttatggttattatgtttctgctttaccttgcaacgctcgaaggaaatcgagaaacagtaacaaaaacattgcatgcacgcagagcacaattgcaacgatggataaagacttcttggccaatacgaatttgacataccctttcacacacactatgcgagttaacaagtttcatatttcataaaatctggcttgactgtttccagagaaacgaaaaagaagacggtcacctgttgataccaacgactggtaaggactataacaccctctggcagggtatagctgtggaggagcttcgtcacagtccacggaggttgtcataatgggacggagtgggttgggtgggatgttgatggaacggatggatcgagaaggcgctaggtatgagctgataggcggggaggggcggcgagttgagaagacccagtgtaacgcacttcgttcaatggaaatgattaaacataaagcaaagcatagcaaaacaatacggtccgaatgcgtcactgcgtttttggctacagtccaaatcccctatgatgggctatcatatggcaaatgtcaaataaattggaagttttaatgataaccacaaaattagttgtaccgtttatgttcacacatatttgcgatttattaattcttagaagaatgtgttttggaatttctataataaagacagataagtgcctataatggattataattttcttcagaaatgtagtagcatgcacagctaaatgttattaaagtaaaaattggggtaggtcggtcttattcataaagtaatcatcgaaaaatgtgatgttttcacattgatcatagttgtttttcattgcaacaaaaatgagtcaacgtttacatgctatggaacatataaaattcagcgaatttagatgaatttcacgaaagtaatattatcaagctgaaaactatttatgatttaatgagaaaatatgattaaagaaagtttattgaaatctcactttggcctaacaagatcgtcttagtcaagttgcactgtatttcagtggaaatggctggtagctattttccagtcagtttcgacgcacaattgcgggctgccttccagttagctggaaaattagattatcctcgacgcgagcacaaaggatgacgaacgaggatgccgaggagcgggtccagaaacgagatatttctacacacgaccatatactgtgtcatcctaactgcggagtggaattccgtgaaatcccaattcaagtgagtggaagcgctgaaagaggcacagaggaacagaggaggaggagtagcagctgaagacagttcgccggaactggctataaagaacgagtggaggtggaggaggagagaagaaggggcaaggagaggattccgactccaattccgacaggcaaccagaagcagcccaaagcgagactcaaaaaaccagacgcatgccctttgtgcccctgtgtgcgtgagcctctctctcctgctcaacgcgagcgggtgtgtgtgtgtgtgcgcgcgttagaggagttcttcagtggagagcactgtcacccctccacgaattgtattttgtttttgggggacggcaatcacaaacacaacgagcttcccagaaatcgcctccaatttgatttggccaaacgagaattcgcggaatagctcaagcgctctattgatagtcaaaggaaagcgtttttggggaaaggtatggcagaataacaagcataaatatgccaaatacaggccaatacacacgcacgaactcacacacacacgcgttcgatggagaatgcaaagtaaagtgcagcaggtgtgcgtgtatgtgtgttggtgctattctgtttgtacattcttttccatgggtttttgtttttggccaaagcctggctgttaaagcaacaactgcaacaacaacagcactgacacacaatacacacgcacacacgtaaagctcgccgctgcactggtgttggtggtggaggcatctgcagaagccttttgcgcactcatcacattttcgtggaaatcggagcgccaaggagctgtggaaaggtgtatactccgcatccgttgcgaatccttggcgaatcgaactgtgccacaatcattcgtccagtttgtaaccagttttcagtgcagtcgcagttgttgttgccaattaccttgtagaagcgatgccattgcggccccttgtccttgtactccgcctcgatttgcagacgggcagcggccgccgacccactcccactcgttttctgctcgctcattgtgcacactttgctgcgatttgttccgatttaataacttttaatttggttatcaggcggctggttaatttcagaggagaactagagctggacaactcacgacagtgtcgatgtatcgaatatttgagcttgcgaaatactatcggtatttgcagtgcgataccgagtgatagttcgattgtacatcactatattgatcgcattacatattatattctcttatggtgattcctatttacaaatgcaagccaaacacaatatattgtatctgcgacattattattctgaaatattagttacgtctatcgatattttcaccatcaaataatgtgaccaggcgctgtagagcaatagaacacatactgaaactaaagtgcttgcgcagaaattagaactttactgaaacataatataacattcgggataagttttctataatttatataaaattaaatacttaactaaagacataacaatataaaaacaattgaaataaaatattttaaataaaaataaaataaaaaaaataaaataaaatattttaaaagtaaaatagaaaaattctgataagaaaattgggttcaaatactttaaaataccgatattacaatcgctcatcgttgaccagtgttatcgagtaataccaaaagtatcgaatcaacaactgttacccaatttattaataacaacagaaagaagccaaagcaaaatgctgacccgcgtgttccgcctagtgcacgacaggcgcctgagtgtgcctgtcctgcgttgcttccaccacgagttctccaagccgccacaacaggcagcgaagggccaggaaatcgaaggcaatcccgaaaagactttggttgccggcgtgcaagacaagtacaaaatattccgcgatgaggaagccacggagatttttgatgtggaagaggcacgccaccaggagcagcaacttccagagccggacctggagctggatcactattacggcctcaatttaaagcgtaggttggcaatcgtccagggagagcagaaatttaagcctttgtttccctttgcaggaggtgttcgcggagtgttcgacgttgaggacttggtggagctgctccgcaaggagaatgtggacgacatattcgtctgctacgtgccggagaacctgaagtacgttgaccacctggtggtttgcagtggtcgcagttaccgacacatgctgtccaccgcggagttcgtgcgccgaatgttcaagatcaagcggggcaagggtgacatattgccgcgcatcgagggcgataagagccgggattggatggccatggacttgggtgggtattgaaataaatgcatattccggtttctccgctctaacacgttccgtttccttttaggcaacatt

SEQ ID NO: 26570 - DNA, 2102 bp, DROSOPHILA
tgcgcaagcactttagtttcagtatgtgttctattgctctacagcgcctggtcacattatttgatggtgaaaatatcgatagacgtaactaatatttcagaataataatgtcgcagatacaatatattgtgtttggcttgcatttgtaaataggaatcaccataagagaatataatatgtaatgcgatcaatatagtgatgtacaatcgaactatcactcggtatcgcactgcaaataccgatagtatttcgcaagctcaaatattcgatacatcgacactgtcgtgagttgtccagctctagttctcctctgaaattaaccagccgcctgataaccaaattaaaagttattaaatcggaacaaatcgcagcaaagtgtgcacaatgagcgagcagaaaacgagtgggagtgggtcggcggccgctgcccgtctgcaaatcgaggcggagtacaaggacaaggggccgcaatggcatcgcttctacaaggaaatttgtgagacctgcgaccgggaggcgaaggagaagcagttcagcacctcggaatcggaacgccacacgaaccgcggcctgaatcgctatcgggatgtgaatccgtacgatcattcccgcattgttttgaagcgcggcagcgtagactacatcaatgcgaacctggttcagctggagcgcgccgagcgccagtacatcctgacccaaggaccgctggtggacacagtgggccacttctggctgatggtatgggagcagaagtccagagcagttctcatgctcaacaagctgatggagaagaaacagatcaagtgccacctctactggcccaacgagatgggagccgacaaggccctgaaactgccccacgtcaaactcaccgtggagctcgtccgtctcgagacctaccagaactttgtgcggcgatggttcaaattaaccgatctcgaaacgcagcagagtcgtgaagtgatgcagttccactacaccacatggccggactttggcattcccagctcgccgaacgcattccttaagttcttgcagcaggttcgcgactccggctgcctcagccgcgacgtgggtccagccgtagtgcactgcagtgccggaatcgggcggtcgggcaccttctgcctggtggactgttgcctggtacttatcgacaagtacggagagtgcaatgtgtccaaggtgctctgcgagctgcgcagctaccgcatgggcctcatacagaccgccgaccagctggacttctcctaccaggcgatcatcgagggcattaaaaagctgcacgatcccacctttcttgacgctgaagaacccctcattagcaacgacacagagactcacacactggatgagctgccgccgccattgcccccacgcgtccaatcgcttaatctgccactggcccccaattccggcggtatactttcgctcaatatgcgcgcggcccaggctaatggagctgaaagtatcggcaaagagctgagcaaggacgccctgaacaacttcattaatcagcacgacatgatccacgatgccgaggtggccgacagtcgtcccttgccgccattacccgtaagggctttcaacgattcggacagcgatgaggattacttgctggatgacgatgacgaggacgacaccgatgaggatgaggagtacgagaccattaacgagcacgatgccgatccagttaatggacacgtgcccgcgacaacacagccacatgccgacgatgttaatgccaacaacgagaagccagcggtgccagtcgacgagcagcacaaggcgaacggcatcgatccaattccaggccagctcccagccagtcccgagaacgagctgaagcggcgaaaacgcaacgaataccaggccagcctggagcagaaggtcaacgacatgaagcggaagcagcgggagaacgaggacaaacagctggcggcaaagaaacgaaggcgcgggaaccgactcaaaaaatccaagacaaagtaacggcacagcccatccaggtcagcaccaacacaaagaaacaaactaaacatatcattttgcattactgtagcttctaatgcctaaataaactatttttaaattggaaacca

SEQ ID NO: 26571 - protein, 535 aa, DROSOPHILA
MSEQKTSGSGSAAAARLQIEAEYKDKGPQWHRFYKEICETCDREAKEKQFSTSESERHTNRGLNRYRDVNPYDHSRIVLKRGSVDYINANLVQLERAERQYILTQGPLVDTVGHFWLMVWEQKSRAVLMLNKLMEKKQIKCHLYWPNEMGADKALKLPHVKLTVELVRLETYQNFVRRWFKLTDLETQQSREVMQFHYTTWPDFGIPSSPNAFLKFLQQVRDSGCLSRDVGPAVVHCSAGIGRSGTFCLVDCCLVLIDKYGECNVSKVLCELRSYRMGLIQTADQLDFSYQAIIEGIKKLHDPTFLDAEEPLISNDTETHTLDELPPPLPPRVQSLNLPLAPNSGGILSLNMRAAQANGAESIGKELSKDALNNFINQHDMIHDAEVADSRPLPPLPVRAFNDSDSDEDYLLDDDDEDDTDEDEEYETINEHDADPVNGHVPATTQPHADDVNANNEKPAVPVDEQHKANGIDPIPGQLPASPENELKRRKRNEYQASLEQKVNDMKRKQRENEDKQLAAKKRRRGNRLKKSKTK

SEQ ID NO: 26572 - DNA, 3008 bp, DROSOPHILA
ggcggattctgttcagtggcagtttggcttgcctttcgagccttttggtaaaacattatcggtttgatagttgacagtggttttgttgggtgcgtgttggtttgtttgttgattagtgtacgtggttaggattcgatggaaataagaagtgtgggcgttttagtattcaatattagtgtaggcgtggattggatctagagtctagcagatgtggtggacttttgtgggtggacttttgaacgctagggcagcagcatgcaggtaagatttatcatttacaagtagttacaatcacttgacttcgaaacaaatgctgttagtcagatctaaatggctatttcggctaattatcggctttgtactcaccaattcgttaggattatttggatatggattcggatacggatactaaaaacatttgtttcagtggttcagtattggctttgtttgttggttggtttattgtttggctttatttggaattactgcattatagatttctagatttctagatatcgctaggcatatgtgtatggtgtttcgttggaaagagcgttagcggtgtgcatacagatacggtacaggatttatcatattatttcataaaattaacagcaagtataatgattaaaaacaaacgttgcatactctagggcattagcattacgtaagtggtattaactaaagctacgatcagaacactagctcgatcctctcattcgcgtggcgtggttggtgcaacaggtgctggtgcagtggaaaggtcggaatcgtttgcccctccagtgcgggagattctgtgcctgcctcataatttcccgtgtttcaatattgttgtaatttcgtaatttctattcccgccgatgcccatcctatttgctatgtacagagaaattgggtttgctatactgactagtgtttaacatctgtttgtttgactaagctatgcgtaatttggcaaatatcgtggggcctaagaccaaaatgatccccagagctcctagaatagcagactattgttgctgtacttggcgtccgcaccgctgaagccgttcaggcagctgtccacccccgagtcaccctggtcctccgtctccggccgcagggccggcttttcgcccagcggctcgctctcgaagagcggattcatgacaaagtccttggatgtggcggacaccgcccggaagctattccgcttgaggtccttgtgcagcagttgcttttcgaactgggtgagcacgccggcggagggcccacctgccgctggacgtctcttggacacggacgagccaaaggacaccccgctaccattgctgtgcaggcttagcgaggactgcgtgtgtcgcttgggcagtgaactgtagctgctccgccaggagcgctgcgatctcaggtcaaagtcgtcgtcgtcacccaaacccagactcgattcgcggtaatgggacgccgaggtcgaaggtcgctcgaggggcaccgatctctcgtagcccagcgagggggagggggagtggaaggggcggctgttaatgaactttagtgagctactgcgtcgcactggcgtggatagggtccaatgagagaggtcggcagcggtgctctgagcgccacttgaaatgcggccatgcggtggatgtggttctggttcttgatttacctcgttgatcacgatgtcctccacatcctcgcctgcgctggttgtggcggcctttccaccccccgtgctgtcagtggatgtgggagcattgttgatgtagtagtcgcggctatagctaaagattagagattcacaaaagttacttagacctagcacacgctggtaggtgtctctctcccaaactcaccgcttataatccgctttgggcgctggcggatccggattttccgtcagcgccgaagccagtgccttttgctcagcactcggactgatgttgggcacatccatgtagcgctcctgggtgccgctgatgcgctgcttcagggcctccggggagtacggattatttggcatttcaacggcgttgtaccacttcttcacctcgcgttccgcaatggaacctggaaatggttaggatcaagttcgtttacgaattaatggagtctgagcttggcggggaaaatcggagtgaccggaaagtaattaacaaacttgcgctaagctattctctcttaaaagttgttgatcttcccagttgcaaatgaaaaactttaattttctccagtaaaactctttttgtttgatttcgattgaaattcgtaattaacttctttattacaaattttaaaaggagtaaatatttaatattactaggcactattatgattacaaggaagtgtgaattggaatggctaagtctttgaaatcaaacaaaaacttgttaatacaataaggcatatttccaaaacctattcatattttcatagcacgaaattaccggcttttcatttgttattcaaatcaaaagagactttcatagatagctagtaattactttcagttccccttgtttcatggttaaataggtcggctgatccgaatgccaaggatcagccgtcgacgggtcacaacacacaaaggacagtagagcctggctaacataaacacgtatttaagcagtcgtagggggaggacaacaaacaccgagagatgacagttatggccacaaccgagtgttacctggcacaaagcgccgcaacagtacaacatcgtcatcgtcgacgacaacgtcgtctggttgggcacccgatgatccaccgtttgggagctcggtggcatagctacccgaccatcgaagggaaccatttgttagttttccattggtgcgtctgcttcccgcgctcgggttgttagtttgggttagaggaagatgcaggtgtgtgtgcacattgttgttagagcttgtgttagtactaagggatcgctgatcgtctaggactaagaccctctggctaacaaactcctgatcagagtcaccatctgcgttgaatgtctcgcaggcagtggagggctc

SEQ ID NO: 26573 - DNA, 936 bp, DROSOPHILA
atgccaaataatccgtactccccggaggccctgaagcagcgcatcagcggcacccaggagcgctacatggatgtgcccaacatcagtccgagtgctgagcaaaaggcactggcttcggcgctgacggaaaatccggatccgccagcgcccaaagcggattataagcgctatagccgcgactactacatcaacaatgctcccacatccactgacagcacggggggtggaaaggccgccacaaccagcgcaggcgaggatgtggaggacatcgtgatcaacgaggtaaatcaagaaccagaaccacatccaccgcatggccgcatttcaagtggcgctcagagcaccgctgccgacctctctcattggaccctatccacgccagtgcgacgcagtagctcactaaagttcattaacagccgccccttccactccccctccccctcgctgggctacgagagatcggtgcccctcgagcgaccttcgacctcggcgtcccattaccgcgaatcgagtctgggtttgggtgacgacgacgactttgacctgagatcgcagcgctcctggcggagcagctacagttcactgcccaagcgacacacgcagtcctcgctaagcctgcacagcaatggtagcggggtgtcctttggctcgtccgtgtccaagagacgtccagcggcaggtgggccctccgccggcgtgctcacccagttcgaaaagcaactgctgcacaaggacctcaagcggaatagcttccgggcggtgtccgccacatccaaggactttgtcatgaatccgctcttcgagagcgagccgctgggcgaaaagccggccctgcggccggagacggaggaccagggtgactcgggggtggacagctgcctgaacggcttcagcggtgcggacgccaagtacagcaacaatagtctgctattctag

SEQ ID NO: 26574 - protein, 311 aa, DROSOPHILA
MPNNPYSPEALKQRISGTQERYMDVPNISPSAEQKALASALTENPDPPAPKADYKRYSRDYYINNAPTSTDSTGGGKAATTSAGEDVEDIVINEVNQEPEPHPPHGRISSGAQSTAADLSHWTLSTPVRRSSSLKFINSRPFHSPSPSLGYERSVPLERPSTSASHYRESSLGLGDDDDFDLRSQRSWRSSYSSLPKRHTQSSLSLHSNGSGVSFGSSVSKRRPAAGGPSAGVLTQFEKQLLHKDLKRNSFRAVSATSKDFVMNPLFESEPLGEKPALRPETEDQGDSGVDSCLNGFSGADAKYSNNSLLF

SEQ ID NO: 26575 - DNA, 5159 bp, DROSOPHILA
ggctgtaggccttgccttcatcgtaggatttgtcactgttcagatcgccagtgtttatttctcctcgagtgtgtgccaaactggatacatttacaatccgactgggtgaggatttctaggaataaaatggttattaatcagatttaagatctagtaaagctgtgtggtaccttgagtagatccaacagtaaattggtaagcaggaaatgacccatgtgattaacccccagctgaagttcgatgccatctgaggtgagagatctgggacagcgcataacaccggcgttgttgatcagtacgtgcaggtgctcctgttccctcttgaagctgcggagatggattgcggaataaacacaacttaggccttaggtagacttacgcggcaacaaagtgacggatggactcctgggaagccaggtcacattgccggcagtacacatatttgttcttcgtttccagcacgatttcctcgcgagcctgcacgcgagaagtatttagtcgtgttttaggaaattatctcaataaagatcgtacctcctcacatttctttaggtttctgcatgccatgtagacggtgccacctcgcttcgcaatctctctcaccgtctccttgccgatccccgtgttggcaccggtgacaataaacaccttgccggtctcattggtttctttggtgaactgaccgccttgcataagatccctgtgaggcggtataaaatgtgtagtcaaaacaagggaattctgtgtgagaagcagatcactcacttcacgaagaaggccagtcccgtcgtcgtgccggtgaagctcagccagaacgcagtgcggctcttgagaaacgcaaatagtgacattttaggaactcaaaaaatatacaaattagctaataaacgaaaacagctgtgtttaccctgttaaggctaacagcgctcgttaacagagtcctatcgatattttcggtcatctgtgacggagctttccctttgttgttgttcgtgggctgctgcttagaacaaactttacacgtaaataatctaattgcgttaattaactggcttgagctaaacaacgacgtgcgatttgatcgagggaaggaacgtagttgagatctgggccaggaaatcccgactaggcaagcaggaaaacaatgcgtcgcaatgcgtaagtcagcgccaactcgactgttgctttttccaagagatccgaatgtgatcggagttctcccctcatcttcaggcgccaacaacaacacaatcaggaagaaatcggccccgacgacgtggaagacatctttgcccgtcccgcctacgatgacgacgagttcgaagatctgctccctctggccaggaggcccaatggccacgcccgactcggccgctacgagaacactctggaggtaaaggtccaagagggagacacactccaggcgctggccctgcgctttcactcctctgtggcggacatcaagcgcctgaacaagatcgaccgcgaaaatgaaatccacgcacatcgggttattcgcattccggttacagtgcacaacgtcctgctgggcaacgggggcctcgaagcccttcctgcggtccaccgcagcgggaacaacagtcctagacacaatattgagcgggaaccagctcccgaacgcaatcccctcgaggatgcgcggcaaatgctggatgagcgactcctggtggcggcggtaaatgcttcaggcgccgtggatcacgagaaaccatcgacgagcagagctgctggacaattctacgagggagcccagggtgcgccgaatgacgaaggtgagtacagaagatgcagttgggaatgaaagcccacagttcgccgcggttttaaaaatttctgaaatactttcactgttggtgaagaaaggtcagtgctgatttcagtgcgagtgtacatatatattatttaatttaaaaataaaagtacaggtaaggtaaagggtgcagaatgtatgtttacttatcaatcaagcaatatcagtactttaaaaataacaaagtttcttatctatttcaattcaaatatctaccaattttgaactaaaacacatgcatggaaattcgcaacatgctctaagataagataagaaatataacagcatttagacattttatgtgttaaaaatttaagctccagttactaattagtatatttccaattgaaataccataaaataattttgggaaaagtttaagatttgtattttaacagtagaagttaaaagtggctacacatcgatagttcccagtgttaaagtcagtgttgggaaagcatgtatcgattcgtcgatagcgctagcggtgcttctcccatctctatgccaaattgttcagtcattctcgccgtaaaacaaaaggaaaacatcgcataaactcattttttgccttaaaaaccgtacaattgcaatcgaataagatgccggactacctgggcgacgaccagcgcaaggtgaagcacgatgagaaggaggacaaggagatcaagtccctcgacgaaggcgacattgagcttctaaagacttatgggcagagccagtatcacaaatccatcaagagcatcgaggaggacattcaaaaggctgtgaagcaggtgaacgagctgactggaatcaaggaaagcgacacgggtctggcgccaccagcgctctgggatttggccgccgacaagcagatcctgcaaaacgagcaaccgctgcaggttgcccgatgcaccaagatcatcaacgcggattccgacgaccccaagtatatcatcaatgttaagcagttcgccaagttcgtggtggacctagctgactcggtggcccctactgacatagaagagggaatgcgtgtgggtgtcgaccgcaacaagtaccagatccacattccgctgcctcccaagattgatcctacggttaccatgatgcaggttgaggacaagccggacgtcacctacagcgatgtgggcggctgcaaggaacaaatcgaaaagctgcgcgaggtggtggagacgccactgctgcacccggaaaagttcgtcaatctgggtattgagccgcccaaaggtgtgctactgtttggcccaccgggaacgggaaagaccctgtgtgcccgcgccgttgccaaccgcacggacgcttgctttatccgcgtcattggctctgagctggtgcaaaagtacgtgggtgagggcgctcgtatggtgcgcgagctcttcgaaatggcgcgttccaaaaaggcttgtctcatcttcttcgacgaaattgatgctatcggtggtgcccgattcgacgatggggccggcggcgacaacgaggtgcagcgcaccatgttggagctgattaaccaactggatggcttcgatccgcgcggaaatatcaaggtgctgatggccaccaaccgacccgacacgttggatccggcgctcatgcgtcccggtcgtctggaccgaaaggtggagttcggcctgcctgaccaggacggtcgctcgcacatctttaagattcacgcccgctccatgtccgtggagcgagatattcgcttcgatctgctggcgcgtctatgtcccaactcgactggtgctgagatccggtcagtatgcacggaagcgggcatgttcgccattcgggcgcgtcgcaaggtggccacagagaaggatttcctcgaagccgtcaagaaggttatcaagagctacgccaagttcagcgccactccacgctacatgacctacaactaagttacatttattggcactattctgtatcctctgcaaactgtaacactgcagctggcaatttattaaataaagcgaaatctatacctccaccaactgaaaactgaggtgttttatatattttataaatcttgtttgcaatgtcttttaattgcgtaatcatgatctcttaactttgtctacagccaatatggagcaaccctacgaggaaaatgccgctctgcttaaccacatggtggacaggcacgctccgctagtgcgtcccatccctggaccctctttgagtgccatcgactggtccggatcggactgcgacttgtcttggatatgtctgctgatcttcatactcgccttgtgtgtcgtcatacccttggtctacgtcatctacctagcagagcatccacatcacaaccatagtgcccagtagttgggtaatgtctgcacccgaagtggtcatcattccaaacggcaccccctcacccggcaccctgtcaatctctcagatgagcctggcgcatttcaaatgcaaccccaggcgacggaatttatttttatacctatgcgcgtaactttgtattgactcttgataaaaaaaataaggtctttgtcgacagaacttttaaattaccacgatttgggtgcttcccagatgcataggcttgtctatgcgccacataacttctggcagcaccaattgcaggattctaagatccgattgtgctgtgaatataaatcgtaaccccgccgttttgcttttctatatgttttattgagtacaattatgtaacatttaaactacaatagtacgggtaaggtgtaacattattcagctgaagttgggatagtttctcttacgccaaaaaagtacgtaatacatatcttagagctaaataaatagtatccatggatataagaattatgtaatactaaatacgaactacaattaacaatggcgcatgctaacggccaactgaacttaagtactttttttccgtgatgtttcgactgggaaatggaggccatggcacatggtatttggcgaagatttggtttggattatggccggattggtgctttgccattgtcgtaaattttcccctccgggaagatcaactaagggtcgcacccaacaagactgtattcgcatattcacttgaactttaaattctcaaagaaagcaatattgctccggaggaatccgtggcgcacgggcacaggactcgccggtgaggctataggtggagtggcctccgaatgtatagaaggatccctgaaatgagatgaaatgtagaatagtaatagctcgaccaaggttctctaaagagctaacgtttcgagtgatgataagtccgaggcgatcgtagactcatcggctacttctgccatggagacggcgtgctccagtttgtgccgcttggccagtgacg

SEQ ID NO: 26576 - DNA, 960 bp, DROSOPHILA
ctgcttagaacaaactttacacgtaaataatctaattgcgttaattaactggcttgagctaaacaacgacgtgcgatttgatcgagggaaggaacgtagttgagatctgggccaggaaatcccgactaggcaagcaggaaaacaatgcgtcgcaatgcgcgccaacaacaacacaatcaggaagaaatcggccccgacgacgtggaagacatctttgcccgtcccgcctacgatgacgacgagttcgaagatctgctccctctggccaggaggcccaatggccacgcccgactcggccgctacgagaacactctggaggtaaaggtccaagagggagacacactccaggcgctggccctgcgctttcactcctctgtggcggacatcaagcgcctgaacaagatcgaccgcgaaaatgaaatccacgcacatcgggttattcgcattccggttacagtgcacaacgtcctgctgggcaacgggggcctcgaagcccttcctgcggtccaccgcagcgggaacaacagtcctagacacaatattgagcgggaaccagctcccgaacgcaatcccctcgaggatgcgcggcaaatgctggatgagcgactcctggtggcggcggtaaatgcttcaggcgccgtggatcacgagaaaccatcgacgagcagagctgctggacaattctacgagggagcccagggtgcgccgaatgacgaagccaatatggagcaaccctacgaggaaaatgccgctctgcttaaccacatggtggacaggcacgctccgctagtgcgtcccatccctggaccctctttgagtgccatcgactggtccggatcggactgcgacttgtcttggatatgtctgctgatcttcatactcgccttgtgtgtcgtcatacccttggtctacgtcatctacctagcagagcatccacatcacaaccatagtgcccagtag

SEQ ID NO: 26577 - protein, 271 aa, DROSOPHILA
MRRNARQQQHNQEEIGPDDVEDIFARPAYDDDEFEDLLPLARRPNGHARLGRYENTLEVKVQEGDTLQALALRFHSSVADIKRLNKIDRENEIHAHRVIRIPVTVHNVLLGNGGLEALPAVHRSGNNSPRHNIEREPAPERNPLEDARQMLDERLLVAAVNASGAVDHEKPSTSRAAGQFYEGAQGAPNDEANMEQPYEENAALLNHMVDRHAPLVRPIPGPSLSAIDWSGSDCDLSWICLLIFILALCVVIPLVYVIYLAEHPHHNHSAQ

SEQ ID NO: 26578 - DNA, 5034 bp, DROSOPHILA
cacctcgttgataattcaccagaagctgaaaccgctcgaaaatatgatcatcctagacatcacttgcgacagggagttcgtcatggactacattgtcacggtgatccttacagcattgtctcttgtgcagtacaccatatcaactggaggaaatataagcgagtgcgtgacccataaatagcaacccatctggaccacactattaggaggatgagatcattatataactgtggagctggacacagttatcgtataattgcgtgggtcaaaagaacttccttagcgcctacaaaagtgtatcttttgaaagcagaactcagagctcgtaattataaagcactaaatgcttactatttaaatgctacaaatggttttattgtttttatacaaaattaaggtttattgactgtagtagtaaacttgtcagatacgtggttttacgcactgcgattcaacaacacaggatttcccgtttgcatagagaattatgagaattcgttcgtttcaagaaaatcccgtgactctaatgagaacaagaaaatgctgtcactgtcgatttatccctttagtttcgatttcacgtgatgcttaaggtcctgttctcgtttcctcggcagacaagagatgctcaattgtgcataagatttgccacactggagcccagttttatttagcttacatatagtttaaattttatttagtaaatatgacacatgttcctatctaacatattacctgaactaactatacgatttacttgtaaagtaacaatcaacctaaattattgtagttaaggtccacgtaacaggtaggatatatgaatcaggatatcatgttcctcgactagcaaatcctttaattgttcttattacctagtacaggccattgaatctggtatatcctattatactaagagtgcgtacttcaataaccacggctgttgtgaaatttaagtggctttaattgcgactagcccaatcacactattccagtagcccatttacagcgcaattttcgcccacttctcggactgcgcccacaaccactgggccatctggtcgtcgagggcagcgggagctaccggagccagagcgcaatcgctgaagtactgacccgacactctttcgagatcaggatccaaggcagcatacaaggtggtctgggccccgttcttaggcgtcttcatcacggcccaaaggagcggcctcaaaatggttctaaatgaaaaccaaaaattagtaagtgtataaaaagagaattgaaagaggacacactctaccacatactgagcaaactttgtttggaagaagatcatgttcctggctatctccgtgtctgctattccaggattaagggcgttgaccgtcacgcccgttccctccaaccgcttggccagttcgcgggtgaagagtatgttggccagcttactttggcagtaggctactccctcgtcgtaaaaatcagagctgttgatgtcatccaccttaatctgaccccgttcgtgggccctgctggcgaccaccaccacccgactaggagccgacctctccagcacgccgagcagtaggttggttagcaggaagtgtccgatgtggtttacacccaggtgcatttcgaatccctctttcgtcaatctatgcggttcccaaaacacaccagcattgttgatgaggatgtgcagcaccctctgctctttcttgaagctgtttgtgaatgaattgttagttcaagagaaagacactacggagtggcatgactcacttctctgcaaactttcgaatggaatccagggacgacaagtcgcactcccgtgagaagacattggagtttccggtctcctttacgatttccctgcgcgctctctccaccttttctttgttgcggcatgccatgtaaacggtggctcctctcctggccaactccatcacggtctccttgccaagacccgtatttccgccagtaacgatggccacttttcccgtctcatcggtctgcttcctaaactttccgccctgcatatacagcctgatgtgtgttaaaacaatgcatgttaatcggtgataactactttgtcgtcacttttatacgtcgtcgataacgcttctcagcgttacattttaaattggcgtctcacttacctcacgcagaaggcgataatgccgacaatcccatgggccaagaagacgggtgctatgctttgcagaaaccttataacaatttccatactggctaagcggtccgctccttcttgtggtctattccaaagtgccaccgcgggcgaaattgtgcgggtttttaagagatcgccgcagcgattaccggacgacaactgataaaattgatagtacgggcttctataagtgttctttaatcagagaaccgctattcgaacacattcaaaattgcttatagcgacaagaagccgaaaccgtcaaactttacaaagagcgaaaatgttgcatactgccgaaatgaacctaaacttttggaccgaaggctcgggttaaaatgtaatggatatacacgtctattttaaacaaatgatgtagaaattgcccctaaccggtttcggggtacgtaagtttgaacgcacacaagccctgagctttcaactcttattagtcggccacgttaaaataactaaaacaagacaagtggaattgtgtagactgtaagaaactgaaaatttatgcgaagtaacagagggattgtcagaaacatatttcacaatacgaactattgtattttaatcatcgttggcttcgtccacttttcactgactgcccaaagccactttgccgtttgggtgtcggtggcagccggcgccatttccttcagtttgcagtcgctgaagtattgtcctgtcaccttttctagctcgggatccagagcaacatacaacgaggtctgagcaccatttctcggagtcttaacaaagggccaaaacaaaggcttaacaaagagtctgaaaagataagtatttcgtaaaaaaggttttaatggcattacttctctacaaacccagcaaaaaaattattgaagaatcccatgtgcctgattatttctgtgtccaccacacctggatgcagggcattcgccgttacgttggtgccctctaatcgtttggccaactcccttgtgaagagtacattggccaacttgctctggctgtaggccttgccttcatcgtaggatttgtcactgttcagatcgccagtgtttatttctcctcgagtgtgtgccaaactggatacatttacaatccgactgggtgaggatttctaggaataaaatggttattaatcagatttaagatctagtaaagctgtgtggtaccttgagtagatccaacagtaaattggtaagcaggaaatgacccatgtgattaacccccagctgaagttcgatgccatctgaggtgagagatctgggacagcgcataacaccggcgttgttgatcagtacgtgcaggtgctcctgttccctcttgaagctgcggagatggattgcggaataaacacaacttaggccttaggtagacttacgcggcaacaaagtgacggatggactcctgggaagccaggtcacattgccggcagtacacatatttgttcttcgtttccagcacgatttcctcgcgagcctgcacgcgagaagtatttagtcgtgttttaggaaattatctcaataaagatcgtacctcctcacatttctttaggtttctgcatgccatgtagacggtgccacctcgcttcgcaatctctctcaccgtctccttgccgatccccgtgttggcaccggtgacaataaacaccttgccggtctcattggtttctttggtgaactgaccgccttgcataagatccctgtgaggcggtataaaatgtgtagtcaaaacaagggaattctgtgtgagaagcagatcactcacttcacgaagaaggccagtcccgtcgtcgtgccggtgaagctcagccagaacgcagtgcggctcttgagaaacgcaaatagtgacattttaggaactcaaaaaatatacaaattagctaataaacgaaaacagctgtgtttaccctgttaaggctaacagcgctcgttaacagagtcctatcgatattttcggtcatctgtgacggagctttccctttgttgttgttcgtgggctgctgcttagaacaaactttacacgtaaataatctaattgcgttaattaactggcttgagctaaacaacgacgtgcgatttgatcgagggaaggaacgtagttgagatctgggccaggaaatcccgactaggcaagcaggaaaacaatgcgtcgcaatgcgtaagtcagcgccaactcgactgttgctttttccaagagatccgaatgtgatcggagttctcccctcatcttcaggcgccaacaacaacacaatcaggaagaaatcggccccgacgacgtggaagacatctttgcccgtcccgcctacgatgacgacgagttcgaagatctgctccctctggccaggaggcccaatggccacgcccgactcggccgctacgagaacactctggaggtaaaggtccaagagggagacacactccaggcgctggccctgcgctttcactcctctgtggcggacatcaagcgcctgaacaagatcgaccgcgaaaatgaaatccacgcacatcgggttattcgcattccggttacagtgcacaacgtcctgctgggcaacgggggcctcgaagcccttcctgcggtccaccgcagcgggaacaacagtcctagacacaatattgagcgggaaccagctcccgaacgcaatcccctcgaggatgcgcggcaaatgctggatgagcgactcctggtggcggcggtaaatgcttcaggcgccgtggatcacgagaaaccatcgacgagcagagctgctggacaattctacgagggagcccagggtgcgccgaatgacgaaggtgagtacagaagatgcagttgggaatgaaagcccacagttcgccgcggttttaaaaatttctgaaatactttca

SEQ ID NO: 26579 - DNA, 1802 bp, DROSOPHILA
ttttttgagttcctaaaatgtcactatttgcgtttctcaagagccgcactgcgttctggctgagcttcaccggcacgacgacgggactggccttcttcgtgaaggatcttatgcaaggcggtcagttcaccaaagaaaccaatgagaccggcaaggtgtttattgtcaccggtgccaacacggggatcggcaaggagacggtgagagagattgcgaagcgaggtggcaccgtctacatggcatgcagaaacctaaagaaatgtgaggaggctcgcgaggaaatcgtgctggaaacgaagaacaaatatgtgtactgccggcaatgtgacctggcttcccaggagtccatccgtcactttgttgccgccttcaagagggaacaggagcacctgcacgtactgatcaacaacgccggtgttatgcgctgtcccagatctctcacctcagatggcatcgaacttcagctgggggttaatcacatgggtcatttcctgcttaccaatttactgttggatctactcaagaaatcctcacccagtcggattgtaaatgtatccagtttggcacacactcgaggagaaataaacactggcgatctgaacagtgacaaatcctacgatgaaggcaaggcctacagccagagcaagttggccaatgtactcttcacaagggagttggccaaacgattagagggcaccaacactccgagaaatggtgctcagacctcgttgtatgttgctctggatcccgagctagaaaaggtgacaggacaatacttcagcgactgcaaactgaaggaaatggcgccggctgccaccgacacccaaacggcaaagtggctttgggcaggcggaaagtttaggaagcagaccgatgagacgggaaaagtggccatcgttactggcggaaatacgggtcttggcaaggagaccgtgatggagttggccaggagaggagccaccgtttacatggcatgccgcaacaaagaaaaggtggagagagcgcgcagggaaatcgtaaaggagaccggaaactccaatgtcttctcacgggagtgcgacttgtcgtccctggattccattcgaaagtttgcagagaacttcaagaaagagcagagggtgctgcacatcctcatcaacaatgctggtgtgttttgggaaccgcatagattgacgaaagagggattcgaaatgcacctgggtgtaaaccacatcggacacttcctgctaaccaacctactgctcggcgtgctggagaggtcggctcctagtcgggtggtggtggtcgccagcagggcccacgaacggggtcagattaaggtggatgacatcaacagctctgatttttacgacgagggagtagcctactgccaaagtaagctggccaacatactcttcacccgcgaactggccaagcggttggagggaacgggcgtgacggtcaacgcccttaatcctggaatagcagacacggagatagccaggaacatgatcttcttccaaacaaagtttgctcagtatgtggtagagtgtgtcctctttcaattctctttttatacacttactaatttttggttttcatttagaaccattttgaggccgctcctttgggccgtgatgaagacgcctaagaacggggcccagaccaccttgtatgctgccttggatcctgatctcgaaagagtgtcgggtcagtacttcagcgattgcgctctggctccggtagctcccgctgccctcgacgaccagatggcccagtggttgtgggcgcagtccgagaagtgggcgaaaattgcgctgtaa

SEQ ID NO: 26580 - protein, 594 aa, DROSOPHILA
MSLFAFLKSRTAFWLSFTGTTTGLAFFVKDLMQGGQFTKETNETGKVFIVTGANTGIGKETVREIAKRGGTVYMACRNLKKCEEAREEIVLETKNKYVYCRQCDLASQESIRHFVAAFKREQEHLHVLINNAGVMRCPRSLTSDGIELQLGVNHMGHFLLTNLLLDLLKKSSPSRIVNVSSLAHTRGEINTGDLNSDKSYDEGKAYSQSKLANVLFTRELAKRLEGTNTPRNGAQTSLYVALDPELEKVTGQYFSDCKLKEMAPAATDTQTAKWLWAGGKFRKQTDETGKVAIVTGGNTGLGKETVMELARRGATVYMACRNKEKVERARREIVKETGNSNVFSRECDLSSLDSIRKFAENFKKEQRVLHILINNAGVFWEPHRLTKEGFEMHLGVNHIGHFLLTNLLLGVLERSAPSRVVVVASRAHERGQIKVDDINSSDFYDEGVAYCQSKLANILFTRELAKRLEGTGVTVNALNPGIADTEIARNMIFFQTKFAQYVVECVLFQFSFYTLTNFWFSFRTILRPLLWAVMKTPKNGAQTTLYAALDPDLERVSGQYFSDCALAPVAPAALDDQMAQWLWAQSEKWAKIAL

SEQ ID NO: 26581 - DNA, 32885 bp, DROSOPHILA
tgcatgaaacataatatcaaagtgcttactcagcattgggtcggaaacccgcacgcagccggcaaacacagcatatttgcgttcccgctgcgagtctttgttagctataagaataattttaagcttcagttcgaatttgcatttgtctgaataaagagcgacagctcatcaactccgactaagcgtcgtaaaatatattcttgttacttactctgccagggcacaaggctggcagttaaaagaggaaagttcctctctacataaataacaatcttctgctccccggaatccccggagcagccaacaaggaagcctttcacctctggaggattccggacgacgacgatcgcgagacggtgcgatccatctttaaataatttgtacatgttagctagatatacattcttattgcttaatgctgggctaataggtaggatcgagatgacaatgtaattcttatatctaacgtaaaccatgcactggcacagtggtacattgtgccttttgagtatccatcctaccacaagatgtaacgataaacgaatttatattgtctacgagttgcagtggctatctcagaggatattgtgtgttcgtattgtggggctctcctttgccggggaaatacttgctccggtactgccgctaccacgcgtagactggaggtgggaagttgtgattagggaagcgtcaccgatcccaggctatcttgctctgtaccggccagtcccgcatgacgccttttcggttttcactaacgctccgtggtttggcttatgccgcagtccgttcgaccctatccattcctcaaactggtgcgttcgtacttagatgggcttgcttgacggtccagtttccactgccacgagagccgttctcgttgtcctggatggtgcgggctgcgctactgggtgatagacacttaggctaggaatttctgtcgactcacggtagccaacttactctttagtttattccttttattacagaaatcaaacaattttgtttaggcattttattaaatagtttacattatggtaacattaatataacacaacatttaatcgaaatcaactctgtattgagagagaggttttaacagaagagcccttttaagagagaacgccaactctatatcctattattatcttctgagagcaattgtacttaacgtattataaagcattaaaaataacgaactgacgaactcatctgacgattctacacaaaatgatatgaatgtattatttctatacggtaataaatttaaagtcatagtaattacaaataaaacttaataaatagttgttgaacaacagcgaagacaattaattgtaaaatatgtttataagggcccaaagagatttactgctggatgattatcggctgtgtttcccaaaaattgaccatacagttccttatagcgatctagggaaagaccgccacgtttccggtcctcgtcctgaaaaagataatttcaatacttgttatatttttataataaaaatcgcattgaaatataaaagcctttttctcagtctgtctcgcaagttagtttcccacgcaattactaattatttcatatcctttataggagattagtgatcatggtcataaaaatacatatcattacaaatagataaataagaaatctttttattagtaagttataatgtactaagtttaactaaagcaatatatataagtaaaaatgtgttaatcattcgcaaaaaaagtcatctgtcaaccttaaatactaccaactcagatacaaaaccagcccaatacccggcaacaaaatgcttgatttttcgaaccattaggactatttgcccccatatggttaatgaaaggatatttagggaggctgcacatacaaaaatataatgtgctggaatcacggaaactaagtcataagtagaagtagagaacttggctcctacagcatcttccagaatgaggacctgaagggcatactcaccagtgtctttgatatgactttagcaataaacaattttcatatttttttattttataaatatatattttctacttcgtattatttttatgaaatatttattcctcaatgtaatgtcttttttttgaaaaattttattccaatttgatatttttaagcagcgcgcaatttcatcatatgctacgaaactaccaaaactccccaaatatgtaaattcgtttcttcgatcagcattaatttcggcccgaaaatcgtcttctagcacaacacacaagcaagcaaattatatttttagattcgttacgctctcagcgtaagcgagcggaaagagggaaattttggcagtcaccaaaccaatgcgaaaccaatgtatggctgttacgcatcttgttattcttgtgtctttagttgtacgaaggtgctactagtgagaaccgcttgacgagcaatactacccagactgaggcacaaaagcctaccaaataggctcctcacaatgcgcaggtgcccaaggagcacctgggcttcgaaccaaactgcaaggagactgacagaacagactgctgtcttagatgcggtgagcgtggccacaatgcctgatctgcagcagcgatgtggatagtaaccacctgacggatagttttgcgtgcccgacctacagagcgagcctaaaaaaagccaagagcctccataatgcacggccatattagcgtaatgcggctcaatgttaatcgttgcgcggctgctcaaaacctcctgattcagactgcggagaagcgcaatatagacttcatgctcgtaagtgaaacttacgtcactaaaaggggacaatcctccatgatccaagacgagtcaggtaaaagagctatcaatttctacaactctcttcacgtccaggaattggctgcatcacctatgcggggagttgcatatgtgaagataaaacacatacatatgtacagctgctatgctccgcctagcgacacccctgatcagttcggggagtttttggaggcacttgtggaccatgcgagaaggcgaagcccgatgatcattgccggtgattttaatgcctgggcagtggaatggggcagcagtgtatccaatcccagaggccaagcagtgatagacggcatgggaatgctggacctgatactgctgagcgacggacggaaaacgacgtttaacaacgacaggggtacgtcatttattgaaattatattgtcagcagagggcttgtgggttacgacaactgggtggtccatgacatcgtaacgctgagcgaccacactcccatttccttctgtctcttcctagagggcacgccctggagtcgacagagtagaacagctgggcaagcatgggacaccaggaagatcgatgaggtcatgctggcttaacagatcaattccctggaattcccaaatggggatgcagagtgtatgacggatggcctcatgaatatgcttagtagaatttgagacgtaaccatgccaagaaaaataaggtacagcgcaaaccacccaaagccaactacggtctgattgcctcagggctaggagattggcgcaacgagccagaggcagttcccaccacgcggagctcatggaggctttcggagtttaaacacggcatagtggatgccaaaacgcggtcgtatgaggaactgctggatagttaatagacagcgagatctggggactcgcctacaagcttgttgccaacaagcgaaggaagagagcggtaaccccatctgaccctggggtcctggctaacattgtagggaagctattctcaaatcagacaacactatggctgccaacagaggtagcccctgccccggattacccgtgcgtcatagaacttgaagtcggcgaggcagcaaagcgcatcaaacccaacaaagcccctggactagatggcattcctggagttgttattaaatcatcgtcagggccaccttccagcaatgtcttctggacggaatcttcccaacaaggtggaaaagccagaaacaagccctgtttccgaaaggcaagggaccagcacatgctgcaaacctactatgcctactggatatagttggaaaactatttgaacgtatcctgtatactcgaatcaccgaaaacatcaacggcctaggaagtcagcaatatggcttccgaaaaggaaagagtaccctggacgttttgctgttttgctgacgatgtagcaattacagcaatcgccaaaacaatcgcatggttgcaaaataaatgtaacactacgattggtgctgccatccgctggctcgagaaagccgggctagcaatagcggctcacatgaccgaggtagtccgaataagcagcaggaaaaaggtggagaatatgctagtctctgtcaatggcacacaggtgacctcccaagagtccctaaagtacatgggtgtaataatagaccacagactatcgtgtgttacgagttacgccagcaaaaaggcagcagtcacagcctcttcattggtcaaactcttggcggtagcaaaggcttcgctgctatacgctgaaccaatctggagcaatgccaggggttcagcaggtgctatggtccatggcccacaggctcattagaggattgaggaccatttccgaagacgcggtgctagcactggcaggcctgccgcccattgatctagagatcaaggctctcagcctaatgcggcgtggtgcttccggctagaggcacacgaggggcagatggcaaacgtcgcgacaggggaggcggtcttaccagatcatccctgaattggcggtttgggcagttatcccagttcctcatgggcctatctactccggttccgccacgtagagtcagctcaaagcttgttctgcttcgattgtgaagaaacagcagaacatgtgctaatgcattgttccaggtttacggtggagagggagcatctgtagacgctgtctggtaccctgttcagtcctattggcttgttcacggctatgctggcgaacagcgagcaatgggagctgggacacagcctaatcatcaatatgatgaagcgagtcgaatcagacgagatggcaccagcgtgagtggctaagcccaaacaggcgtcctgagtggtggcgggcgaagaattctacttcatcgttcccggctagtcgtaaaaggcgactaaaggttggaaggaggagccctcatggactacactgatggaagggagtgggagcctcacatcctgctccccgaagtcataccttgactggcagtcccggtgagcgtgaaaggactgaagatcacgcggaggtttttgttttagtacgtaggaaaaataccattagggtttatgaatcgtgcatgccacccacggtagttggtatctttagaaatttctaattttcctaccgtaagtcggttaaatgaaaaaaaaaaaaaacaaaagacaaacaataaaacgaaaaacaaaagagaatgatatagtcgagttcccctaatatcagatatcctttactcagctggtgtgagtgcgaacacaaaatttgattatttttcggtgatatcgatagatattaaggaataaaatgagaaaaatttttttaattttttgaaggacatcaagaatttttcaaaaatgtgggcgtggcagttttgggcagttttatggcgtagtaggtgtggcaaaaagttattaggcaaatcgatagaaatttacaagactaataaagttagtgcaaaatatcaaaaaaattttaaaaaatgtgagcgtggcagttttgggaggttttagggcgttttttggaaaatcgacagaaatttaaaagactaatgaggagaaataccaatacaaaaaattccaaaatgtaatttatgtaacttacattcaacaatgtttcaaaggctttatcaattggagtaatatcgtcgatggctactctagttatacagttataacggtattctttaactccgactattccatcgctgtctatgtcaagaagcttgaagtttgattcaatgaatgctctcattgcctataaaatataaaatagaaaatggataaaagcgccaaaaatatatataacatatacatttttatcatttaattttaacttaagaactatatttgtcagatgtgatgtaattaactctgaatattccgtagaaaaggaaaaattaagaaaaagcatttaatgacttttacattaattttttgttttgtaaaccttctagcttagcagaaaactcttaaaaaagttaaatatcccaaacaatttaaacacttgtaatgtgtaaagtaaaagttaaaacgttagtttcaatagacaacataaagacatataatatataataagacaaattaaacaacaaagactatcagatacccggaatttaattattggaagtaagagggagaattttcacaatgtgcttggtatatcgataggaactagcaagacagacaggtatgactaaaagaacttggccggcgataccgatgaaaaacatatttacattttgtggtaaaaatgcttctttttgtttgtcaaagtgtaaaaaaaaagaaaaaaaagatctctaagatcagatccctgttactcagcggtcagatttgtgggcgttagagtgggcgttgcaacaaacaacaaacttgcgctgcgtatataactctttatgcttaatctaagccttctaacttttatagttcctgagatctattttttcatacggactgacggacatggccagttagactcggctaacaagagtatatatactttaaatggtcgaaaacgaccatattggctgttacataattttaaacgaatatagtatacacttttacgctacgagtaccggttataaaaactatccaaagatgaagtagaaggctagtgtttaaaaatgaaacgccctttgtgcatctgtttttcaatcttcattggttcgaacttactttgtactttggagatcgcgatgcgcgcggttgcattttgctaaagatgtaagcaagttaccgtttacaaggaaagcctacatgtgaacagatacacacaattagcggatataatgcgataagatttcaaagcgccactttagtaattaggagtttgtacacgccttggaccttgtcgtcttgacctgcatgaacatccatgatacgtcaaaggatccgattatatgggagtagattaggttccagtgtactgatctttgtcagtttctagatgtcatttggtacgcaatgttttcaaaaactttgaacgttggctggcagctgattccacctctccattctgttcatgggtacttccaggcggcatggttcgggttgcgcaatatacgctggtcctaagtattaaatccagccagacgatgaaacctttgatagctaggtcgctaactaccttaatgtgaatagcatacaaaaatggcaaaccaggtcagcccgaaccgtgggctttttcccttgaaatcctaaattaagatcggaacagcgtaatccaaaccggtatgttgacaacaacggctggattggacttggggaatcgaaagcgcatccataatatggtgactggtgttcttgcgttggaggaagctgaatttgcatttgaacacaatctttctgactagattgcgggcacccaaaatccagtacagttgacgaagatgcttaaacggaaattgacaccataaaaatgtctaaccagtaatgcagcgatgggcgaaacctttgcattcaaaatcggatgtttatcgttgtaattgattgctcctccatttagaagctactcccgggtaaggacctttcgttgtacatgacgaatgagttgaggtcgtgctgccagcaactcttcagaggtaaggaatgataaactgttcctttgacgagagcaaagagatcgcacctctaacttacttgttgacggtagccaatcgtacactggtttggccagcgccgtacggctgcatgggacgtccggaaacccgtgcaattgaacttattggaaggaaactgcaatgtatctaggtacttgaaagcttgtgagcgacgagagatcctcaaccaacgctttccagcgagtgctcaaggtttccgaaattaggtcatcccattgtagtactgttgtccaactttcttgaagtacgagcttgagtaagactgatgtcgaagaggcgagcccaaggcggtcgtaaatttgggaaatattttatagtaattctctaggtgtacggctcgcatcgaagtacttcatgttcagaaacagaacatctgaaccttgttccattgaattccaaaaattttgactgaggcatgcttggctaagctgttgagatgctgtccaggttcgaagctccgatcttcttctggcaaggatttataaaggcgagaaaagtttgaactcaattttcgtaatttaaatttcgctctctccagcagtccaatcacctcgtcttttaatagcaaaagttctttaatcgaatcgcactctgtagggatatcatcgacataggcatcgtgcgtgagcgcgtttgctcttggaagtggtcgtccgccagttgttttaaaactctaagcgccacaaaagggcgatggcgccaaaccgtaggtaaccgtcaaatggcgagtattaagcaatgggtcggtctcataagtgcgataagtagtacgttaaaggttgttgtgggctttggagatccctcggaacatcttatcaatggtggctcatattacaaatttatgctgtcggaagcgtaaacaagtcccaagaagatcacgctaatcggcggtcaaactcgtagccggtcattgagcgacattcctgagtctgagcgggtgtgagcggagatcgacgaaatttctgttctaatgagaccagacaattgatggacagcgctagagtcaaatccatgggccccagtctggttaggctgcatttctataaacaaccgaattgcgagagttcaccttaaagtttgcgcgtcctcccgttttgccagcgctgttggctgcaagaccaagaatagaaatccgtgcgtgtactcgactgacgcatatcctctgaacaaatgattctgatgccactcttattgtagaaccagtttccagtagcatcctgcacggcgtaatatttccctaggcgttgcggacgtctgcaggaatggttggaaagaatacctgcgatcgtacgagtttccatgttgtgattggtataattattgtcagtagccgaaacgtttctcttatagtgattttgatgtagagacgggcacagacacagacacagtatttaaagttccaactcccgaagtcgcaatgcagtctacgctgtccgcgcttggtgctctgatatatattgttaacaatataaaaattaaccagggattacgtttctcgcagttttgtgcccgtaacccccgaataacttcattaacgccgtcacccaccttacgcaggtggctggtgatagggttggtagcaacaggaagcgtcatataagttgctgtagtcgctcccaagcttcgcaatagttttaattggtgacagaaatatgtttgactaatgagagcgcgtcattagctaatgaaatcgttggcagtcagtaaggctcgcactggtagcaatatatgccgtatacatgtctgaaaaatgtttccaatactaataattactgaaagaggtaggaagtttaattcgctcaaactgaaagaccgccttgcttctcagcgtggtatttgtaatttgaacaacggtctgtgtactggatcgtacccacagcccataattctttgagggtattccaaagaatggcgtatgtgaagtaatgcttctcctcatacgcgtcaaagtcgtcgtcagagttttcccaatcttgttcctcgtggaaggtatacagctcttgcgagagccgcataacgacatattgtcttgtagttgcgcgaaacgaactactaattctttgacagattgaatctcctgcacaaacttgatggcactattatgggcgagggtaatttggcttttgcagatgccccgatgttgaattccactccacatggcgaccgagaataaaaggcgattctatacgacataggagtctatagatcaccgtctacaaaaccacaataagtcaagctgtcgaaattcagacgtgatgatggcgatccggctcgaaggatcaaaaaaagcttatgtttataaatgaaacgcccttattgcccttatctgtttttataatatttattggttttaagttcgcacagtttgacttcggagaccgcgatgcgcgtggttacattgaaatcaaaaaagtggctaaagcggtgaatggatcatacttcagttaccgtctactggtcatgaaaaagtactgggaatactcggagtctacatgttaaccgatacatgtgacaatgaggacgactcaaaatttgtagggaaatatgaagcgaacaggtttaaaatgccaatattttaataagtcgtagctaataatgttgacattgattttaataaatgagactatattcaaatgtgataatttccaaaagcgtatacccatacgatccagagagcgaagaaagatcagatccacagaaagcggcgagagcaatgcaatgcacatggtgtacatgagaatatgttgtttttgtaggaacgatgtttgaggaagctttcttcttcttcttataaaacattatggaactcaggaactacaagaactcacaattaaaaagtgtgttacgttgctgaataagcgggtcattacattgccgacgagaggaaaataaggtaaataatgataataactaacaaaatttgataagtttgccacgcacaccgtgtgtgtgtgttttaaactgtgaaaaaaagaacagttttaaatgtgtcaggcggcatatacaggagagaaggaataaacggagtgattgcaaatctgcattcgttccacacaactcgcactccgatagatatgctaagtgaggaaattactcttcaccaccatattgagagttgctgagtaagagagacactctgtagcaaaaaaaaaaaattttaaggccgagttcgcattataagctctaaagagagaagctgagtaatggtacaagccacaggtaataaaaatagcaaaaaaaatgttagggccgagtacctattacaagctgtaaggagaaaagcgcagtaatagtacacgccaaagcatattaagaatagcaaagagaggagcggagaagtggtaccagccaaaacatattaaaacattaattataatacataacaaataaaaataaaaaaacagaagacagtgagtaaattattacaagcttttaaaaaaagagctaggtaattaatctgagttccaaacaaaaaaataatataaagctcgggtgaagcaggctgccctccacaagccaaatttaaattgaattttattgaactgaggctgtgtaatatttgcaagtcaaattataaatctaatatctttcgttgtaaacccaaactctaggtcccatattggaaaaccgtttcagtgcgaggcgatcgacagggcaattctccgatatgcatgagagaaatggcttagggggtttaccatatacttcgaggccgagggtattgaagccgaaaagcagaagaggagtaggctactactcttgggaggagtccagctacagtcagtagtatattctttacctggtgcgctggttgagccaaccgacgaaaataaaaacaacatctacaaaatcgtcatcgaccatctaaaaaaacacttctcaccgaagcataactcaacgtttcagagacatatattgaggccaaacaacttgaaaaccggaaatcttttcggattacttgctgcgactacgttagtatatgcaaagatgtacgttcggatcttcaaaagcggagattgaggaaatatgccataaagataaaattatagatgtgttgtcacttgtacaccttaagaagactaacgggaaaggaaaattcactagaagaagtcatcgaagcgtgccaggttaaggaacagatcaacaatgagtcaaaagcaatgactagtggcagaacccatcagcaaaattgcaagtcgcggcttcaagcagagtggggaatgtccaagtggaaagtttggtcacgcgagaatgaaaaggagtttatagaatgccgagtgggacgccgtgaaattcccctaattatcgactccggctgaaaattcaacttaattagccacgaggactagtctccctggtaaagggaaaatcacactttttaacgtaagaacccactcggaaaagcaattccctgcatatgcctccaatgaattacttcgagtaatttgtattttcgatgccccaatttccgttgagcgaggtgccgaagaatttgcttcattacgttacttcattacgctattggaaaggtgaaacaatctcttttgggccgagacacgtccatcgtttaagaagtcctccgactaagaagaaacattaaccggattgaagaattgattaaagaatctttcccgaaatggaaaaacattgatgtaaggcaaggggacttttccgatataagcggctgatgttaggagtaccctctgctccttaaacttttgaacgccttctcgagcagatgatatctgtatgacatcatcatctttagcgcgactaacatcgaaatcgacagcgctgtgggcaagctcttccagtaaaatgatgtcctactgaatagcgagaagatcgggaagacacccaaactaaaattcctcggacatatcttatccgataatatttacgtcatacgatctttcagagacccaaagaacaaagacgaaacactgagttttctcggtctggtaacctacgtcgggtagttcatcccggacattgcaagtcatacagattctctaaggaaccacctgagaaccgaaaacaaattcacctggggccaagccgagagaaatgatttcaagaacataaagaatctgttatccaaagtacccacgctatcatatttcgatccaaagcatcgaacgcaggtgattgcggttgctagccttattgcattcgggccgcttttttttttcaatctaaaggagattgataattctctgctagcaatgccctgtcagaggtggagaaacggtcctctaaaacggaaagggaaagccttgccatgatttgtccccggcccacattgaaaagtggctgctgcgactccaggcatgtagaatcacccttatctttaagtccgtgatagacaacatatcagatgagctgtctcgacagctatctggagttaacaaactgcctacggtaaaaccgatcgatctcaggacggaattcagcatcctccgcctcgtgcagaactctaacccaagagctgagtcttcaaagagggataaagacattatagacttatagacgcaatcagttgcctttagaacgatacatgaaagtccgatacattagcaaactacccgtttcgtaacgagctctcagctcctttttaggaaaaaccgtaaagtctttccaaccaaaggcactagaataacaagatgcgtaacggccatacattggtttggcactatgcagccaattttttagtgacggccaaaattgctctctgtccgctcgctcccgctgagagcataagaaatctaaaaatagaatttgcttgcttgtctgagtaaaaacaagagacgagaacgcgtatatgtgtgcgtattgtgctagaagacgattttcgggccgaaatcaattctgatcgaagaaacgaatttacattgtacatattagggtagtttttgccaatttcgtagcaatatgataaaataaaatagtttttaaaaattcgcgccctgactattataattttaaagctttttaaatttgtttgttaaaatcgccgctcgaattagctaccgtttacacatttatatttatgtttaattctaatttgtctctcatctgacaattttttaaaagcgaaatattttttttgaaacacttttaatgttaatgttacatcatattatgtcaaatgatttaataaatatactaaataattaaaggaagtccaatagaaattattataactactgtaatttcataaatttcataaaaatatgataactgtttattgcaaaagtaatatcaaagacactagaattattctagtgtctttgctttgttcatatcttgaggcacgaagtgcggacacaagcactcaacaatcatagccttattaatttttcacacgccgcaagatgaatactctaatgacaaatattcttatataaagtcatttttgaaatttatttttgtgataatatgtacatagatttggctatttctaatctattttcaaataataataaccgttaaggcaatgcaaaacaagaatttttcgcatggtgcgtctaagaacttctgaggtgaagggcatattttgtcaaatttacaatgcatgagcatacgtgtgcacacatacagttgtctgctatcactttgtgcgttgaaaagagctgttcgttggagcgctcttcgctctctcgctctctaacttcgagagagcctggagccacctctagagccacggcgaaaaaatcgtgtgccaaaaaatcgtatggcgttacgcgtcttgttattctagggtctttgttccaacatctttgagagtaagaatactggaatcactttacaaaggacatctcagtaagacagcaaccaaacgctggctgaggtccaaagtatggtggccacagatatacaaagatgcatttaacttcgttaaagcttgtagagattgctttctggtatcgtaagacatccggccagccccaatggatagaaatccgttccccactggcccatggatatggatagcatcggactttctaggacattcacacaactatgaatattttctggtctttatcgactatttctcacgatatatggagcatacattttttaaaatttcacgatcctggttgagaaaatgaaagagatcttttgtagactgggatatcctgcgtaccaacgaacggataatggacgccagtacgttagcgatgagttctctaactactgcaaggagtgcggctttgaacaacatagaaccccaccgtttgggcgcaagccaacggggaagttaatgacatgaacacaaactattgtaagcaagattggtaataaattgataataaagctgacgaaagcaggaagtaacgcaggcggtactggatatgcatacctttttatgattattgtacacataattactagtcaaataaaatggataaatataaataaccgaaaataataaaataatgataaagacgagttcaccggttatcagatacccgttcctctgctagtggaaatgcgatcgcgaaatttaataatttttataagatatcgataaatatgggaaataaaatgagaaaatatttaaacatttctcaaaagtgtggccgtgaacgttttcggcgttttgtagttgtggggcgtggttgaggtgtggtatactgatagacaatcggaaggcaaataataaaacgaagataaatcaaaacattttttaaatgtgcgggtgtgccagttttgggcagtttgagagcgtaagaatgggtgtgggtcaacaatgttacgctgcgtctacgtcttgaggttctttgagcttttataggtcctggtatcgcgacgttcggacggacagacagacacggccagatcgacttggattttgatactgatcaagaatatccgaatataagtcggaaatgctttcttctacctgtttcatatttttaaacaaatctactatatttactccactagtaacaggaataataattaaaacctcggtgatgtattatatttttaataccgctgttgttgttgagcacgttgttgagcttgccatatccgttagttacgagattgcgtacgtagccaaataacgaatttcgttagttacgagattgcgtacgtagccaaataacgaaagctgccgatagaataccgaaaaggaagtcctagtaaaaccgtagtctttgacaatcaagtgaaaaaatcacctgcatgaccaagttttcctttagattgggcaagcgaaattgccgcaacaaagtgaatcagtagtttttacttcataggtatccgccccaagaacctgtgtgttcttacaatattaaataccttaattaatcgcccgctttcgaaagtgagaccgctaataaggtataaaataaaatatcaaagtgcacagtgcagttcacataaggcataagactcgatgtactgtagcagtctgtgaacaaaaacattaacccgctcaaacaaatacaagtgtgaccgttacataactaaaaatgttttataacgtttataaattaagatgtcattatctgtcgataattaatcccaactccttcaacaaatacgccaagtgcccagttctctgaggagcccagcagccttagttcgtttatcagacgaatcgaatacttgatactcgacagaaatcagtaatttttggagcagccatcgaactacaagtcattggagataccaagaaggtctgccagatagggtttttcccccttggaggaacttttgagacgtttgtattgtacaccctacaaaggtaatttacgtcaattttgtgaagaattggaagttaagtcaactattgtcatgaataagttagacttagaaaacaaccaatataattcatcagtttatacgaaagcaataaagaatactattaaacgctcacttcctgatagattggtcatgaccaatgaatgactgttcaaaaaatgcgacaaattacttagaaagaaggtacttatgaagacccaatttccaaaaaattccgatattgttccaaagctgtaccaaactcactaaactcatatacagggtgcggcaacataacctccttttttgaaatgcgcgtcattcagtcataacggtcataacggagcgctagtggtcccgttcaagaggggctactgcaaagttttgtcccgacacggttcagtcgccatcatgcgttgaaatagtgaggagcgtgcctctgccgttgaggcatacttttcaaacggatgttcggttatcaagagcgtgctgttcggaatcgctttaattaagccccgttggccttcgccccagactgcaaatcaattgtaacatgagtcactacattcaggcaaactgcaacgtcacctatccgatttcatcttaaaaaaaaaaaaaaataaataataactttagacatgtacctaaataaataaatagtttacaatagtattcatttagttatgaaaaaaggaaattatcctgccgcaccctgtatttatacgaatactaaactctcactccaatcaatcgctaccccctttcgttaccacctttaatgcattcataaatcccacgcagatcaaaagaccaaatataaacagccagaccacttgtaaacaattgtttccgtccagacaacagcaatttgatcaaaacagattatatttgtataataaatttaaaccaggcttaaatcgcgaccgaccaaacgacacccgaaacgactaagcgttttaaagaaggcagcggacaaacacgtatgcagacagatgaaagacaccatcaacacgaattagattacaaaaacatagcagaccaatacagattaattacagtataaacaaaacgagacgtatatatataaatcaacaagttcaccaaaccgaaaatttccaataccagcaggggaacccacgagtacaacaatcacagataccgatgcatagtagacaccaaggacgtcgccagggtatggttggggagggcagttaccccttcccccctagacctaaaaggaatgttcatgaaatatcatatttttctgcctatcacgtaccttcccttagtcaacctgcccccacttctgtcgatctgtttcccatactgcttgctaggtggtttcactaagagtttccagtgttggaaaattattattatttttttttttttttttagagtttaaatcatttattattattcattaggaatcgtccagttccttctgaacttaaccttatgtgtagcttgaaagatattatggattctgttcctcaattatagtgtatacgtatgtagagattatactatcttacgtgtaaggagttcatggggatgtattctcttcagacgtcggagggaaatagggtcgacaagatcattcgccaacgggttcgggtgggctctaagtctgtcggcatatcggctgctgtggaagtttatttggtctcctaatgggaccacttttaagtccctttcaataactcggttcctcacataccagggtagcccaaatgcatgtcgtgccgctcgtgattgtattactctaagcctattgagccgagtcttagaggctgttccccacacttggatggcgtaggtcagtgttggacctaatatggcttttattaaaagagccttagttgccatatgcagtttgattgagtggaaaagcctgtcctgtttttcctgtttccaacaggatttggctctaactgccgtgatatgggctttccaactcagcgtccgatcaaggtgaactccgaggtagcagtgggatgagacgtagtcaatggtatttccgtcgaagagaagacctaggcaggtttgaggtcgcagggtaaatgtgacacaggccgacttagtgcagttaatggctatgttccatttggcaacccatcgctctattacatgcagccattcctgaactgcattggaagcgaattgcaaggatgagtgcgacgcaagcatggcggtgtcatcagcgtaggtggccaggatcagctgagcaggggcgcttcatcggtgttgttgacgggtgtgggaatgtcagcagtgtacacttccctgtggaacttctgcatgaatgtgttccatgcttgacggagagtctcgtactgaaacatcgaaggtccgattagcgatgaaggagctgaggatggcataatgggctgctgggaatattatacagcatgtagaacaattaacagcatgctccaattacacaggttcagccacactcatggaaaatgagtttgattggtggcagcgcagaacacgacgagtttcagacggagatcggcgggacctatgttgttggatcatggttacaatgcgcgaccctagccttaaagtgttgtgttatgcacttgtacaaagtttgccaatcaaggcaattgtgacaagatttctgtaaataaaaacattttgttgtataagcccgccacatacaagcataaaacaattttttggtaagcattgaaataaggcagccccgattatgataagtaaatgggtatgagttgacctcagaaatcaatgtttgtgttttggcgctattatttacctatagcggggttgattttacaaagttcttaaatatttcattggttggcttattagcaaaaaagcgcaaactatgtgaagaaaaaggtggagagagtaacaacaatcacgatgacgaaaaagtggaaaacgaaatagagacagctgtgcctgctcccgacttaggcgttggaatatctaaaagtgctgcggccacttcgaccgaaatagcaagaccaagcttttcgaaagatttagcccaggatgattgcaatgaaaacgatattggacgatcatcgttcttatcctatgaaaaaaagaccgaattaaaaaaatgctggacaccgcccaagacgtatgatgttttcgtggtcgcgaagggcacacaaataacgttacaaaacgttattcaggaaaatagaaagataataacattactcctgtattgtgttttgcggatcccacgacgtggcgttgcgacgcaagcactacggaattgtaaaggacttctacaagcttagaatcggcgctgtagacaatgttttaaaaaagcatatggagcatggaaaaggaaatgcaagctatcgatcagtttaaactcaaaatgtaatcagcctttgtggtgaagtcctaaaaaaacagtttatacaattaattgaaaatgcagacgcctatagcgttatagcttatgaaactgctgatttgtctggatcagagcaattgtcaatagggtttaggtatttccatgaaggccaaaacgaagtccaagaatcgtttgtcgggtttggggaaataaaaacgttggatgcaaaatcaatagataatgctattgacgatttcctaactaaagcagatctcagtcctgtcaaatgcgtaggactgggatttgaaggctgctcaacaatggctagcagtgaaatacaagagagctttatattttcattgtttgtcgcattaactaaatttagtcatcggcgagcttaatgcactgccagatattcggaactccattggaacaacgaatattattacatttttccgcgagtccgttctgaaaaggaaggtaattcccaatatttagctttgtgaatccaaaatccaaagcttttaaacgttttaaggaacatttcggcgatataatggaagcattggaagggttggcactatgtagccactattttggtgacggccaaaatttccctctgtccgctcgcttacgctgagagcgtaaaaaatctaaaaatagaaatttcattcttgtgtgagggaaaacaagagacgagaacgtgaatatgtgtgcgtacttgtgctagaagacgatttcggcccgaaatcaattctgatcgaagaaatacgaatttacatattaggggaatttggctaatttcgtaacaatatgatgaaattgcgcgcaaatcaatcaaattggaagttaacaaaaaaaataaaaataaaaactgaacaactgaaactaatgtgcattttaaataataaaaatggattattaagtcaaatgatgataaatagactaaataattaaggcaaatacaaagaaaattagtataactactgtaatttaaaacataaattttccaaaaagaatacattatattgagaaataaatatttcataaaaatataagtagtagataataaaaatttataaaataaataaaaatatgtgtttggttgtgcagcccgcagccagcagcagctcatcataaatttgagttattttattaatcacccttatacaatgctctgtgcagcaatagattttgcattcccctttatgctatgttcctctctctcaatagagagcgagcacagctgcgttaatcatttttatgtgaaacttgcttatttgccttctgcatagcaagttcagttacaaattaagtgttgatagcaccgttactgctgtaatacacattgtctagtgtctatatgtccagtatatgtccagtatataaaagaccctactcatatccttttgctcatgaaacagaaggttataagcaaattgaggaagtgctaaaataaggaattacacgtgaaaacgacttacgccatttcagtacgttatgcattgttctttgaaatggacgcatctggtaaaccaaaattcagggtggtcgtcgaccaattaaaactaactaaaaaacaaaactaaaatgatataactttaaccgattaacttccgatcccgagttaagccaagtcagggaaatgtcagaatatttgtaaaaatttaaaatgcctttcaccaaatcgatcattttaaggcttaagcgaatattaccgcaagttcattcatgaatgaatacaaatttacgagcaggaatagccgatgtattactcctttacaaagcaataaatgaaaaatacgaataatcattactgaagactgagaaattagggaaacaagaatataacaattttagacacatgcaaccataaaactaaacataatacaaccggacagataccagccaccattctaccaaaaacactagtgcctttgattgtacattacgcagacacgatcatctatgtataattcgcagatgagatgagagatttaaagaaaataaaattaaaaaacctaaagagagcagacaaaattatgaaatttacacggaatttggacaaacccagtaccacggttaaaaactaaaaatccctatagggtaacaggcagaatagaacaattatatgaaaaacaaaaacaatagcaaatttaaatagaaaacaattattaataatagcaaatattaactttcgacccacatatcggactcataatatttatattgaccttaaagatgacacaaactacagcagtaacaatcgaaataagccatatcgaaaacaatcgaaaacaatcatttaaatctggaacaatgacccattgtctcacgatcaacataacacaacttgaagaatgtcgggaatgtaaatatttattacaaataattttcctaattaaaaaaatgataagagaaatgaacggacaactaggactgtttaactttgcgagtactgttttggcacactagatgaaggcgacagactaaatattaaacaacagatttcattcttatcacaaaacacggtacaaattaacaacataaaaccggtattgacgggatctttcttggttttattgtttgtcttgccaatttctattggtataccaacaaaactttggccacgcccctttaatagatggcctctacaaaacgcccaaaacggtcgcgcccaattttttgagaaatggtttaattgttatacccgttactcgttttttttattataccgattgtattgacagtttctacagatctaccaaaatatttttgtaaagcttacttaaataccgcttaagcgttattttgtatacaaattaaatattcgtattattaaatacaccctgtgaaatattattattcttgcctcttcataaaaagaccaatatcaaaattttttgtaatatccgttactcgtatagtaaaagtgtatattagatttggtgaaaagtatgtaacaggcagaagaaagcgtttccgaccatataaagtatatatattcttgagcagaattaatagccgggacgatctggccatgttagtctgtccgtaagaacgtcgagatctcaaaacctataaaagctagaaagttgcgatgcaccatacagatcctattgacatagacgcagcggaagtttattaatccatgtcgtccgctctaacgcccacaaaccgcacaaaactgtcacactattaaaaaaatgtgttggtatttttttcacatttatattagtcttgtaaatttctatctatttgtaaaaaactttttgccacttcactcttacggaaaatgttttgatattatttcataattttattagtcgtgaaatttaaaaatattttgtcattttattctcaaatttcttcggatatcccagagaaattataaaatttctcgttcgcattcacactagctgagtaacggatatattattgattacattcgcacatctgaactcatgcactgctgcactttaaaaataaggtctccacaatattatatcaaaatcatacccagaaatcgataccacatttttttaaaagaatttatatacctaatatacggtcggatgtgcatccttctggtatatcttcttactcctgaaaattaaactcgtaaaaacaaagatataggtcttacctgtggaaattcttcgtactttttacccacacatgttttttttacagcatccttaaattcttgattggatattttgccatcctagaaaatatttaaatttaaaaaacttttatatttaatgtactttattgcacatatataatacatttttatcagtgttgaaaatatgtatgtaatatgtatgtatatataataatatgtaataaagtcaatgcactgtgtcgccctcttttggtcgcggtaaccaaaagcttttttctcttattgggttatcctctttagcgtgtaatttggctgcctgcgtgcagtaacattgtactctagatacagtcacaataaatacttgaaacgaataggttatgggcccagcccacgcggacataaaagtgaatagttctaaacgaattagaattttcggcatctttaaatattgtgattcagggatttaatacgaacaacttatcgaagtgaaaatgagttcatcaataaaccaaatagaaaaacttgatggtgaaaactacagtgcgtgggctgtacaaatgaagagtgtcttaattcatgcggaattatggggggtggtgtgtggacgtgtggttaaaaacgaaagtgatagtgctgagctaaaggcttcgttcgacgcgaaggacgaaaaagcattagcaagtataatgcaagtataataataaagcagttgttgcacatgagaatgtctgaaacagaagttgtttcgagtcatgtgaacaatttttgtgcggttgttgaaaaactaaaagaaattcaattggtgatccaagaagaagtcctgagtattctcctgttgtccagtttgccggaatcgtttgaaagtttcgtagttgcaatagaaacgcgcgagttgcccacaaataaaattacaagaggaagggcaaaggcgtatggcaaatgaagaacattctgcgaaaagcgaacaaagtgcatttggaattcggtctgcgaaacaaaaagcgaaaagtgacattaagaagagtgtgcaagtaaataatcagcaactgattaacgggaaaagaacagttaattgttggaactgtggtcgtagcggccacaaagctgtaaactgtaggcaaaggaaaggagaacatagagagagcgaaaacttaaataccgagaaatcattctctgtgctctgctcaactgtacagcttggcgaattgccaaaaaatatgtggtgccttgattcaggagcaacggctcatttgccggcaggtgagaaggccattgggtcaaaatgggtctttgcagtgaagcgtaacaagatgggcaaagtcgagaggtttaagtctcgacttgtcgcaaaagggtgcgctcagcgatatggcggtaacttcacggatacgttttcaccagtggcacgctactcatcaattaaattagtaattgctctggcggtggaaaacggtctgtacatgcaccaaatggatgtctcgtctgcatacttgaatgggtgatcttcacgaaacggtatatatgaggcagccagagggattcatcgatgaacgatatccaaagaaggtgctgaagttacacaaatctatatatggactgaagcagaacggccgagaatggaataaaccactgaacgaagtactgcaaaagattgggttttcttcatgccctagcgagccatgtgtttacacccgtaattctggcaaaagtaagaaccttgttgtagtgtacgtagacgaccttatcatagccagttcaaccaaggaggaactgtgcgatattaaagcatcaatttcaaaagaattcgatgtcgtagacgggggcgagctaagacatttcctgggtatcgaaattgaacgtgacggagaaactggtggaatcaggattggccacaagcagtatattgagagccttctcaatgattattcgatgcaggattgtaagtcgaatctcatcccactggaagcaggctttgaagtaaaatgtgacaaggccgattgtcagaaggtgaatcaagtcagctatcaatcgctgattggctcattaatgtatctggcaatcacaactcgtcctgatattatgcattcggtcattaaactatcacaacggaactctgacccacataaagagcacgaagccggtgcaaagcgagttctgcgatacttgaggggcacagctgatttgcagttacactacgagcgtactggtgtgcctatacattgctatgttgacgcggattgggctggtgaatagatttaaacatgaaaagtgtatccaagggatgggtttaaactaacaaaaatgtattttgattttggaattaagataaaaatattatccggaagggttgacatattgcattgagagggagtgttgaaaatatgtatgtaatatgtatgtatatataataatatgtaataaagtcaatgcactgtgtctccctcttttggtcgcggtaaccaaaagcttttttctcttattgtgttatcctctttagcgtgtaatttggctgcctgcgtgcagtaacattgtactctagatcagtcacaataaatacttgaaacgaataatcagatattaattaaatataattatctctaacgatctcttattgagattcttaaaaaatactttaagcaatgtctaaaatatggatccttaattctttacatctaactaacagctaggaggttgagattaagcataaagattcttaaaacataaagtgtaacgagtaacgaatctagtatacccatttaatcgaactaagtatgagtatacaaatcagcaaatttggcaatccgaaaattttccaatggagcccaccatgacatcatgctcaacaattacagataccgatgtatagtcgacactggatcgtcaataaacacgttaaattcaaaaagttttccgaagaatgactggcttctcaaaataaaacaaatttgtaaattttccccattttatcccattctattagaaaaagtgttaatgagtaataacgtttatattgattatttaagaaaatcaccaggtatcagtggaggaattttcgaagcaagtacaggaaacaaatttacagctgaaataatttacgcattgaacaatgacattacctcagaccccacataccgaaattcaggttggtcgaaactaaaatgaaataactattaacgataaattcccgattccgaagatggataaaattttaaacaaattagaaaaatgccaatactttacaacaattgacttagcgcaaggcttccaccaaatcgaaatggattgtaagtccataccaaaaacttttcttctatcacggtcacgattacacctgcatgccatttgagttgaaacaagaatacccgttagatagaaatttacaaaacaaataaaattatgaaaaaatatacaatttttcaaaaatgtgggcgtagcagttttgtacggatgtagggtgttagagtgggcatggcagttttgggcggatgaagggcgttcgagtgggcttggcaaacattttttttttaaatcgatagaaatttactatataattttacaatttacaatgtgtaaaaatataaatacatttttcaaaagtgtggtatgctgtatgctgaatcttcctgagatctcgacgttcatacggacgaaagaaagcttaaagaggcatatcttaagcaccagttagataagttcgaatttttcgaatagcaaactaaactcgtaggtcatcttttagtccaaatggtatttttgtttttttttttttgttcttaaagaaggagctaaaattaatataaatgatgaagagtatcattctttcgaaaaattaagaaccgttgttatgaatgaccagagtctcatttgccctgatctacaaaaacatttccagtccgtccataaatatgaagtcccctttggtatattaaatgtctgactaaataacattaaagaaccaaatatggaattacaacgttggcaaattaggcttagtaaatacaacttaaaaataaaatatttggaatgaaacaacaatacattgaaatgactctaccaaaaacttttaaaccaaacagtaatgtaaaaattataattaaactaaaggccatcattattactcaacacatgaaattattaaaccgtggtatgctttatgctattgacaatgtactatatttatcctgtgttatcctgtattttattctaacaccctaaaacctcccaaaactgcccacgctttttaagaatgtttggatttattttcatatttaatagtcttgtaaatttttatcgttttgtcaaaaaactatttttcacacccactcttaccctccaaaaccgcccaaaactgccacgcccacacttttaaaatatatttagatttttcttcgttttattgtttgtcttgccaatttttatcggtataccaaaaacattggtcacgcctcccctttaccaacaactttcattattatcattttatttcccgatatgccaaaacgatgaaatttcgcgatatcattgccactcgctgactatagagttatatagtttttttaaatacattcgtacgcacatacatcgaagaaatatgtgaaacaaaatcaaaaccgtatatgtacatgtatgtacattttcttacactgccagacgctatatttttaatcgcaacagtaaaagagcaagcagaatttaaacaaacgatacatacgaaaagcaaatcaaggcatataaagcatttcagttgatccgttgctctttcgattttgactcgtcaagatagtcagtgttttcttagaattttttttttgcaaataagtagctcataaattatttaattttacttcacttattttgatatagtgtttggtaattcttcagaatatttctccatcctgttatgttaagatacaatattaagatgaacggattcttcacttaataaatataaaatacaaaaaaatttaattttgcgtttttttccgttttattattttccttttctccattattttcgttttacggcattaacagatatatatttgcttctatgtgttctatgaataaaatattaaattcattgaaaactatgttgcaggtagaggtacatatgaattcttgattaggatcaataggcgaggtccgttcgtctgacggtccgtatgaacgatagcaggaattataaaagctagaaatttaaacattcagattccaagcaagcttgttgacctatgttgccacgatcattcctaaatctatcgataccccagataatttctatcgcttccccagaaaaattaggaaatttcgtgttcgcattccccctatctgagtagtgggtatctgatatagagggaatccaactcttattttattttgttattattattaattattacaaatttaatttatacatattttgtcttgcagatgtttatagacgtgtaagcaaataaaataaaaactgaaataccttttaaacatgcacttttgtattctttgagaacactctcttctctttggaagcactcgttttactaggttcactagcactaggtttcctaataattgattctggaaagaatacacccagaagcatttcagtgaatgcatgcttacaaaagcattttagggaatgcatccagaagcttttgagagaatgtatcctgaagcctttcagggaattcttacagaaatccattcgggagcatttcagtaatgcttacagaagcatttcggagaattttggcaaaaaggaatagaaagatgattttgtattacaacgatgaacccaacagagtgtagcttactgcgctggagaaccgcaacatcataccgacagtcaaattttgcaaactgtcggttatgatttggggatgaatgtctagtcgaggagttggagatttggcattcatagagaacacaatgaatgcagaacaataaacattttgaaatgcaatctgacatccagcgccaaaaaattcggtttttattagaacaatagacctgattttaaattttaccaggacgatgaccccaagcataaggcgcttaatatgcggaacgctttacgactgcggcaaggtcatcgatacgcatccttagactccagatctgaaccctatagaaaatttgtgggttcatttaaagaaaaaagtggcaaaaaggtcagcaaacaaccgagcagcactgaaagcttaaaattacctcaaggtgttataatttgttataaactataagtctaagatagcttaagtactttgtgcaagcaatttcttgacagtgtcgaatctgtgcaaacttggatttagtagtttttctcgttcattgttaatagttttgttattattttttacatattgatgaaaaacatatgaataaatagatattaataaaaaaaatccatgaattttaataaaaggcctttatatttttgcattgaaattcaaaagtacaatttattttcattgtgcaaacaatttcttgacaaactgtactttcaatgttcactgtttttaactttgtttgaatattgcagacacaaattgttgtcaacaactcactcagcaacaacagcgatttaattaatgttaaagcttaaacagctttgtatttgcacaagttgatacgttgttgatacgccggggtcacggaatgctaataagctttttcattagccattttaaattaatgaagaaacgaaaccatgctttttcggagcaaaagcctcttttttcgaaagtcatacatactgtgcacctgaggtgccgtagctatcgtcaaagttggcatatttacaaaggataaatttaggagtttcaggcggttggcccaacactagtaaaataggcctttcagtaattgtcacagggaacaaaacccatgacctctattcgacaaaccggcgaaaaacggtgcgtgcttaagtgctacccagtaactaaatatggtttttttgcttgctgacgttccttagacccttgtccagaccaactacaaaagactattctaacccgtccacgattaaataggtgtcatgattttaactccgctagtatatgatcggtttcgaaaacggctgtggttactgtttctgtccaaaattaatttccaagttccgcgtggaccaacttaacttaattgtgctgggtaggatatggtattttgatatctgagcccttcataaaactgctgacaactgaagatggaattttcctgcagaacagaattggtcacttaaatttctctatcaagaaagggatgcttcgcggagtagacaatgcttctgtaccaaaaatacaagctgaaagacttatattgtgaggaaattaaggaattcatgaaccattgcaaaacacttactacgcgagccttcatacaagtataggttgccaataacattagcattcacgatgcattctccatcttttatcttttagtcattttgcatatcgaaaagctctgtgcatttgttctgcacagcactgctaactgaaatgacgcttcaatacgaacaggacatatctgagcctcacgaatatggtatggtaaatatgtatactaattttagtttcttctttcattagagttagtctcaaatgaacttcgcagcgtacacacggtgtatatttttctttcaggcgtttctgccaatcaataggttacgggctcaggcattgcaatgcattggagaaattacagtgggatgtgtgactctcgactaaaaacaatgagtgcgccttaataaatagatgatacaaacacggtgaactgccaaaggaggctactaaatgctggtgaggtcagccacttaaggagatcagtgtggttcgtggcgcaacgagccgtacaaatataaaaaaatatccaaacatttttcaaaagtgtgggccaggcaaacttgcgctgggtctacgtttttggaatctgtatgcttaatctcaacttcccagcttttatgaccagatcaactatgtcaccctacgagtaatgagtagaaaaaggttggatatgtatttcgttatgtcgtaatcgttttgtcgattacaacggaatatatttaagcttaatgtgaataccttatcgtcgtcagcaatagcagagatttcatcccataaatttttcattagctttttataatcatccaatcgagcagtgctgcaatcaccttttccttctacgacacatgctcttactgccatgcacagaaaatcattttggtccagaaatccattgttgtcgatatctaaaaaaatatataatttagtcaacgtagtattattaaaatagctaagtaacagttatctaatagtcgagaaactcgactataacgttctctcttgctaagcctgcaatttataaatattgttcaaacaattagtgcggtaaacttttccaatggaaaataaataatttatgacgtatttcctttgattaaggagaactttaatatctcgcagatatttccatggctttttagatttgtaaaaagttaaaagtttgttataattaaacacaggaaaagcttcttgcaacaaaaagggcctatttgtacttgcacggtggcagggacaaaggacgacaacgacaaatggttctacatggtacattcgatttttgcaagaatatttgcccgtacactgctagtcgttaaatcttatttgtttgttgttattctttgttgaataaaattgtcaatcgctatgactttcttgttgttttcccttcgcatttgcaaagatcactagcaaaaacccaaaaagtgcattttattaaaatctatctcgacttcgactaacaaatacctgctactcatctaatgggagtaataagttaatatatcaggattgaggaaaaatagtacaattatacaatagttttccatttttccgggcgtatagatagaaataaggcaaacaaataacaaattaaaaaaatttttatttattaagcaagctgcttccacatcctgataattggcacacttactgtcaactatctaggttttatggctaggccttttgatcctgattaagaatatatataatttattgaattggaaaccattcctgcaaccgcctacatactttttaacaaatataaaacaccctgttactctacccgtaacgggtacacaagcattgaattaattaattaattaaaagaatttgaaagcggaaaaaagaacaaattaaaacagaacataatttaagacttatgaaattacaaaaaaaaaaaaaattaaaatttacttgagtaccacatcctcaaaccgaaaaaattaccaatt

SEQ ID NO: 26582 - DNA, 952 bp, DROSOPHILA
ctattttaataatactacgttgactaaattatatatttttttagatatcgacaacaatggatttctggaccaaaatgattttctgtgcatggcagtaagagcatgtgtcgtagaaggaaaaggtgattgcagcactgctcgattggatgattataaaaagctaatgaaaaatttatgggatgaaatctctgctattgctgacgacgataaggtattcacattaagcttaaatatattccgtgatggcaaaatatccaatcaagaatttaaggatgctgtaaaaaaaacatgtgtgggtaaaaagtacgaagaatttccacaggcaatgagagcattcattgaatcaaacttcaagcttcttgacatagacagcgatggaatagtcggagttaaagaataccgttataactgtataactagagtagccatcgacgatattactccaattgataaagcctttgaaacattgttgaataattatctttttcaggacgaggaccggaaacgtggcggtctttccctagatcgctataaggaactgtatggtcaatttttgggaaacacagccgataatcatccagcagtaaatctctttgggcccttataaacatattttacaattaattgtcttcgctgttgttcaacaactatttattaagttttatttgtaattactatgactttaaatttattaccgtatagaaataatacattcatatcattttgtgtagaatcgtcagatgagttcgtcagttcgttatttttaatgctttataatacgttaagtacaattgctctcagaagataataataggatatagagttggcgttctctcttaaaagggctcttctgttaaaacctctctctcaatacagagttgatttcgattaaatgttgtgttatattaatgttaccataatgtaaactatttaataaaatgcctaaacaaaa

SEQ ID NO: 26583 - protein, 172 aa, DROSOPHILA
MAVRACVVEGKGDCSTARLDDYKKLMKNLWDEISAIADDDKVFTLSLNIFRDGKISNQEFKDAVKKTCVGKKYEEFPQAMRAFIESNFKLLDIDSDGIVGVKEYRYNCITRVAIDDITPIDKAFETLLNNYLFQDEDRKRGGLSLDRYKELYGQFLGNTADNHPAVNLFGPL

SEQ ID NO: 26584 - DNA, 2885 bp, DROSOPHILA
actgcaaatagacagggagcttcagtttgtggtggcctccggaccctttacggacagtacggatctcttctacgaaccgctgcacgacctgctcaagtacctcaaggatcacagacctgacgtgctggtgctcacgggaccattcctggatgccgatcacaagatggtcggcgaactggccgagaccttcgatacattcttcgagaagatgattgggggaataatggagtcgattggtagtcacacagcagtgctggtggtgaccagtcagaaggatgccatggctctttccgtatatccaacgccgccgcccgctctgcgcagaacctatccaaatctatacatgctgcccgatccatctctggtggacttggatggctttacgctgggcgttacctcaaccgacgtggtggaccacctgttgagtcacgagtttgctgtgaatgccggcgagcggatgcacagggccatcaaccacttgttccaccagggctccttctatcctttgtatccgccggcggacgaagacatggcctacgattcccagctggcgttgaaatatgcacagctcaaacagctaccaaatgtgctcatcttgcccagcgatcagcggcatttcatccgcttggtcaacgactgcctggtgatcaatcccggccgtgtcgcggacaagaagggtggaactttcgcccgattcctggtggcgccttcggtgccgggaaaggcggccaacatgttcaacagtgtggcgtgtcaagtccaacgcatctaacctgaccactttgtgatgatgataaggaaaggatagtgggaaatagatcagtacaatattattagttaatataatgaacacactactttgtcataacttttcacaaaatacattcaacaacaaacaactagcattagttattttgggccaaagtaggtattgtattatttgtaaacatatgccctggagttttctcagactcaagttttatatacaacaagatcaataatggctagcaacgttgctgcgccacaagcttcagctggaggagattcgacggaactggagcgctgttgctggatctgttttgagaccgataaggaggcaggtcgccaggcttgggtgaatccatgtctctgccgaggaaccaataagtgggtgcaccagagctgcatttccctctggatcgacgagaagacccgaataaacaacaatctgcaagccgtttcctgtccacaatgccaaacggagtacaccattgcatacccgaatctctggattttcgatagggctttggagctgaccaacgatcttatcctaacaaacttatataattgcctggccaatgtcttcacggtggtctttgcctattggtcagcggtttcattcggagcaaaaacatatttgcagatcactggtcaggaaggtcacgttcatcaaataattcaatcgggagacctgttggttgttctggtcggattcccattaatctcggtagttctgatacttggacgcttaattccctgggaagatgccctgttgcgcttcattagaatatgttattcattgctgcgaagtctttcaatgatgtgcctaggacggaaatatgaccaccagaccgaaccatacccttctgcgccaatgaccgaatattcagcatcgcgggtggtctgtggagccatcctcttgcccaccatatccatgtacgtgggtagagttctttacagctctgtcgacgatagattgcaacaaactcttcttgggggattgactttcatagcgatcaagggattcctcaaaatgtacctcatgcatagccaatacatctgtcgtatgaagcgtcgtgttttggattacacgaaggaaaacctagcggaggcagacggacactaggtaaactcaagatctgcaagagaagcaagaagtaatttgaatatctatttaaattgtaaagtgtacaattttcctaagactacgtgtcaatagtgcattcttactaccaatcataaataatcgttaaagcatttattaatttatgcataatagtttacagctaacagtaggaaatggtgtctaaatgtaatgtactccctaggatctctatgcacgattgatcgatccagccccctctttacggaagtcaactctgtatcgagggcgcgatcgtcgagaactaaaactccaatgtatattttaactatacaaaaaatactgtatgccgtgtgtgtgtccaatgaacttggccgcaactcagatgcggttaagtaactgcgcgccaccttaagtaatcctcgcctaacgtctcacttcgttcggcttctgtgcctggttcctggagctgcgtcgtccaacaactcgttcagttgttgggctcctgcttgtattgttattgtcggttgttcaccccctcgggattgtggctgctgaccatgctgtgctccatgttcttcacgatcacatagttggtgatgtggttgatggcctcgtcctgcagccgctccggccagcgcttcatgtacgatttgatgaagtcgccgaacgtgtccaccttatcgggagtgctcttgtgcgtgtccacgatgttcttcacaatgtccacgaacttgtcgtagtcctcgtgcgacttcttgatcttctggtagttggccacgcctccattggtgttgcccccaccaccaccactgccaccgcttccaccggcagccgtgttcatttgctgatccatgttgttatccgccaggcgggctgaggcagcggcagccaccgccgccacggccgccgatgaggccatgaagttgtccacgctgccggcattgggtggtggctgggagtggtccataaagtgccgatgcatcccgtactcggtcctgcaaatcccaattgttatttaaac

SEQ ID NO: 26585 - DNA, 885 bp, DROSOPHILA
atggctagcaacgttgctgcgccacaagcttcagctggaggagattcgacggaactggagcgctgttgctggatctgttttgagaccgataaggaggcaggtcgccaggcttgggtgaatccatgtctctgccgaggaaccaataagtgggtgcaccagagctgcatttccctctggatcgacgagaagacccgaataaacaacaatctgcaagccgtttcctgtccacaatgccaaacggagtacaccattgcatacccgaatctctggattttcgatagggctttggagctgaccaacgatcttatcctaacaaacttatataattgcctggccaatgtcttcacggtggtctttgcctattggtcagcggtttcattcggagcaaaaacatatttgcagatcactggtcaggaaggtcacgttcatcaaataattcaatcgggagacctgttggttgttctggtcggattcccattaatctcggtagttctgatacttggacgcttaattccctgggaagatgccctgttgcgcttcattagaatatgttattcattgctgcgaagtctttcaatgatgtgcctaggacggaaatatgaccaccagaccgaaccatacccttctgcgccaatgaccgaatattcagcatcgcgggtggtctgtggagccatcctcttgcccaccatatccatgtacgtgggtagagttctttacagctctgtcgacgatagattgcaacaaactcttcttgggggattgactttcatagcgatcaagggattcctcaaaatgtacctcatgcatagccaatacatctgtcgtatgaagcgtcgtgttttggattacacgaaggaaaacctagcggaggcagacggacactag

SEQ ID NO: 26586 - protein, 294 aa, DROSOPHILA
MASNVAAPQASAGGDSTELERCCWICFETDKEAGRQAWVNPCLCRGTNKWVHQSCISLWIDEKTRINNNLQAVSCPQCQTEYTIAYPNLWIFDRALELTNDLILTNLYNCLANVFTVVFAYWSAVSFGAKTYLQITGQEGHVHQIIQSGDLLVVLVGFPLISVVLILGRLIPWEDALLRFIRICYSLLRSLSMMCLGRKYDHQTEPYPSAPMTEYSASRVVCGAILLPTISMYVGRVLYSSVDDRLQQTLLGGLTFIAIKGFLKMYLMHSQYICRMKRRVLDYTKENLAEADGH

SEQ ID NO: 26587 - DNA, 8742 bp, DROSOPHILA
tagataatcccaccaagctctcgcaacaggagtggcaacgggtggtggccgtcttcgttatgggaccccagtggcagttcaagggctggccttgggaaggcaatcccgtcgatatattctcaaaaagttagttaacatcatgcccagctctctaagtttaattcactaagtctcattttcttacctactgcagtttgcgcttttcatttgtgctttagcgaaatgaaattggactcaaacgtggagcgctggtcagtgacgctactccgactatcgcaaaacaagcgtcatatggatcgggcagtgctcagcaaattttgggaaactttggacaagtaagtgcttatataaaaatccaccatttcgttacaaaagatttacaatgcaatctttttagatatatagccaagtacaagcccgatttacgatattaaccctcaccgcattcttaaacgttctgctgaaacacgacacctgctgttttcaatcccactcccaagtagttaccattattatagacaggctgtactacattatgcaacaaacgacgcaaatagtatgttacagtgtgcgcccaacttccgtaggaaagacaccaagccgaatctggggcatttggccagttccagtgcgagtttccgattagagcccgaccaggattatctcgcttttggcaacagcattataagtcgcaggcctgcgatcgtgcaaataggcccaaatacgcagttagtagttaagataaagtttttcgttcaaattgtacaatgtaaactacaaaacacaaacatctgagagcaagtatcctttgtatttttagtgataataaacagttaaaagccattctgtttcggttattcaaacagaaggtaacataattggaatttatttggctgtcatcaagtatattttctcaattatttaaccttttcaaagatcatatattggaactttttcatacctcccatcgttaaagtcataaatcaaacgaaatagtagtatttcattatttctgtttatatagcaaaatatgtgggtttatgtcatgttagcttgtggtcagtaactttactatctaatataggtttaggggattaaataaaaatactatttctcggccagcgaagcacgatagttactggtgaatcttcaggaggacttgcgatcatcgaactgcttcctggctgccttcagcgtgttgtgcatcagcatggccaccgtcatgggaccaactccgccgggcacaggagtgatgtggccggcgacctggcgaacttctgcaaagtgatgaggaaatgaatcaatcttgttggtctttagtgatttaatagatcagccacacaccttcaaagtccacgtctccgaccagcttaaactggccagtgctctcatccttgatgcggttgatgcccacgtcgatgacacaggctccgggcttaaccatgtccttggtgatcaaacccggctttcccactgcgaccacaatgatatccgcttggcggcaatggcgagccagttccttgggcggtgtatacctgtggcagatggtcaccgtggcatccattgccttggtggcatacttgccatccgcgtgcagcaagattgccatcggtagactgacattcttggagcgtcccaccacaacggcgttacgaccgagagtttcgattttcatatgctccaacagtcgcttgactcccagcggcgtggccggaatattggcctccatgtccagagccgtgcgtccgatgttgacctcattgaagccatccacatccttgtccacatcgacggcattgcagatggtgcgctcattgatgtgctcgggtaccggcagctgcaccagtatccccgtgacctggggatccttgttcagatcggcaatcagttgcagcagctcctcctgcgtggtagaggcgggcaatctcttggtctcactggagatgcccacctcccggcaggcgaccatcttgttagccacatacttctcgctagccggatcctcgcccacaatgacggccgtgagatggggcttcggatagccagcagcctccattcccttgagctcgtgtgctagttgggtgcgcacctcctgggctatggccttgccatcgataatttgagccatgttgctggaatgcgatcataatattatttaattgaatgagattacactgtactattccttaaaacattatttagttgcgatattcttgaaaaaatatagcaggaaaggtcataaaccgggaatgataagggctgtcggtaaatccccgcctgtcactgcagttacgcaacagtaattcccccacaacacacacttaggcgcataagtacatgtatgattcacccacttgtttaccaagcggcgtgcgcgagcggcaatgaaaaattagtgattccccattcttagaatgtactttttaatgccgagctatcgatggatccccttttgctagtgatctcatgcagggcgccgatggtaattgtttgagggaacaagtttagattgcttatagaactattctaaagaatagattccatggaataataaaggaaactaaataaatgctaataaaggaaaataaattaatgctctgatatttaaaaataaagcttgctatcccaggcatcctagtttcgcgtatttttcattccacaagagaatagtatttgtaaaactaaggtactttattgatcaacattcaatacataatcaagttgggttaaccagtagggcgtaagcctgtggatccactgcctgcagggcacgagcaaatgtggaaaactctacagaggctccttttcttttcacgtgatccaacagatcctccgcgcccagccatataaaggcgaactgcttcagatgcgtctggcgggctagttgcatccatttccgatcttggggatcggacccatgtcccaaaggctgattcagcagcgaacagagccggtcgtaaatgaatttgtttttgagcagcaactgcaatttgttgttgtccatttcggtgtctctactggattcatctttctgtcttcttggaccactacttaggtccaactccacggaatcctcgtcctttgtttcgatgtccatctcctcggacttgatctccagctgaccagcatcgctactttcgtccgacgatgaatcgatctcctccttgaccttacatggaatccaggtcatggccagttctcccttctccggatacacattcttcagcagctggaccacccggtcatttgccttgcgttcggccaattccaagggagtatggccggctgcattttgtgcctgcaggatgtcggtaaggttttcattttgggcatccagaatgagcaccaatagctccacactttgctccagaactgccatgtggagtgcattattaccatccattgtgttggccacgctaatcgaggtccgatcatagctgatcagtttcttggccacatcgtacttgttctgtcgaatggccatgtgcaaaggcgtcagaccatcgtcgttcgttagcgagaggtccaattgtacggttggcactccattaaggaagctttccacgcagcttaagtgctcctccttgacggccacatgcagtggggtatttccggcattattcttcagatttggattgcatcccatacccagcaaaggtcgtatgtagtgcgctcggtcttgctggcacgccacatgcagggcactatcaccgtccgcattcaaagtgctattgaccacatctttcagattgaagtagttcatcacctgtatcgtctggatggccagcttcagtttgtcctttttgtggctgatcacttcgtgcaggagcgtgtctctattgtagttattcagagcatgctcgataaaccacttctccactttgtggtgcgagatttttattggcgatatgcggtcctgtttgtaaatttcgaataagtcatccaagcatttaattgtacgatttcgatgcgatggcacttccgcccggttatgaccatcgtgctgcaactctcccatgtctaactggcagatcttctcgagatcagaagagttgtgctcgataagtttgcggaaatcttcggaagcaataaattcatttagatgcttttcgcgtccgaactcctcacttatagtctgatcatgctgtgaaaggtttggcaagccatttggtggctgcgccaagcccagcgttttgggcagatccagcgagttattagagctttctgttcccgaactgctgctattggcagaggacccggttcgtcggcgtttcctcgacacaattacgctccgtggcttgtagcggaagggcagcgccgggaatgagcgctcatcgtcggagggacgaatgagctcgatgtacacgttgacctcgcggtccacgtccttatctttgtacggaggcgtctggcacacaatggcatattggtggtgtacatccgattcgcggaactttgcgtatgcctcccacacggtttccccgtcctcatcctcctcgaagaacctcactttaatgttcttcttgctgaccttttccaccagtagaataagctcatcgttgcccatcaccccgccagtgggtttgctcaggcggacgatgcgaagctctccagtttgtgccgacttgcggttattgattgcattgctgtatacaggcggtgcaagtggaacccatgcgccgttgtcctcaattttaaaggcctcaaagcagagccgcacctaaagttggtgttacttttttagtgagttctttgttgcttttcagtaagttaattgcttcgatgttatattgctcagttattttagcagagaaatttatataattcgagctaaacgagtagatactttacagactgcttaaataaaaagattaaaaggtagcaaatgcaacctataattaattgactaaagcattctaaagtgagcaattaaacgtgtgaataataaatgcaaacgtgcatattcacctcatcgaagcaagcaactcgatattgtttacgcgctggtttacccacctggttcaagttcatgtccttggcctcacgctctgtctcctgatgcagttcctgtagctgtttgtgggacaactcgcggcggttcatctgaaagaccaggcgatcctgcttcttcttgcacagttcctcgaatatgtacttcttggcggtgtgtatgatgcccatgttgataaattgcgccacatagccgcgctccttggacacgtgcaaatcatgcggatcgcacacatcccgatcgtccttgcgcacgaccagctgatgggaatgtgggctgtccaagttagtttggaacaaactgcaccggatgacggcgggtccatcgtagttgcacagtgtaacctccgggaaggttttgggcgtccgcttcgaattggcgccatttagcgatccatgtgttccatgcatctcgctcttgtaccgaaagcggaacttctccaccggttgctcaacgatccgcagctgcggcacgtgtttgatatcgccgtcagatgccaggccattttgatggtatccaaagttttgggacggtggcacagtggccggagcgggcacaaagtactggtgatccatgtacatgttgccaaaactggtgacattagcaacgccgaaactaacgccagtggagtttattaaattggtagcacccaattggcaaattccgccgttgttcaacagctgattctggtatggtgagtttgccattggcggctggtgtggtgaattgccgccgggcaaattaagattggcgaagtccgtttgcagttccatggttttcggggagtgggctggtgaaaaggatcggttggtggagttgggtgatgtactgctgctatagccactggtgctggatgcatcgttcataaacatcacatttttcccattgtccaggtcgtagtactgattcatgttcatagtccgtatcaatccaatatttctgatcaatagcgtcttaacaactcaaaagtgatccgctgccttcgccgatcggaacgctaatgatcgaaacgagctccgccgatggctgaccattcgttttaggtacttccccgatgttcggcggatgggaaattatctgcggcggccacgtcgagatgactcacgggtttttctggcgcaccactcagtgtgatttttttgatcggctatactataagcatgtacggaattctggattcgcggttgttgtttacagagcgaaatcacactgtttatatgtattccacccaactaatacatatatgcaaatttatggaaaaacgacgcagcgaatcggggaactttagtgcgccactgctggaacgaaaatgaacgaagcactgcgcgaacacaagtagtatcgctcacgagttgcgagcaaaacgctcgctgccctgataacaggtttaagctatttgcgccgagctttcgggtcagcttttcacggaaactacggttcaaattcatttatttgaatacctgatttcaacacaccgcgcacactaaaataaaaacaaggcagagctgccaccggcagataaaacgagttgggtggcaacgccccaatcagatgttctacaaatctagggatggaagcgtacgcgattgtttgttcccattattcttgattaatttttataaatataatttaacctatttcgacaaaaagatataaaggtatataatacaaaatattaatataaataatacaacacttatataaatataaagatataaggaattttaatacaaatttataatgagaaccggcgtaacaacttataactgtgttataaaataataataattatgcaatgcaagtaccgaatattagtattattaataatatatttttacgctttccattggcttttcccttaattcactttcgtcacgcactcatctctagcgcacgctttgtttttcttcgtatgatattacgttttatttcggacccgattcactttcttatgagcatacacacctgaagttagactttccggcgtaattccgggaagccaagaccgaaatggatcctatagaacgtcgcaacatggttggaaaatttaaaacaccggaatgttcttttatcctaagacacttgtgctaaatgataaaaaaaaactacataagcatgcgccactgaactaatttgcaattcagtcggtttccactcccactggacccgcgcacacacacacgcacactcacgcagaaacagctgatctgttgccaggctgcacttagagtatatatgtatgtatttacgatccctttgcactttttgatgtgttaatcaatcttctcacttcgccgttcctctcttactcttgttaccatgccaaggtgtgtgggtgtgtgtgtgtaaatgcttttacaccttatcagttgacgatgagtttgtttatattgataatcaattagcaggaaaaacataaacaaatcggggtcttgactttgcaaccactagtctgcgtctagactagagttattaataggcaggctacaaaattagctctttatgcggacaaaggaaaattcgttttcttggcttgataaaagcaaacgtgtcttaagaacgcctattcaaatttctttgaaggtcaattatgtattttttatggatttttgttagccaattttcactagcagcataccttattgtgacttcttttgttggcttttgcgaaattttcctggtggaaaattcgaactgcactgattgtcggataccgatggactgtatagaacgaaacagatcactgaatgagcctcgcacgtgtttgtatattttggataaaagcttttcggttcagcgcactaaatatgcgtgtgcgagcgagcgcgacttaaaagctttaaacacttgtcgataaaagttttgaactgtgtgcatataaatatggcttaaaacggaacaaatacatatgtgcatatatggattttcgattttgaaacaacgcggaaaatagctaaacacatattgaacatattttattttctcaacatgaaaatttttaaaagttcgccttgtgtgcacaaatatttatttaggaaattcttaaagacgtggagaacaacttttgttgcttttattaccagttacatgattacgattttggttgggaatatttgctgttctaaaatttccgacacgagttatttttcaatagtttgtttttcttcgacgcggcggatgacgaaatctgatttccgattactgcactcggagattaagttggattctgttggccggtgacgtcaatttgctccacagggggccaccaacgtctcccactgataagcctttgagttcagccccctctgatcacccattacctattccataagttatggaattgatgcacaaacgcctggtaactggcgatttttgtttttagccagaggaaaaacaatgcaggcgtcattaacaatgttgttcgcggacgatgattgctcccgttttgggttgaaaaacatgttattttcgaacggagataacccccgtggaaagtgcgagtgggctgcccaatgggagtcatgctttaacaagcttgtttaatttacaactggaatatttcgacgagcattttactttctctggtcgttacaaatttgtgtcccaaggatgcgtgatagaaaattattgtgaatttattgtcaaaattgttttaagctatagaactattttcgaagttttcagaaagaaaatgttttgtcctttatttttcattgtaactcatgttttca

SEQ ID NO: 26588 - DNA, 1158 bp, DROSOPHILA
ttctatacagtccatcggtatccgacaatcagtgcagttcgaattttccaccaggaaaatttcgcaaaagccaacaaaagaagtcacaataagcaacatggctcaaattatcgatggcaaggccatagcccaggaggtgcgcacccaactagcacacgagctcaagggaatggaggctgctggctatccgaagccccatctcacggccgtcattgtgggcgaggatccggctagcgagaagtatgtggctaacaagatggtcgcctgccgggaggtgggcatctccagtgagaccaagagattgcccgcctctaccacgcaggaggagctgctgcaactgattgccgatctgaacaaggatccccaggtcacggggatactggtgcagctgccggtacccgagcacatcaatgagcgcaccatctgcaatgccgtcgatgtggacaaggatgtggatggcttcaatgaggtcaacatcggacgcacggctctggacatggaggccaatattccggccacgccgctgggagtcaagcgactgttggagcatatgaaaatcgaaactctcggtcgtaacgccgttgtggtgggacgctccaagaatgtcagtctaccgatggcaatcttgctgcacgcggatggcaagtatgccaccaaggcaatggatgccacggtgaccatctgccacaggtatacaccgcccaaggaactggctcgccattgccgccaagcggatatcattgtggtcgcagtgggaaagccgggtttgatcaccaaggacatggttaagcccggagcctgtgtcatcgacgtgggcatcaaccgcatcaaggatgagagcactggccagtttaagctggtcggagacgtggactttgaagaagttcgccaggtcgccggccacatcactcctgtgcccggcggagttggtcccatgacggtggccatgctgatgcacaacacgctgaaggcagccaggaagcagttcgatgatcgcaagtcctcctgaagattcaccagtaactatcgtgcttcgctggccgagaaatagtatttttatttaatcccctaaacctatattagatagtaaagttactgaccacaagctaacatgacataaacccacatattttgctatataaacagaaataatgaaat

SEQ ID NO: 26589 - protein, 303 aa, DROSOPHILA
MAQIIDGKAIAQEVRTQLAHELKGMEAAGYPKPHLTAVIVGEDPASEKYVANKMVACREVGISSETKRLPASTTQEELLQLIADLNKDPQVTGILVQLPVPEHINERTICNAVDVDKDVDGFNEVNIGRTALDMEANIPATPLGVKRLLEHMKIETLGRNAVVVGRSKNVSLPMAILLHADGKYATKAMDATVTICHRYTPPKELARHCRQADIIVVAVGKPGLITKDMVKPGACVIDVGINRIKDESTGQFKLVGDVDFEEVRQVAGHITPVPGGVGPMTVAMLMHNTLKAARKQFDDRKSS

SEQ ID NO: 26590 - DNA, 4003 bp, DROSOPHILA
atccgagctgtccaaaaatttggtaagcttaaagacgtatgctcagtacttaaaaccaaactcatattgacaaatttaccaggttcgcactgggaaaggtgatggagatcctgggcgatttccatgcctcagccgattgcttcgccacgtcgctgcagttagagccatcatgtccggtgctaccttttacttctatacctttggtgtttgaataggaacactttcgtgtctaattcgaagcttgacaaacctcaaagtcaacagcaatactagaattatacttcctaattccttcagtgtaaaaattgttgtatcgcagttttggagcaacaaatgtttaaatattgtttgtgtgtaaattattaccaagaattgttcgagcttggctgtattatgtgaatgaaccattctgctatcttccttaatcacccacttttaaggagatggttcggttaaatttattactctattaggtgttgttaattacatacaaaattggttattatataaatatacagtatttcgtgaaattatttcatcatatcattgtgtatcagtaaatgtcagtattcgattttttaagttccttgcattttctacttggaaaatgattctaattgttttgaaagcttgtttctcttttaccctgtggccttttactttccttacaagctaatttacgccgtaatatccgcattctctgctaaaggccaaatttagaccttaaaattaccaaggagcttacttgcagttgggccccatttcctttagtttcggtgcgcttgtgtcgttgccctgggcaactactatagcgtacgggcaatcaataaaaatataaacaagccagtcgaaagtgtcgctgcggaacaggcacaggaatttgggtttattacgccactcttaaaaaatcgcgggcgattcattttgtgtgccactttagactttggccctgttagatcagcaacttgaattttgatggccgattagttgcacaagcattatgacgcccaaacgaaagcgtcgcgtacgcagcgagtcgcgggccaaaagcaaagaccagggaaggtccaaggcagagcacttgcatctgcttgagcaactggagttgaccgacagctgctgcgacatctgccactgcgactgttacagttcccacagcagcggttctgcgagtggacgcggcaatcagcggcaggcgagcgtcaaggagttgttgcaactggaaaacgacattcagaccctggagaaattgcagcgacgggaaagtacaagctgccaccgaagtgcttccaggtcgccaacagagcgaaagtttccccacagcaggcggggatccttcgacggtgagaaaagaagtgcaagctcaggcaggactcggcggtcgaagagcgcaggaagtcgcagttgcgagtcccgggagaagcagcctgcacagaaagcgcaacaaattcctcaggatcgtcgaaagcgccgggctcaaaaggattgcaaaatgcttcaagtaagctcagatgccaggaaaaaggttattcgaatggacaatgagcaattttagagtctatccgtccgtctgtctaaatgaacgctgtgatctcagagctataaaaactgcaagtttggtttgaacgttgccacgcagaagacgcccaaaactgtcaccctaaagtgatttacatttattaatatttaattatttaacttgcttattttcattttggccacaaacggccaaaactgtcgtttctctggccgtaaggagcacggccgatatagcgtcgcccaactttgcaattttgtttcaaagaattaaaaaccccactctaatgcctacaaactgcggccacttttattattttatgttgtaagcttttaactgtcaaaaacattttggctaatgatgttttagccaattaagaagtcagtaagcaacaaatgtaatcgccgctacgtgatcgcattcctacctttaattctttgccacctttacagaaattcttggctcccctcaacgacgcacacaacctttccatcgtcggacgggccaagtccaagtcgcaagaaaatttggctgtggtttcgtgccagccgcagatcaagaagagctcgttatgcagctcgatggccaacttgtgccttgcaccaatggtgcgagccgcatatcagcaggtccccagccacgaccagaagatcctgaactgcatggcggaaaagcggaggcagcaggccgccgataaggagacggcctggttggcgcgcaagttctgggagaacgagcgacttgagcggcagcttcttcgcgtggagcagctggaagcttacaagcatgcggttcacgacaaacagttccaggactacctggtgaccaaggcgcgactgcaggctttggccgagcgcgatctggcagagcttaagcgattgcggggagcgcttaacgccaaggacgatgcggtcaagaagcgactggaggccaggcggctggagcgagaccttaacatctcacagcgacggtgcgaggaactgcgtcgtagcgaggcggtcactgtgcatcaggaggagcagcacctggacgacacgctgcgtaagcgcgacatctgcatgcggctaacgcaacgcctgcgacgggcggacgagttacgcggccagctgatggagtcgtacctcaagcgtatgcagctcgacaactacatggagcaggtgcatcacgaggagcactggcgggagcgacagcaggaggagcggctgcgcagggatcagctccgcgaggatattgaacgcaaacgccatcagtcccagcgtttcgttgagtgccgccaacggcgccaaaatgatcgcttccgtaccgccaagatctctgccagtctgcgggagctggtgcgccagtcggtcacaccagaaggcgctattagtggctcggtgggccaggataacccagcgctcaactcatatgtccagcagcagataaagctgggtcgcctgctcttcgaacaatctgccagggaataacttgtttggatgatgcatttttgatggttatgtacatatatacaaattgttgctggttttatgttattaaagtcatttaatacttgtagttctatttttgtatatttatctatatatattatatttacggaattagaattattcgcttttttttgtaacacgctaagtcaagtactgcataaggtcccgcgtatgattggaatccgatgcatagatttggatcttatcgccaaatgaacagtgataacaaagccgtacaatcaaaaagcaccgggtgaggaggttgatgtctgaatggagacaaaggtgtaccccaccctgaaccaggaactgcagagcacgttcataagtatacgtatgggcagagtgagcctcagtcaaaggccttgaagtgggacagtgtcccaagaggaaagactccccttagtttcccctcatttcgcatcgatcacgtttcggtagtgcaaatactcaaagtgactaagagccccgcgaattatacagaagatgcacatgcatcccaaactgagacaaggttatctgaccccattgagtctgattcatcgtcgacctaggccagcggtcgtttcctgggttcaagcttttagtctctatcaaagttaattagattaacactttaactgctttctcggttttagagctcaagtgcataattgttgcggtggttttgaaattgaaacaagtattgtgctcatgcacggtgacattttgttgtgtagctagtggagacatgattttgtggactgtaacgtgaaattactcttggaaagtatgccttgcctacgcattgagtagcccgccctaggaatttatggcgtgggggaatttactaaccatgaaaatgataaaacgtggcgattatattcatccgcttcgccaccgaaagattactcaaaaactaatatggtaaaacttatatatgtagatatatggtacggtggtaaaatgacccacaagatatacaaaatattccatagga

SEQ ID NO: 26591 - DNA, 1515 bp, DROSOPHILA
atgacgcccaaacgaaagcgtcgcgtacgcagcgagtcgcgggccaaaagcaaagaccagggaaggtccaaggcagagcacttgcatctgcttgagcaactggagttgaccgacagctgctgcgacatctgccactgcgactgttacagttcccacagcagcggttctgcgagtggacgcggcaatcagcggcaggcgagcgtcaaggagttgttgcaactggaaaacgacattcagaccctggagaaattgcagcgacgggaaagtacaagctgccaccgaagtgcttccaggtcgccaacagagcgaaagtttccccacagcaggcggggatccttcgacggtgagaaaagaagtgcaagctcaggcaggactcggcggtcgaagagcgcaggaagtcgcagttgcgagtcccgggagaagcagcctgcacagaaagcgcaacaaattcctcaggatcgtcgaaagcgccgggctcaaaaggattgcaaaatgcttcaaaaattcttggctcccctcaacgacgcacacaacctttccatcgtcggacgggccaagtccaagtcgcaagaaaatttggctgtggtttcgtgccagccgcagatcaagaagagctcgttatgcagctcgatggccaacttgtgccttgcaccaatggtgcgagccgcatatcagcaggtccccagccacgaccagaagatcctgaactgcatggcggaaaagcggaggcagcaggccgccgataaggagacggcctggttggcgcgcaagttctgggagaacgagcgacttgagcggcagcttcttcgcgtggagcagctggaagcttacaagcatgcggttcacgacaaacagttccaggactacctggtgaccaaggcgcgactgcaggctttggccgagcgcgatctggcagagcttaagcgattgcggggagcgcttaacgccaaggacgatgcggtcaagaagcgactggaggccaggcggctggagcgagaccttaacatctcacagcgacggtgcgaggaactgcgtcgtagcgaggcggtcactgtgcatcaggaggagcagcacctggacgacacgctgcgtaagcgcgacatctgcatgcggctaacgcaacgcctgcgacgggcggacgagttacgcggccagctgatggagtcgtacctcaagcgtatgcagctcgacaactacatggagcaggtgcatcacgaggagcactggcgggagcgacagcaggaggagcggctgcgcagggatcagctccgcgaggatattgaacgcaaacgccatcagtcccagcgtttcgttgagtgccgccaacggcgccaaaatgatcgcttccgtaccgccaagatctctgccagtctgcgggagctggtgcgccagtcggtcacaccagaaggcgctattagtggctcggtgggccaggataacccagcgctcaactcatatgtccagcagcagataaagctgggtcgcctgctcttcgaacaatctgccagggaataa

SEQ ID NO: 26592 - protein, 504 aa, DROSOPHILA
MTPKRKRRVRSESRAKSKDQGRSKAEHLHLLEQLELTDSCCDICHCDCYSSHSSGSASGRGNQRQASVKELLQLENDIQTLEKLQRRESTSCHRSASRSPTERKFPHSRRGSFDGEKRSASSGRTRRSKSAGSRSCESREKQPAQKAQQIPQDRRKRRAQKDCKMLQKFLAPLNDAHNLSIVGRAKSKSQENLAVVSCQPQIKKSSLCSSMANLCLAPMVRAAYQQVPSHDQKILNCMAEKRRQQAADKETAWLARKFWENERLERQLLRVEQLEAYKHAVHDKQFQDYLVTKARLQALAERDLAELKRLRGALNAKDDAVKKRLEARRLERDLNISQRRCEELRRSEAVTVHQEEQHLDDTLRKRDICMRLTQRLRRADELRGQLMESYLKRMQLDNYMEQVHHEEHWRERQQEERLRRDQLREDIERKRHQSQRFVECRQRRQNDRFRTAKISASLRELVRQSVTPEGAISGSVGQDNPALNSYVQQQIKLGRLLFEQSARE

SEQ ID NO: 26593 - DNA, 15243 bp, DROSOPHILA
cttcgcttccataatcctgaccatccgggcagaagtcagtctctcagacgttccacattaagcgacctttgtgcctttttgcctttcttaaagaaacatttcacatttttattagtcctgcaaatatctatcgatttgcaaaaaaaaaaatttttgccccgcccactctaacggcctaaaatcggccaaaactgtcgcgcccacatttgtgaacaatttttccataatttaatttgtcttgcaattttctatcgatttgcaaaaaaacacattagatacccgttactcagctaatatgcgaacgcgaaatttttttatttttctgggataacgatagatattgaggaaaaaaaatttttaattgttcaaaattgttttcaacgaagctagtatacccttttactctacgggtaacgggtataaaaagttaagtagaatcaactgcataaaataagctgcggcatgaaaaaagtctgtaaattttgttattcttgaatatttttggtgttttgttcatacttctagttaaaatactgcgtttcaattcaatacccattactagtatataagattcgttgaaaagtatataacaggtagaagcgtcatcaaaacgatcatacgtgctaagatggggaagtactattagctactccaacaaattgttaccttccaacaaggtgaccatttgctaaaggattatagcacccatcagaaagtacggtttccaaatctggttattcgcttgcgatttccaaatcagaaggatccaagttatccagaacaggtctgtgggactgatcactggttgcgagtggtttgtgagaaacactaccctcttttgaggagggtcagcagacgctgacgtactctcgtgctaattcttttataaactaaaacaacgcagattaatttttccatttcttgtttcaggttatacccctgaaagactagtttgcgtagaaagggacggacgtgaagaaggacaaacgggcattaaactatgttgcagttcttcatttgcacttcatatcactttaataaacttgtgtaaatcggtctaaaatactgtttaacatcatacaaaataataacaaaaatcttaaaactacttgaggacatagacaaacattgtaaaataaattaactattggtaaggaatagctacatgtacttgaaagtatctagagttatctacggctattatacactatttacaaaatgtttgacttgacattggcatcgttaaagatagtgcttttggtgggtggtaaatggtaagtggtttttaagctttctaaaatcttagacacttttgacagactatgtccatacagaggtagggattaggccctccttactagttccaggcggcgtgagaacctccttgttcagaaattccaatggcaggtcgaccaagtaaccctaaaataaaaaattcattttttttaataatagtttttatggagataacaaacactatatagcattactcggctagggtggataaatatcataacagctcgatacatatttttatttccgttactcgcaaaatgtatgtaacaaacagaaggaagcgtttccgaccatattaagtatatattcttctcacgcccatactttgaacaatttttaaattgtatctcattttattcctcaatatcaatggatatgccagaaaaatgtggaaatttcgctttcgcatgtacactagttgagtaacgggtaactgatagtcgggggactcgactatatcattctcttatgttttgaattcgaaatgcaattaataatatcataataaattattcaacataatatttggctgtgctatttgtttactataaactagatagggtcctaattatctgtaatgaaacgtttgctatatacggaaaataatcagattcaaaacacataagaactgagagtggtaacttagtaagtgactgtattaatttaacacataaatataaactaaagatcaattaaatattaattgggaagagtacctgaatgtcgttggctctgttggcagctagatcaggggcggttttggcaagaggcggctcctcctggtatttgcgaaggctggcaaaggtttttacaaagtcagtggggatgcacttaaacacctcgtcgtaaatctctgtgttctgcattgaaatcctacgccaggtgccgtgccaaaacttctcacaaacaggatcgttaatgtccaggtcagaccgactggaaccttcgctttccaggaggcctggttgaataacatataacagatatagattaaggttcctacaaaatcaaacgacataactaacctaagtgttctttaaaaaggtattttcgaaggcgaccggcaaacactccgctcggatacttcttgccattcatgcgtccgtcctcgaactcctcgtccattagaatagccgctatctcggagtcccgctttccgatcatagagcgatcgttaatgtttgccgaaccgcagattacaacgcgatcgtcggctatcaagagctttgagtggacatatatcaactctgttatgggtgtgttattcaaaaaagaatggttgcgcaggctgtggaatgagatatagttttccggattggcaatacccgcctcctgcaggcgggtcaaaattgatgtgcgtcccctgcaagtataaaagcagagtaaatatgtgacttgaaataaaaacgtagtaaagttctttgactatcagctaacggggtagaaagctttccgactcttattaaaacttctaaagatatgatgttatggtttttaggtataagtaagtgaaggtttatgaacaggagagttcccggaatcgtgacattcaacaaaatttggtgttgtgcaatcaactcggcaatggtttcgcaatgcatttgatgtgccctacctggaaatggacgcatagttccagtgtgtaattgctctgactgctatcccagtactgccaccgacatcaccctcaaagcccggtaggagcggcataatcacataaactcggaaaggcttccgttccctagaagagctgaacattagatctgctagaatcaggataagtattttggtttcatacttgtgcgctctaacgatccgtttaaagagtgtttccccgatttgattccgcacattgttataagcacctggcacacccatgcctaactgcatagtgataaaaaattggttttcgatgtacacgtagtgctgcgccttggtgatcgtctggatgtaggcatcgtggatgctttgctccacaagatccgcctctataaagccgcagctccaggcagagacgcttcgaagtagctggcacgtgacccgttgctgacggttttgctgaatgttcggattgagcctcacttggtgatagctttttggcatcaaataggggaatctcgtgttatcgcgtagtttctccagcttcatggcattccagcgctgaatgaagtggcgggccacatccctagcggaagtacccaccacacacagacccacgtcgtgccatggcatccgcggtgttgttgttcgatctatgatatccacgaacggcgagtttaggttcatccagtctttaagtataaagttggagtaatccttgccgaaccagtacttggcctggccgcagaactcactgagtatttgtgtactgctagtggtaatcgccacttcctgcccacctgaagccatgttaaggttgacttcgtggtccgtagcttcctcggactcgatagtgtacacctccgcagatttttcctccgtctcagtagctgttagacggtgcataaagtccttgcccatacgggcgcccttcatcgcgttgttcttcaggcgatcgagtacgttcttacgctccatttcaggggtgttgagtttcatcccttctaaagcgattcccgattctgcgggagtttcacccggactcgaaacgagcgtagacggtataagcagtcgatcaccaggcttaagagttttcaactctatgctagtattgggctcatccgggggtggggacggtggcctttccttggcggaggtatcgtagtgagcgtttcgcgaggacttacgtgatccgaaagctgagtccgtgtcgtctttggtgaagtacaaacttggcgttcgacgcgtgctgccagaaaaagatgacgtagatatgctacccagatccgttagccgatggtggtgatcatcccaacgtccatagcacaaatcaatacctcccataaacgcataggtttggtcgattacgacgatcttttcgtgatgtgcccaaagcagaatacctcctctagcatggtccggatgacgcatgaccttcaaagaacatttaataagttagttcgggacttcatcagcttcatagatgctcatacactatttatatgttcttcaaactaaccttgatgttttcatgcttggccagcgtggacttgctgtagtagctgtttatgccaagtgccatttcaacctccttgtagagcagcacaaagacgcgcactccctgttcggccttgcgcaacaggatcttgtccaatcgccagtagtctccgtcgagtgcgggtcgcttcatgtatatctcgggactgagccaccagtcggcaatatagatctcctcgagggctgcctctaagccgtcggccacggctgacatatactgggcgccgtccacataccacgtggcatgagtgttggcgcgcatcggagcgaaggacatgtgcggattgggcagggtgaagtcgcgcgcatacgagttggccgtgttcttgaggtattgcatccactctttacacttacgccgtgtccagcacttgagcacaatgtgacggttgttcgtcagtacctgcaagcccttgcgcatgcccgtctgatagatacccgtggaaacgtcgaagccctgatcaaagaggatcactgcccggatgcttccgtctgttggacggatgtagccgaagcaggtctcttttacgaaaaaccatcggttccgccacgtgccgcaaactacgtcggagcaaaagtagttgcagcgcacacagcagttcttttgaaagcacccaaaaaaattgcatcctgcttgccctggtctcgttgatccagttcgctttaaaatcacgccttccttgcccttaattcccattcccggaacaaaggacacattagacacttcaacgaagtttagctgtagtaaatgaattgagttatatatcggattttgctaaataacctacaggtattaggtattaggctaacggttctattgccgtcttcttttaatagttaaatatataaattttcgcaaattctttgcttctatatgcttacaacctcccagagaacattgaattgcatagcttaatattaaatgaacatgtttcataacattttaataatattgtacttaccgtttcatggtgagatcggtacaagctgatgttcagcaggttgtacaagtagtcctccagctgttttattctgacgctcagattctctacggtgaccagactctcaggacggtttgggaatcgcggcagcttccgtttcttcttttttttgcgcttcttttgaatgcgtcgtggtgttagacccgccagaatggagctgtgattgggactgatcatagccatggcattgttggcgttactgcccgcgattttactgcttctgccttcagccctcagcggagtgctagtttgtttgaccttggtgtgagaaggaaggtcctttagagtggactcgtcagccatctctctggctgtggctttcaaagtggtacgcttctccttgtgactgcgactgggaaaaggaatgttgagcgaggtgcggaaaaagctgagctgctggtgcaacgagttaaagtgcttgtatcgccgcttgatcgtccacttgaagggaccgtgggtcagctcgattgtgtacctgcgtaaaagaaaaaaagtaatgtcattcttatttggtcaaaatgttttcggcgtaccaataaaaattggcaagacaaatgataacagcatgggggatttgtggctgttagaaagggcgtggccacgttttaaaacaaacttgcacagcgtaggcaagtcttttttcaccacttctacggacagacggacggacacggtcagatcgcttcagctggtgatcccaatcaagaacatatgtaaaaaacgctcccgttttaacgtatttagtataacctcttactcatctttcctatatgaatatgattggatttcactcacagattggggtttagcagatgtgtagtgacgctacgctccgtatcgacgatccgaacatgaatctcacggcccgggatgaaaaccttgcgctggaacgagttgaacttgacgctcggcccgtatatgctagtaaatggtatttcgtgtctcaggactacactgttgttttcctcgtcgtcgaactcctcctcatcatcgtccgtctccttgcgctccaccagcaccggcttgtcgcccacgttggatagaatggtcacagaatcaggaaaagcgagggtctcatcgtactcagaatcgactagagagaactgaaattctggcaggcagcggttatgatgctcgacaaccgcttcgtctgtgcagtcccggaacactccctctccctcttcattgttggagttctcctccgacgcgtcctcttccccgctgccatgttcttcgtccgagttggtaagtgcgtagggcggcaaggcgcctccaacggtgccggcatctgccatcgcctcgtactgggcaaagtagtaggaactgtctaaatcatcgtagcctctgttaacgtagccgccatagtgcgccggccggtaaacatcgtcagtggggtgttcaactgcaagatgacagataaaaggaatgggcgtaaggaagacaataaattttaacagatttaaccttaaactagaagtattggtgagtcccatgacgatcacaattatatttcaaacccatgatacttgcggcatgtgttatttgtgtaaaatcaaaaagagttgcaaatgtaaagttccctctgtgattttacctaacataaaatagattaaatggctaggtgacctttagttgtcagtttcccagccatgctaagtacatgtgtaagttctatttcatgttgggtaagattggcacaacatttaaaaatactggtaaacataaattaaaaacattttttatataacttgaagtatatatttttctagtctaataataaaatttaaattgtttgatgttcgaaaagccatgaatgtaaatataacatttttgagatatgtcccccggctgaacggcctgtgttgtaaccattaaatggtaataattagcaagtgctatctacattcgaaacagaagctcgctcaaggtcagagctcacgacatgtggtgtagttaagtttaatgcattatggtcggctgaacttgacataggaaccctgctcgaaccttgaaaacatttaaagctaaatacacacgacgcacctccttcgcccgtaagtatagcattttccttagctcagtgctactggctgagaacgcaaatcagaggagaatattaggtatcgtacgcatcttttggagatacagttttgccatatacctgtcctaatctctactgttctgttttcccaaaatacttgagcaatcagcttctagctgattgacatttagatagcaagcccaaataaaacggcacaacaaatagattaggccatactgcacagtaggtaggccaaccaatgacggttaagtgagtttatggatgcggcacggctttgcaaaagtgcacaggttcagttatcgacgatagtaataaacagaataaatcagtacttagtcaagtgctttgattagcagacaataacaggtgtcctgtcctattcgcctattcacagagtaactttatttctgtccgctgagtaccgcgtatagaaatatttaaaattcaaaaatcgaaaatggttttttaaaaaaaaaaggtagcgacacctgaaaatttttgttaagatactgtttcagaagttgttggtttaatttatcaaacaattgaacgagtcataacttacgattgctccttatcacttgtgataattaaaataaactggaacgccgagtgcaaagaatttgataatggccgtcaatgatcaatgacattggggcacttccatgataccctatcataataagtgccatcaaagttttattaccacacttttacatacacaggctagcttatgggcaagttcaactggcaggcataaattcttggtattgaattcgttattatatgggtagtgaaaataacgagtgttggcatatgccttatcacgaagctctttttgctatcagcttcaagtcaccaaacaaaaacttctggaggcaaaaacaaaaacttctttaatgctcgagttccatgatttgtgataaaagtgaaaaaataaaaaaatttaagtccatcaaaaatgtatttgattagacgaatcgttaaagagaattgtggatataattaaaccttggacctattattcaatcatcggccgccgttttcagaaatttaaggcggtataataagtgtaacaccgtactcaataaaagaaccataatttcttaacaccttttcactttcaaagcgatttgccgaactcattagttttggctcattggttttggcaagcaaattaacttaaaaaaaacttgacacttttatcactaacagataagacgaatagaagtaaccccattttgtttcaagaatatacaatttttcgttgaaaaaactaaactccaaccacaataatacgtttttatggtggcgaataaagctgtggtatcccattcctattgatagggcattggtgtgaaaaaaaactagttctaaattgccgaattaaatgttacttaaacatttttgatttaactgaaaaattctgttatatgcattgtatttttttttgcaggaatgttaatgctttccatttaatgcccgttatcaaaatgtcctcagaccgagggcgttcattttgaatcgcctttgtttagcgggttttgtcagtggccggtctactgaaaaggttattaaacccaccgatcgcttgcttcacctgacctacacacaattgcaaagaaatcgaaacttcctgttgcaatgatcgagcatgagtacaaatgtaaatcaggctcgatatatttttaacaatatcggcatgtatcgttacttgcagcgcgtcatgcattttaaaattgattatgattcatttactaattgcaccgttaggccgagcccaacacgcaatttgatggaagcaataagtgggtaaaggcttatataatccaaaggaaacgggtattgttcggctaatttattatttaggcaatgaaatcgttatcagttcttggttccctacactactacacttatttaagttcgactgcacactcattgttataaatcgccccaaattgaaacaatgaaaacttggtgcagaatgatttttcactttcgcataccataacacctaccgccaaccagttctaaatgttgaaatatcttagcaaacatgatcactcttatctcatctcacgatgacgcacatatttcattgccgctctacgagaaccaagtaatctatgcaaatgaaaatatctttatcttcagatctaaaaattacccatgctggccatcagctgtgagatgctgcggcgatgacgtcggacctgcaaatgtggcaagttggcgttcgatgacgcctgccggggcagttgcagttgctgggcctcatggttcttgctggttttggtatccaagcacgtggccatcattgttgtgtgcgctttacgcgggctatttaatgggctctattttatttttggcaatcggtttttggctttatagataggaagcttttgttgtcggctccagttttttgcatttctcagtcgcatcgacagttcgcctacgtgaaaaatgtccgttctgcggcctgcggaggctgtttaaaccacaaattataaataccgcgtttgtgtataatggacttattgccgtggaggtaagtagaggaaggaaggatactttgcgccacgaaaataatcatttaaattaattttgccttccaagtttcattcagtcacagcgtgtatacttttctttttttatatcccttgcattgaaaaataattaattaaatttttatcatggcatatcgttatctttgcgtgaacacaaaaccaagttttgcaaatataactgaatgtttcgcgtgctctttatattcgttggtatttggcttttggcgcttccagctcattaaaggtttgcacaatggccaactaacacacgcacaaattttttgtttttctgctttcgcatattttacttttttcactcggctacatggcttcgcgagatggtgctttataacttgtatctttgcatctcacagatgcttatcaagttatcaagttggagtgcgtctgaaagattgtcacgtttgcatgcgatatgcagcactttgtttacttttcgagccaccgactaacggaagttgcagaaccgaaaaaagcgcgacgtcgcattgaattcgtcaaagagagtaatgccacgctatgtgaaaaaaaccaaactgaagacacctcacactcacactttgagcccccggcaaaaagctcgccttaccgccacgatctgcgatccacgagaaacgttgcgacaacttggccgtcactccggttaataatattaactaaacctcgcgacgcagccaaaagcttaggtcgccgagctcaaaacggttaacgggtaacggttacggcgagagcgtcaatgccgcaagttggtaatggagagggagttttccagagcacagctgcgaacttcaaaacagctggcaaagcttttcataatctccaagatattgaaatgcgatagcccgaaaacccttcgactgttctaaggtattatgcaaataaaaacataatgggcttctacggcaaggtcagccacaatccataagaacaagttctctgccgaggcattggcacaaactctacaagctttccaaagctttctgcgcggttcacacaccttttaaaaatcgctgatcgagtacaggcctattgtcggacccgcaacaatggtcgaggagtcgatgagtcacaacggcactttgggtgtgcatgtagctctgcttagtatctattgcggctatcttatcggcaacactagacttgggcacaatcgctgtaatcagaactcattatttgtacgaccccaatgaagtgcgcaggataaataaccgaattacaattagcattcgattagattgtcccacgcggggcaactgaatttcaataacttaaattattgacccctagttcggaactaagtaaaaataaaatcaaaagtatgttttagagactatgtccaagttagtgactcggtaaaaacatttgacgatcgcatcatgccaaataccataccaaactttagtgacgaaaaattattttcggacatttaataaaaatcccctttcatcccaaaaaaaacatgagcctatcgaacaataactttattctaaatattttcaaattatagttagctgttgagaaatgagactaagctttcgaagggatagtgctccggtagcggtttggataaggtagttgactcgttcgatattatttaaacaattcagaaattagtacattgttatcttccataaatctaatctaagaaatatactgtcctaatataagttttccttctgtcactcaaagaaatttttaagtaattaagttttggtgctgacttctatttggtcattgaatttcgtattgggtctgctaactttgaagtagtgatagcttttattactagtgtagtgaattctttgtaaacttgttatttagtatataatataatatattataatagttgcccaagacgaaaaaagaacctgtttgtcacttccaaaatataacagatagaaagttgccaagcccccctaatgcctatagccgcctaaaacttgcacatccttgcacttttaaaaaatgttttcaaatttttttttatatttttattacacttgtaaatttttatcgatttaccaaaaaactttttgccacgcccatactttcaaatttgtttaaatattttctcaatcaattcaccatttccactaactgagtaacgggtatctgactgtcagaacataagtcgaatatagcatttttgttgtacccgttactcgtagagtaaaagggtatactagattcgttaaaaagtatgtaacagacaaaacgttttcgaccatataaagtatattatttatttattattataaagtatatatattcttgatcagaaccaatagccgagttgatctggccatgtcagtctgtccgtatgaacaccaccatctcaggaaccattatagctagagagttgagattagataaaacgattctagaggcacgcccacaaccgcccaaaactgacacaccttttgaaaatgttttaatatttttttttttgatcgttgtgggaaaccacattctaattctttaggtctatgcgttgcctattagattttactaatatcactattagcttggtcacacttgtgaaatatacataaatagtgataagataagaaatgtgcttctataatccgctcctgtcattaaagacagagtattggtttagaggttcatattccaagaaattaaaatcagggccaaaaatggtttgcagtgtgtcgacgttacattgggtgtggctacgtttggaaataagcatacgtgtggaaagtctttaggatctgtatgctgaatcctttataggtacagagatcccgaagttcaaatggatatacgaacggacataatcgactcaattaataatcttgatcaagaatttatatactttccttggtcgaaaagactttgttttacatgttggatacttttaaaagaatctagtataccctttaactgatctagggatgtgggactaaacaagaataagtagcaacatatgttcatacgtatccataatatcacctgacaacatccttatctaaaagcatatttaatctaaaattgattagcaactggtacctaatgattattaaaatccgaagcttcgttggagaacattttccagcacatggttctgggtgacttctaaagtaaaaacttattttagtgtccttgtgtctgatgatttggggaaaaattttaacttgccttttgccatatattgaaattttaaactgcctgaacccacaatttgtttaaatgatattgtaataatatatgttaaaccatttttggacacaaaattcacaagtttttaccacgtttcacacattttatttgtgcaacttttatccatcttcttttttccaaagcaggccaactattttataaatattggtataaaataaatcaatcaatggtataaaatttatcaatttaaataaagttaaaaatacgcactttaatgtgtttttatgaatttaaagcactcacatgcttgcggctactgctgaaataggtttagctcttaatctgatgccagaagttgtggcttaacttctccgtcgtggactccaaactggcactgaaagctggagacctcagcagtgggttaagtgtatatatgtacatttatacatatgtattacttcatttaaatgctttcgtatggcagacttaacactttgataattggtgaaataagatcaaatcaattgaggcgccacatgaacacgtttcgtgagcacacaagaaacaatttaaaaatattaaaatgttggtcaatggcacacacacttctatcgcggcatttttattattggtgtcgagcaagaccccttctgggcaaatctttgctcaaatctttgcttgtcacggtttttgtttgccgagagagctccgaccagcgtcgctataagtcaaattcgaaactgatcaaaacgccaagcgaacgtggaaatgagaacgatcagcagagatttctcgctggaagcgcgatgtatagggagagagcggagagtgaaagttcattgagcttagcactcgttctttctttcctcagatcaggctaaactgcatttgatttatttttcaattaacaattacttcgaacctttcacttaaatttaaattttacttcaaaattcaaaagtttctgttcgcgttcatcttactccacgcctagcaaaacgcacttgactgaccaaactgactgacattttgagcaggagcttttgcctggaaagcttaaacgagacagtccaaacacatacacatacatgcagatacgtacgcttcgatcaaacagctgatccgagaactttaatgcgacgctgtcaactaagccgatgaaactcaaaaatttatcagtacaattgggtcatcgcaataacaagactttaaggaaatcggaaataaagctaacgagggtgcattttattacgacggccaatttatctaatatattggcaaggatctatgctgaaatagtaaatgtggtttttatacccttgttcgtagggtatactagactcgtgaaaaagtatttaacagggacacaccagtcgatctggccatgtctgtccttctgtaagtatcaaccgcacggtctcgccaactgcaatcagtcacaaaactagtcgttgcaacttgcaaggtactctacaaataagtagtttttgtttttaatgagtaacaaaattttaattcgatttttttctttagcgtaacgcacttatttaattttaagccaagagagaatgctatagtcgagtgcctcgactatcagatacccgttactcagctagtagtggtcgagtgggaccaaatttcataatttttctggcttatcgatatatattggggaataaaatcagaaaaaaaattataaaatatacaggtgtgggcctgggagttttgggcggctcgtgggtgttagagtgggcatagggataaaaatttacaattataataaaaaaaacgaaaaaaaatatcaatacatttttcaaaagtgtggacaacttttagctttcataccgacagacgggcatgggcagatcaactggactattgaacttgatcaagaatatatgtacatacatacattatatggtcggaaacgcttcctactacctgtctgttacacacttatcaacgaaactagtatgtatacccttttataaaaatgtgg

SEQ ID NO: 26594 - DNA, 4497 bp, DROSOPHILA
ttttgctaggcgtggagtaagatgaacgcgaacagaaacttttgaattttgaagtaaaatttaaatttaagtgaaagtgttaagtctgccatacgaaagcatttaaatgaagtaatacatatgtataaatgtacatatatacacttaacccactgctgaggtctccagctttcagtgccagtttggagtccacgacggagaagttaagccacaacttctggcatcagattaagagctaaacctatttcagcagtagccgcaagcatttgaacaccccactgacgatgtttaccggccggcgcactatggcggctacgttaacagaggctacgatgatttagacagttcctactactttgcccagtacgaggcgatggcagatgccggcaccgttggaggcgccttgccgccctacgcacttaccaactcggacgaagaacatggcagcggggaagaggacgcgtcggaggagaactccaacaatgaagagggagagggagtgttccgggactgcacagacgaagcggttgtcgagcatcataaccgctgcctgccagaatttcagttctctctagtcgattctgagtacgatgagaccctcgcttttcctgattctgtgaccattctatccaacgtgggcgacaagccggtgctggtggagcgcaaggagacggacgatgatgaggaggagttcgacgacgaggaaaacaacagtgtagtcctgagacacgaaataccatttactagcatatacgggccgagcgtcaagttcaactcgttccagcgcaaggttttcatcccgggccgtgagattcatgttcggatcgtcgatacggagcgtagcgtcactacacatctgctaaaccccaatctgtacacaatcgagctgacccacggtcccttcaagtggacgatcaagcggcgatacaagcactttaactcgttgcaccagcagctcagctttttccgcacctcgctcaacattccttttcccagtcgcagtcacaaggagaagcgtaccactttgaaagccacagccagagagatggctgacgagtccactctaaaggaccttccttctcacaccaaggtcaaacaaactagcactccgctgagggctgaaggcagaagcagtaaaatcgcgggcagtaacgccaacaatgccatggctatgatcagtcccaatcacagctccattctggcgggtctaacaccacgacgcattcaaaagaagcgcaaaaaaaagaagaaacggaagctgccgcgattcccaaaccgtcctgagagtctggtcaccgtagagaatctgagcgtcagaataaaacagctggaggactacttgtacaacctgctgaacatcagcttgtaccgatctcaccatgaaacgctaaacttcgttgaagtgtctaatgtgtcctttgttccgggaatgggaattaagggcaaggaaggcgtgattttaaagcgaactggatcaacgagaccagggcaagcaggatgcaatttttttgggtgctttcaaaagaactgctgtgtgcgctgcaactacttttgctccgacgtagtttgcggcacgtggcggaaccgatggtttttcgtaaaagagacctgcttcggctacatccgtccaacagacggaagcatccgggcagtgatcctctttgatcagggcttcgacgtttccacgggtatctatcagacgggcatgcgcaagggcttgcaggtactgacgaacaaccgtcacattgtgctcaagtgctggacacggcgtaagtgtaaagagtggatgcaatacctcaagaacacggccaactcgtatgcgcgcgacttcaccctgcccaatccgcacatgtccttcgctccgatgcgcgccaacactcatgccacgtgtcccgagatatacatgaagcgacccgcactcgacggagactactggcgattggacaagatcctgttgcgcaaggccgaacagggagtgcgcgtctttgtgctgctctacaaggaggttgaaatggcacttggcataaacagctactacagcaagtccacgctggccaagcatgaaaacatcaaggtcatgcgtcatccggaccatgctagaggaggtattctgctttgggcacatcacgaaaagatcgtcgtaatcgaccaaacctatgcgtttatgggaggtattgatttgtgctatggacgttgggatgatcaccaccatcggctaacggatctgggtagcatatctacgtcatctttttctggcagcacgcgtcgaacgccaagtttgtacttcaccaaagacgacacggactcagctttcggatcacgtaagtcctcgcgaaacgctcactacgatacctccgccaaggaaaggccaccgtccccacccccggatgagcccaatactagcatagagttgaaaactcttaagcctggtgatcgactgcttataccgtctacgctcgtttcgagtccgggtgaaactcccgcagaatcgggaatcgctttagaagggatgaaactcaacacccctgaaatggagcgtaagaacgtactcgatcgcctgaagaacaacgcgatgaagggcgcccgtatgggcaaggactttatgcaccgtctaacagctactgagacggaggaaaaatctgcggaggtgtacactatcgagtccgaggaagctacggaccacgaagtcaaccttaacatggcttcaggtgggcaggaagtggcgattaccactagcagtacacaaatactcagtgagttctgcggccaggccaagtactggttcggcaaggattactccaactttatacttaaagactggatgaacctaaactcgccgttcgtggatatcatagatcgaacaacaacaccgcggatgccatggcacgacgtgggtctgtgtgtggtgggtacttccgctagggatgtggcccgccacttcattcagcgctggaatgccatgaagctggagaaactacgcgataacacgagattcccctatttgatgccaaaaagctatcaccaagtgaggctcaatccgaacattcagcaaaaccgtcagcaacgggtcacgtgccagctacttcgaagcgtctctgcctggagctgcggctttatagaggcggatcttgtggagcaaagcatccacgatgcctacatccagacgatcaccaaggcgcagcactacgtgtacatcgaaaaccaattttttatcactatgcagttaggcatgggtgtgccaggtgcttataacaatgtgcggaatcaaatcggggaaacactctttaaacggatcgttagagcgcacaagtatgaaaccaaaatacttatcctgattctagcagatctaatgttcagctcttctagggaacggaagcctttccgagtttatgtgattatgccgctcctaccgggctttgagggtgatgtcggtggcagtactgggatagcagtcagagcaattacacactggaactatgcgtccatttccaggggacgcacatcaattttgacccgcctgcaggaggcgggtattgccaatccggaaaactatatctcattccacagcctgcgcaaccattcttttttgaataacacacccataacagagttgatatatgtccactcaaagctcttgatagccgacgatcgcgttgtaatctgcggttcggcaaacattaacgatcgctctatgatcggaaagcgggactccgagatagcggctattctaatggacgaggagttcgaggacggacgcatgaatggcaagaagtatccgagcggagtgtttgccggtcgccttcgaaaatacctttttaaagaacacttaggcctcctggaaagcgaaggttccagtcggtctgacctggacattaacgatcctgtttgtgagaagttttggcacggcacctggcgtaggatttcaatgcagaacacagagatttacgacgaggtgtttaagtgcatccccactgactttgtaaaaacctttgccagccttcgcaaataccaggaggagccgcctcttgccaaaaccgcccctgatctagctgccaacagagccaacgacattcagggttacttggtcgacctgccattggaatttctgaacaaggaggttctcacgccgcctggaactagtaaggagggcctaatccctacctctgtatggacatagtctgtcaaaagtgtctaagattttagaaagcttaaaaaccacttaccatttaccacccaccaaaagcactatctttaacgatgccaatgtcaagtcaaacattttgtaaatagtgtataatagccgtagataactctagatactttcaagtacatgtagctattccttaccaatagttaatttattttacaatgtttgtctatgtcctcaagtagttttaagatttttgttattattttgtatgatgttaaacagtattttagaccgatttacacaagtttattaaagtgatatgaagtgcaaatgaagaactgcaacat

SEQ ID NO: 26595 - protein, 1267 aa, DROSOPHILA
MADAGTVGGALPPYALTNSDEEHGSGEEDASEENSNNEEGEGVFRDCTDEAVVEHHNRCLPEFQFSLVDSEYDETLAFPDSVTILSNVGDKPVLVERKETDDDEEEFDDEENNSVVLRHEIPFTSIYGPSVKFNSFQRKVFIPGREIHVRIVDTERSVTTHLLNPNLYTIELTHGPFKWTIKRRYKHFNSLHQQLSFFRTSLNIPFPSRSHKEKRTTLKATAREMADESTLKDLPSHTKVKQTSTPLRAEGRSSKIAGSNANNAMAMISPNHSSILAGLTPRRIQKKRKKKKKRKLPRFPNRPESLVTVENLSVRIKQLEDYLYNLLNISLYRSHHETLNFVEVSNVSFVPGMGIKGKEGVILKRTGSTRPGQAGCNFFGCFQKNCCVRCNYFCSDVVCGTWRNRWFFVKETCFGYIRPTDGSIRAVILFDQGFDVSTGIYQTGMRKGLQVLTNNRHIVLKCWTRRKCKEWMQYLKNTANSYARDFTLPNPHMSFAPMRANTHATCPEIYMKRPALDGDYWRLDKILLRKAEQGVRVFVLLYKEVEMALGINSYYSKSTLAKHENIKVMRHPDHARGGILLWAHHEKIVVIDQTYAFMGGIDLCYGRWDDHHHRLTDLGSISTSSFSGSTRRTPSLYFTKDDTDSAFGSRKSSRNAHYDTSAKERPPSPPPDEPNTSIELKTLKPGDRLLIPSTLVSSPGETPAESGIALEGMKLNTPEMERKNVLDRLKNNAMKGARMGKDFMHRLTATETEEKSAEVYTIESEEATDHEVNLNMASGGQEVAITTSSTQILSEFCGQAKYWFGKDYSNFILKDWMNLNSPFVDIIDRTTTPRMPWHDVGLCVVGTSARDVARHFIQRWNAMKLEKLRDNTRFPYLMPKSYHQVRLNPNIQQNRQQRVTCQLLRSVSAWSCGFIEADLVEQSIHDAYIQTITKAQHYVYIENQFFITMQLGMGVPGAYNNVRNQIGETLFKRIVRAHKYETKILILILADLMFSSSRERKPFRVYVIMPLLPGFEGDVGGSTGIAVRAITHWNYASISRGRTSILTRLQEAGIANPENYISFHSLRNHSFLNNTPITELIYVHSKLLIADDRVVICGSANINDRSMIGKRDSEIAAILMDEEFEDGRMNGKKYPSGVFAGRLRKYLFKEHLGLLESEGSSRSDLDINDPVCEKFWHGTWRRISMQNTEIYDEVFKCIPTDFVKTFASLRKYQEEPPLAKTAPDLAANRANDIQGYLVDLPLEFLNKEVLTPPGTSKEGLIPTSVWT

SEQ ID NO: 26596 - DNA, 15238 bp, DROSOPHILA
cttcgcttccataatcctgaccatccgggcagaagtcagtctctcagacgttccacattaagcgacctttgtgcctttttgcctttcttaaagaaacatttcacatttttattagtcctgcaaatatctatcgatttgcaaaaaaaaaaatttttgccccgcccactctaacggcctaaaatcggccaaaactgtcgcgcccacatttgtgaacaatttttccataatttaatttgtcttgcaattttctatcgatttgcaaaaaaacacattagatacccgttactcagctaatatgcgaacgcgaaatttttttatttttctgggataacgatagatattgaggaaaaaaaatttttaattgttcaaaattgttttcaacgaagctagtatacccttttactctacgggtaacgggtataaaaagttaagtagaatcaactgcataaaataagctgcggcatgaaaaaagtctgtaaattttgttattcttgaatatttttggtgttttgttcatacttctagttaaaatactgcgtttcaattcaatacccattactagtatataagattcgttgaaaagtatataacaggtagaagcgtcatcaaaacgatcatacgtgctaagatggggaagtactattagctactccaacaaattgttaccttccaacaaggtgaccatttgctaaaggattatagcacccatcagaaagtacggtttccaaatctggttattcgcttgcgatttccaaatcagaaggatccaagttatccagaacaggtctgtgggactgatcactggttgcgagtggtttgtgagaaacactaccctcttttgaggagggtcagcagacgctgacgtactctcgtgctaattcttttataaactaaaacaacgcagattaatttttccatttcttgtttcaggttatacccctgaaagactagtttgcgtagaaagggacggacgtgaagaaggacaaacgggcattaaactatgttgcagttcttcatttgcacttcatatcactttaataaacttgtgtaaatcggtctaaaatactgtttaacatcatacaaaataataacaaaaatcttaaaactacttgaggacatagacaaacattgtaaaataaattaactattggtaaggaatagctacatgtacttgaaagtatctagagttatctacggctattatacactatttacaaaatgtttgacttgacattggcatcgttaaagatagtgcttttggtgggtggtaaatggtaagtggtttttaagctttctaaaatcttagacacttttgacagactatgtccatacagaggtagggattaggccctccttactagttccaggcggcgtgagaacctccttgttcagaaattccaatggcaggtcgaccaagtaaccctaaaataaaaaattcattttttttaataatagtttttatggagataacaaacactatatagcattactcggctagggtggataaatatcataacagctcgatacatatttttatttccgttactcgcaaaatgtatgtaacaaacagaaggaagcgtttccgaccatattaagtatatattcttctcacgcccatactttgaacaatttttaaattgtatctcattttattcctcaatatcaatggatatgccagaaaaatgtggaaatttcgctttcgcatgtacactagttgagtaacgggtaactgatagtcgggggactcgactatatcattctcttatgttttgaattcgaaatgcaattaataatatcataataaattattcaacataatatttggctgtgctatttgtttactataaactagatagggtcctaattatctgtaatgaaacgtttgctatatacggaaaataatcagattcaaaacacataagaactgagagtggtaacttagtaagtgactgtattaatttaacacataaatataaactaaagatcaattaaatattaattgggaagagtacctgaatgtcgttggctctgttggcagctagatcaggggcggttttggcaagaggcggctcctcctggtatttgcgaaggctggcaaaggtttttacaaagtcagtggggatgcacttaaacacctcgtcgtaaatctctgtgttctgcattgaaatcctacgccaggtgccgtgccaaaacttctcacaaacaggatcgttaatgtccaggtcagaccgactggaaccttcgctttccaggaggcctggttgaataacatataacagatatagattaaggttcctacaaaatcaaacgacataactaacctaagtgttctttaaaaaggtattttcgaaggcgaccggcaaacactccgctcggatacttcttgccattcatgcgtccgtcctcgaactcctcgtccattagaatagccgctatctcggagtcccgctttccgatcatagagcgatcgttaatgtttgccgaaccgcagattacaacgcgatcgtcggctatcaagagctttgagtggacatatatcaactctgttatgggtgtgttattcaaaaaagaatggttgcgcaggctgtggaatgagatatagttttccggattggcaatacccgcctcctgcaggcgggtcaaaattgatgtgcgtcccctgcaagtataaaagcagagtaaatatgtgacttgaaataaaaacgtagtaaagttctttgactatcagctaacggggtagaaagctttccgactcttattaaaacttctaaagatatgatgttatggtttttaggtataagtaagtgaaggtttatgaacaggagagttcccggaatcgtgacattcaacaaaatttggtgttgtgcaatcaactcggcaatggtttcgcaatgcatttgatgtgccctacctggaaatggacgcatagttccagtgtgtaattgctctgactgctatcccagtactgccaccgacatcaccctcaaagcccggtaggagcggcataatcacataaactcggaaaggcttccgttccctagaagagctgaacattagatctgctagaatcaggataagtattttggtttcatacttgtgcgctctaacgatccgtttaaagagtgtttccccgatttgattccgcacattgttataagcacctggcacacccatgcctaactgcatagtgataaaaaattggttttcgatgtacacgtagtgctgcgccttggtgatcgtctggatgtaggcatcgtggatgctttgctccacaagatccgcctctataaagccgcagctccaggcagagacgcttcgaagtagctggcacgtgacccgttgctgacggttttgctgaatgttcggattgagcctcacttggtgatagctttttggcatcaaataggggaatctcgtgttatcgcgtagtttctccagcttcatggcattccagcgctgaatgaagtggcgggccacatccctagcggaagtacccaccacacacagacccacgtcgtgccatggcatccgcggtgttgttgttcgatctatgatatccacgaacggcgagtttaggttcatccagtctttaagtataaagttggagtaatccttgccgaaccagtacttggcctggccgcagaactcactgagtatttgtgtactgctagtggtaatcgccacttcctgcccacctgaagccatgttaaggttgacttcgtggtccgtagcttcctcggactcgatagtgtacacctccgcagatttttcctccgtctcagtagctgttagacggtgcataaagtccttgcccatacgggcgcccttcatcgcgttgttcttcaggcgatcgagtacgttcttacgctccatttcaggggtgttgagtttcatcccttctaaagcgattcccgattctgcgggagtttcacccggactcgaaacgagcgtagacggtataagcagtcgatcaccaggcttaagagttttcaactctatgctagtattgggctcatccgggggtggggacggtggcctttccttggcggaggtatcgtagtgagcgtttcgcgaggacttacgtgatccgaaagctgagtccgtgtcgtctttggtgaagtacaaacttggcgttcgacgcgtgctgccagaaaaagatgacgtagatatgctacccagatccgttagccgatggtggtgatcatcccaacgtccatagcacaaatcaatacctcccataaacgcataggtttggtcgattacgacgatcttttcgtgatgtgcccaaagcagaatacctcctctagcatggtccggatgacgcatgaccttcaaagaacatttaataagttagttcgggacttcatcagcttcatagatgctcatacactatttatatgttcttcaaactaaccttgatgttttcatgcttggccagcgtggacttgctgtagtagctgtttatgccaagtgccatttcaacctccttgtagagcagcacaaagacgcgcactccctgttcggccttgcgcaacaggatcttgtccaatcgccagtagtctccgtcgagtgcgggtcgcttcatgtatatctcgggactgagccaccagtcggcaatatagatctcctcgagggctgcctctaagccgtcggccacggctgacatatactgggcgccgtccacataccacgtggcatgagtgttggcgcgcatcggagcgaaggacatgtgcggattgggcagggtgaagtcgcgcgcatacgagttggccgtgttcttgaggtattgcatccactctttacacttacgccgtgtccagcacttgagcacaatgtgacggttgttcgtcagtacctgcaagcccttgcgcatgcccgtctgatagatacccgtggaaacgtcgaagccctgatcaaagaggatcactgcccggatgcttccgtctgttggacggatgtagccgaagcaggtctcttttacgaaaaaccatcggttccgccacgtgccgcaaactacgtcggagcaaaagtagttgcagcgcacacagcagttcttttgaaagcacccaaaaaaattgcatcctgcttgccctggtctcgttgatccagttcgctttaaaatcacgccttccttgcccttaattcccattcccggaacaaaggacacattagacacttcaacgaagtttagctgtagtaaatgaattgagttatatatcggattttgctaaataacctacaggtattaggtattaggctaacggttctattgccgtcttcttttaatagttaaatatataaattttcgcaaattctttgcttctatatgcttacaacctcccagagaacattgaattgcatagcttaatattaaatgaacatgtttcataacattttaataatattgtacttaccgtttcatggtgagatcggtacaagctgatgttcagcaggttgtacaagtagtcctccagctgttttattctgacgctcagattctctacggtgaccagactctcaggacggtttgggaatcgcggcagcttccgtttcttcttttttttgcgcttcttttgaatgcgtcgtggtgttagacccgccagaatggagctgtgattgggactgatcatagccatggcattgttggcgttactgcccgcgattttactgcttctgccttcagccctcagcggagtgctagtttgtttgaccttggtgtgagaaggaaggtcctttagagtggactcgtcagccatctctctggctgtggctttcaaagtggtacgcttctccttgtgactgcgactgggaaaaggaatgttgagcgaggtgcggaaaaagctgagctgctggtgcaacgagttaaagtgcttgtatcgccgcttgatcgtccacttgaagggaccgtgggtcagctcgattgtgtacctgcgtaaaagaaaaaaagtaatgtcattcttatttggtcaaaatgttttcggcgtaccaataaaaattggcaagacaaatgataacagcatgggggatttgtggctgttagaaagggcgtggccacgttttaaaacaaacttgcacagcgtaggcaagtcttttttcaccacttctacggacagacggacggacacggtcagatcgcttcagctggtgatcccaatcaagaacatatgtaaaaaacgctcccgttttaacgtatttagtataacctcttactcatctttcctatatgaatatgattggatttcactcacagattggggtttagcagatgtgtagtgacgctacgctccgtatcgacgatccgaacatgaatctcacggcccgggatgaaaaccttgcgctggaacgagttgaacttgacgctcggcccgtatatgctagtaaatggtatttcgtgtctcaggactacactgttgttttcctcgtcgtcgaactcctcctcatcatcgtccgtctccttgcgctccaccagcaccggcttgtcgcccacgttggatagaatggtcacagaatcaggaaaagcgagggtctcatcgtactcagaatcgactagagagaactgaaattctggcaggcagcggttatgatgctcgacaaccgcttcgtctgtgcagtcccggaacactccctctccctcttcattgttggagttctcctccgacgcgtcctcttccccgctgccatgttcttcgtccgagttggtaagtgcgtagggcggcaaggcgcctccaacggtgccggcatctgccatcgcctcgtactgggcaaagtagtaggaactgtctaaatcatcgtagcctctgttaacgtagccgccatagtgcgccggccggtaaacatcgtcagtggggtgttcaactgcaagatgacagataaaaggaatgggcgtaaggaagacaataaattttaacagatttaaccttaaactagaagtattggtgagtcccatgacgatcacaattatatttcaaacccatgatacttgcggcatgtgttatttgtgtaaaatcaaaaagagttgcaaatgtaaagttccctctgtgattttacctaacataaaatagattaaatggctaggtgacctttagttgtcagtttcccagccatgctaagtacatgtgtaagttctatttcatgttgggtaagattggcacaacatttaaaaatactggtaaacataaattaaaaacattttttatataacttgaagtatatatttttctagtctaataataaaatttaaattgtttgatgttcgaaaagccatgaatgtaaatataacatttttgagatatgtcccccggctgaacggcctgtgttgtaaccattaaatggtaataattagcaagtgctatctacattcgaaacagaagctcgctcaaggtcagagctcacgacatgtggtgtagttaagtttaatgcattatggtcggctgaacttgacataggaaccctgctcgaaccttgaaaacatttaaagctaaatacacacgacgcacctccttcgcccgtaagtatagcattttccttagctcagtgctactggctgagaacgcaaatcagaggagaatattaggtatcgtacgcatcttttggagatacagttttgccatatacctgtcctaatctctactgttctgttttcccaaaatacttgagcaatcagcttctagctgattgacatttagatagcaagcccaaataaaacggcacaacaaatagattaggccatactgcacagtaggtaggccaaccaatgacggttaagtgagtttatggatgcggcacggctttgcaaaagtgcacaggttcagttatcgacgatagtaataaacagaataaatcagtacttagtcaagtgctttgattagcagacaataacaggtgtcctgtcctattcgcctattcacagagtaactttatttctgtccgctgagtaccgcgtatagaaatatttaaaattcaaaaatcgaaaatggttttttaaaaaaaaaaggtagcgacacctgaaaatttttgttaagatactgtttcagaagttgttggtttaatttatcaaacaattgaacgagtcataacttacgattgctccttatcacttgtgataattaaaataaactggaacgccgagtgcaaagaatttgataatggccgtcaatgatcaatgacattggggcacttccatgataccctatcataataagtgccatcaaagttttattaccacacttttacatacacaggctagcttatgggcaagttcaactggcaggcataaattcttggtattgaattcgttattatatgggtagtgaaaataacgagtgttggcatatgccttatcacgaagctctttttgctatcagcttcaagtcaccaaacaaaaacttctggaggcaaaaacaaaaacttctttaatgctcgagttccatgatttgtgataaaagtgaaaaaataaaaaaatttaagtccatcaaaaatgtatttgattagacgaatcgttaaagagaattgtggatataattaaaccttggacctattattcaatcatcggccgccgttttcagaaatttaaggcggtataataagtgtaacaccgtactcaataaaagaaccataatttcttaacaccttttcactttcaaagcgatttgccgaactcattagttttggctcattggttttggcaagcaaattaacttaaaaaaaacttgacacttttatcactaacagataagacgaatagaagtaaccccattttgtttcaagaatatacaatttttcgttgaaaaaactaaactccaaccacaataatacgtttttatggtggcgaataaagctgtggtatcccattcctattgatagggcattggtgtgaaaaaaaactagttctaaattgccgaattaaatgttacttaaacatttttgatttaactgaaaaattctgttatatgcattgtatttttttttgcaggaatgttaatgctttccatttaatgcccgttatcaaaatgtcctcagaccgagggcgttcattttgaatcgcctttgtttagcgggttttgtcagtggccggtctactgaaaaggttattaaacccaccgatcgcttgcttcacctgacctacacacaattgcaaagaaatcgaaacttcctgttgcaatgatcgagcatgagtacaaatgtaaatcaggctcgatatatttttaacaatatcggcatgtatcgttacttgcagcgcgtcatgcattttaaaattgattatgattcatttactaattgcaccgttaggccgagcccaacacgcaatttgatggaagcaataagtgggtaaaggcttatataatccaaaggaaacgggtattgttcggctaatttattatttaggcaatgaaatcgttatcagttcttggttccctacactactacacttatttaagttcgactgcacactcattgttataaatcgccccaaattgaaacaatgaaaacttggtgcagaatgatttttcactttcgcataccataacacctaccgccaaccagttctaaatgttgaaatatcttagcaaacatgatcactcttatctcatctcacgatgacgcacatatttcattgccgctctacgagaaccaagtaatctatgcaaatgaaaatatctttatcttcagatctaaaaattacccatgctggccatcagctgtgagatgctgcggcgatgacgtcggacctgcaaatgtggcaagttggcgttcgatgacgcctgccggggcagttgcagttgctgggcctcatggttcttgctggttttggtatccaagcacgtggccatcattgttgtgtgcgctttacgcgggctatttaatgggctctattttatttttggcaatcggtttttggctttatagataggaagcttttgttgtcggctccagttttttgcatttctcagtcgcatcgacagttcgcctacgtgaaaaatgtccgttctgcggcctgcggaggctgtttaaaccacaaattataaataccgcgtttgtgtataatggacttattgccgtggaggtaagtagaggaaggaaggatactttgcgccacgaaaataatcatttaaattaattttgccttccaagtttcattcagtcacagcgtgtatacttttctttttttatatcccttgcattgaaaaataattaattaaatttttatcatggcatatcgttatctttgcgtgaacacaaaaccaagttttgcaaatataactgaatgtttcgcgtgctctttatattcgttggtatttggcttttggcgcttccagctcattaaaggtttgcacaatggccaactaacacacgcacaaattttttgtttttctgctttcgcatattttacttttttcactcggctacatggcttcgcgagatggtgctttataacttgtatctttgcatctcacagatgcttatcaagttatcaagttggagtgcgtctgaaagattgtcacgtttgcatgcgatatgcagcactttgtttacttttcgagccaccgactaacggaagttgcagaaccgaaaaaagcgcgacgtcgcattgaattcgtcaaagagagtaatgccacgctatgtgaaaaaaaccaaactgaagacacctcacactcacactttgagcccccggcaaaaagctcgccttaccgccacgatctgcgatccacgagaaacgttgcgacaacttggccgtcactccggttaataatattaactaaacctcgcgacgcagccaaaagcttaggtcgccgagctcaaaacggttaacgggtaacggttacggcgagagcgtcaatgccgcaagttggtaatggagagggagttttccagagcacagctgcgaacttcaaaacagctggcaaagcttttcataatctccaagatattgaaatgcgatagcccgaaaacccttcgactgttctaaggtattatgcaaataaaaacataatgggcttctacggcaaggtcagccacaatccataagaacaagttctctgccgaggcattggcacaaactctacaagctttccaaagctttctgcgcggttcacacaccttttaaaaatcgctgatcgagtacaggcctattgtcggacccgcaacaatggtcgaggagtcgatgagtcacaacggcactttgggtgtgcatgtagctctgcttagtatctattgcggctatcttatcggcaacactagacttgggcacaatcgctgtaatcagaactcattatttgtacgaccccaatgaagtgcgcaggataaataaccgaattacaattagcattcgattagattgtcccacgcggggcaactgaatttcaataacttaaattattgacccctagttcggaactaagtaaaaataaaatcaaaagtatgttttagagactatgtccaagttagtgactcggtaaaaacatttgacgatcgcatcatgccaaataccataccaaactttagtgacgaaaaattattttcggacatttaataaaaatcccctttcatcccaaaaaaaacatgagcctatcgaacaataactttattctaaatattttcaaattatagttagctgttgagaaatgagactaagctttcgaagggatagtgctccggtagcggtttggataaggtagttgactcgttcgatattatttaaacaattcagaaattagtacattgttatcttccataaatctaatctaagaaatatactgtcctaatataagttttccttctgtcactcaaagaaatttttaagtaattaagttttggtgctgacttctatttggtcattgaatttcgtattgggtctgctaactttgaagtagtgatagcttttattactagtgtagtgaattctttgtaaacttgttatttagtatataatataatatattataatagttgcccaagacgaaaaaagaacctgtttgtcacttccaaaatataacagatagaaagttgccaagcccccctaatgcctatagccgcctaaaacttgcacatccttgcacttttaaaaaatgttttcaaatttttttttatatttttattacacttgtaaatttttatcgatttaccaaaaaactttttgccacgcccatactttcaaatttgtttaaatattttctcaatcaattcaccatttccactaactgagtaacgggtatctgactgtcagaacataagtcgaatatagcatttttgttgtacccgttactcgtagagtaaaagggtatactagattcgttaaaaagtatgtaacagacaaaacgttttcgaccatataaagtatattatttatttattattataaagtatatatattcttgatcagaaccaatagccgagttgatctggccatgtcagtctgtccgtatgaacaccaccatctcaggaaccattatagctagagagttgagattagataaaacgattctagaggcacgcccacaaccgcccaaaactgacacaccttttgaaaatgttttaatatttttttttttgatcgttgtgggaaaccacattctaattctttaggtctatgcgttgcctattagattttactaatatcactattagcttggtcacacttgtgaaatatacataaatagtgataagataagaaatgtgcttctataatccgctcctgtcattaaagacagagtattggtttagaggttcatattccaagaaattaaaatcagggccaaaaatggtttgcagtgtgtcgacgttacattgggtgtggctacgtttggaaataagcatacgtgtggaaagtctttaggatctgtatgctgaatcctttataggtacagagatcccgaagttcaaatggatatacgaacggacataatcgactcaattaataatcttgatcaagaatttatatactttccttggtcgaaaagactttgttttacatgttggatacttttaaaagaatctagtataccctttaactgatctagggatgtgggactaaacaagaataagtagcaacatatgttcatacgtatccataatatcacctgacaacatccttatctaaaagcatatttaatctaaaattgattagcaactggtacctaatgattattaaaatccgaagcttcgttggagaacattttccagcacatggttctgggtgacttctaaagtaaaaacttattttagtgtccttgtgtctgatgatttggggaaaaattttaacttgccttttgccatatattgaaattttaaactgcctgaacccacaatttgtttaaatgatattgtaataatatatgttaaaccatttttggacacaaaattcacaagtttttaccacgtttcacacattttatttgtgcaacttttatccatcttcttttttccaaagcaggccaactattttataaatattggtataaaataaatcaatcaatggtataaaatttatcaatttaaataaagttaaaaatacgcactttaatgtgtttttatgaatttaaagcactcacatgcttgcggctactgctgaaataggtttagctcttaatctgatgccagaagttgtggcttaacttctccgtcgtggactccaaactggcactgaaagctggagacctcagcagtgggttaagtgtatatatgtacatttatacatatgtattacttcatttaaatgctttcgtatggcagacttaacactttgataattggtgaaataagatcaaatcaattgaggcgccacatgaacacgtttcgtgagcacacaagaaacaatttaaaaatattaaaatgttggtcaatggcacacacacttctatcgcggcatttttattattggtgtcgagcaagaccccttctgggcaaatctttgctcaaatctttgcttgtcacggtttttgtttgccgagagagctccgaccagcgtcgctataagtcaaattcgaaactgatcaaaacgccaagcgaacgtggaaatgagaacgatcagcagagatttctcgctggaagcgcgatgtatagggagagagcggagagtgaaagttcattgagcttagcactcgttctttctttcctcagatcaggctaaactgcatttgatttatttttcaattaacaattacttcgaacctttcacttaaatttaaattttacttcaaaattcaaaagtttctgttcgcgttcatcttactccacgcctagcaaaacgcacttgactgaccaaactgactgacattttgagcaggagcttttgcctggaaagcttaaacgagacagtccaaacacatacacatacatgcagatacgtacgcttcgatcaaacagctgatccgagaactttaatgcgacgctgtcaactaagccgatgaaactcaaaaatttatcagtacaattgggtcatcgcaataacaagactttaaggaaatcggaaataaagctaacgagggtgcattttattacgacggccaatttatctaatatattggcaaggatctatgctgaaatagtaaatgtggtttttatacccttgttcgtagggtatactagactcgtgaaaaagtatttaacagggacacaccagtcgatctggccatgtctgtccttctgtaagtatcaaccgcacggtctcgccaactgcaatcagtcacaaaactagtcgttgcaacttgcaaggtactctacaaataagtagtttttgtttttaatgagtaacaaaattttaattcgatttttttctttagcgtaacgcacttatttaattttaagccaagagagaatgctatagtcgagtgcctcgactatcagatacccgttactcagctagtagtggtcgagtgggaccaaatttcataatttttctggcttatcgatatatattggggaataaaatcagaaaaaaaattataaaatatacaggtgtgggcctgggagttttgggcggctcgtgggtgttagagtgggcatagggataaaaatttacaattataataaaaaaaacgaaaaaaaatatcaatacatttttcaaaagtgtggacaacttttagctttcataccgacagacgggcatgggcagatcaactggactattgaacttgatcaagaatatatgtacatacatacattatatggtcggaaacgcttcctactacctgtctgttacacacttatcaacgaaactagtatgtatacccttttataaaaa

SEQ ID NO: 26597 - DNA, 4434 bp, DROSOPHILA
ctaggcgtggagtaagatgaacgcgaacagaaacttttgaattttgaagtaaaatttaaatttaagtgaaagctttcagtgccagtttggagtccacgacggagaagttaagccacaacttctggcatcagattaagagctaaacctatttcagcagtagccgcaagcatgtgagtgctttaaattcataaaaacacattaaattgaacaccccactgacgatgtttaccggccggcgcactatggcggctacgttaacagaggctacgatgatttagacagttcctactactttgcccagtacgaggcgatggcagatgccggcaccgttggaggcgccttgccgccctacgcacttaccaactcggacgaagaacatggcagcggggaagaggacgcgtcggaggagaactccaacaatgaagagggagagggagtgttccgggactgcacagacgaagcggttgtcgagcatcataaccgctgcctgccagaatttcagttctctctagtcgattctgagtacgatgagaccctcgcttttcctgattctgtgaccattctatccaacgtgggcgacaagccggtgctggtggagcgcaaggagacggacgatgatgaggaggagttcgacgacgaggaaaacaacagtgtagtcctgagacacgaaataccatttactagcatatacgggccgagcgtcaagttcaactcgttccagcgcaaggttttcatcccgggccgtgagattcatgttcggatcgtcgatacggagcgtagcgtcactacacatctgctaaaccccaatctgtacacaatcgagctgacccacggtcccttcaagtggacgatcaagcggcgatacaagcactttaactcgttgcaccagcagctcagctttttccgcacctcgctcaacattccttttcccagtcgcagtcacaaggagaagcgtaccactttgaaagccacagccagagagatggctgacgagtccactctaaaggaccttccttctcacaccaaggtcaaacaaactagcactccgctgagggctgaaggcagaagcagtaaaatcgcgggcagtaacgccaacaatgccatggctatgatcagtcccaatcacagctccattctggcgggtctaacaccacgacgcattcaaaagaagcgcaaaaaaaagaagaaacggaagctgccgcgattcccaaaccgtcctgagagtctggtcaccgtagagaatctgagcgtcagaataaaacagctggaggactacttgtacaacctgctgaacatcagcttgtaccgatctcaccatgaaacgctaaacttcgttgaagtgtctaatgtgtcctttgttccgggaatgggaattaagggcaaggaaggcgtgattttaaagcgaactggatcaacgagaccagggcaagcaggatgcaatttttttgggtgctttcaaaagaactgctgtgtgcgctgcaactacttttgctccgacgtagtttgcggcacgtggcggaaccgatggtttttcgtaaaagagacctgcttcggctacatccgtccaacagacggaagcatccgggcagtgatcctctttgatcagggcttcgacgtttccacgggtatctatcagacgggcatgcgcaagggcttgcaggtactgacgaacaaccgtcacattgtgctcaagtgctggacacggcgtaagtgtaaagagtggatgcaatacctcaagaacacggccaactcgtatgcgcgcgacttcaccctgcccaatccgcacatgtccttcgctccgatgcgcgccaacactcatgccacgtgtcccgagatatacatgaagcgacccgcactcgacggagactactggcgattggacaagatcctgttgcgcaaggccgaacagggagtgcgcgtctttgtgctgctctacaaggaggttgaaatggcacttggcataaacagctactacagcaagtccacgctggccaagcatgaaaacatcaaggtcatgcgtcatccggaccatgctagaggaggtattctgctttgggcacatcacgaaaagatcgtcgtaatcgaccaaacctatgcgtttatgggaggtattgatttgtgctatggacgttgggatgatcaccaccatcggctaacggatctgggtagcatatctacgtcatctttttctggcagcacgcgtcgaacgccaagtttgtacttcaccaaagacgacacggactcagctttcggatcacgtaagtcctcgcgaaacgctcactacgatacctccgccaaggaaaggccaccgtccccacccccggatgagcccaatactagcatagagttgaaaactcttaagcctggtgatcgactgcttataccgtctacgctcgtttcgagtccgggtgaaactcccgcagaatcgggaatcgctttagaagggatgaaactcaacacccctgaaatggagcgtaagaacgtactcgatcgcctgaagaacaacgcgatgaagggcgcccgtatgggcaaggactttatgcaccgtctaacagctactgagacggaggaaaaatctgcggaggtgtacactatcgagtccgaggaagctacggaccacgaagtcaaccttaacatggcttcaggtgggcaggaagtggcgattaccactagcagtacacaaatactcagtgagttctgcggccaggccaagtactggttcggcaaggattactccaactttatacttaaagactggatgaacctaaactcgccgttcgtggatatcatagatcgaacaacaacaccgcggatgccatggcacgacgtgggtctgtgtgtggtgggtacttccgctagggatgtggcccgccacttcattcagcgctggaatgccatgaagctggagaaactacgcgataacacgagattcccctatttgatgccaaaaagctatcaccaagtgaggctcaatccgaacattcagcaaaaccgtcagcaacgggtcacgtgccagctacttcgaagcgtctctgcctggagctgcggctttatagaggcggatcttgtggagcaaagcatccacgatgcctacatccagacgatcaccaaggcgcagcactacgtgtacatcgaaaaccaattttttatcactatgcagttaggcatgggtgtgccaggtgcttataacaatgtgcggaatcaaatcggggaaacactctttaaacggatcgttagagcgcacaagtatgaaaccaaaatacttatcctgattctagcagatctaatgttcagctcttctagggaacggaagcctttccgagtttatgtgattatgccgctcctaccgggctttgagggtgatgtcggtggcagtactgggatagcagtcagagcaattacacactggaactatgcgtccatttccaggggacgcacatcaattttgacccgcctgcaggaggcgggtattgccaatccggaaaactatatctcattccacagcctgcgcaaccattcttttttgaataacacacccataacagagttgatatatgtccactcaaagctcttgatagccgacgatcgcgttgtaatctgcggttcggcaaacattaacgatcgctctatgatcggaaagcgggactccgagatagcggctattctaatggacgaggagttcgaggacggacgcatgaatggcaagaagtatccgagcggagtgtttgccggtcgccttcgaaaatacctttttaaagaacacttaggcctcctggaaagcgaaggttccagtcggtctgacctggacattaacgatcctgtttgtgagaagttttggcacggcacctggcgtaggatttcaatgcagaacacagagatttacgacgaggtgtttaagtgcatccccactgactttgtaaaaacctttgccagccttcgcaaataccaggaggagccgcctcttgccaaaaccgcccctgatctagctgccaacagagccaacgacattcagggttacttggtcgacctgccattggaatttctgaacaaggaggttctcacgccgcctggaactagtaaggagggcctaatccctacctctgtatggacatagtctgtcaaaagtgtctaagattttagaaagcttaaaaaccacttaccatttaccacccaccaaaagcactatctttaacgatgccaatgtcaagtcaaacattttgtaaatagtgtataatagccgtagataactctagatactttcaagtacatgtagctattccttaccaatagttaatttattttacaatgtttgtctatgtcctcaagtagttttaagatttttgttattattttgtatgatgttaaacagtattttagaccgatttacacaagtttattaaagtgatatgaagtgcaaatgaagaactgcaacat

SEQ ID NO: 26598 - protein, 1267 aa, DROSOPHILA; identical to SEQ ID NO: 26595

SEQ ID NO: 26599 - DNA, 6323 bp, DROSOPHILA
tctatgcagagaatctaagtgcatctttagtatcttcttttagttttccttataacagtgaattcaagagaccatccaatattcactactatataatgtacattattttggctgctgcattggtttatttattcggctttctgtggcgctcgagatgccaaaggcgtggaaaaaagaggggctgcaccgcgggaaagggcgtggccaggggggctggaagcggtccaaaccaaatcaaagcgctttgttttcgatcggtttttctgttcaatttgcggtgcatgtttgttttgctgaatgccaaagagtttgttttgtcatttgcatggacgaccgaaaaacttgtttgttttgtttgcgcagttttcctcgctttgtttgcgcgaaaaaaatgagggttccccgcattccccgctcgaacactttgcaatttgtcgtttgggaaaagttgaaatattatacttaattaatacaaattatttcgcagcatactttgcggtcggcggcggaattccaagctgctgtcttcgagcttagcaaatttatgcttggcatttaatttttgcttttgtcaacgtcgcagtttttgctttttgtcttttttttaaccaaccaacctaccaaccaccttcgacacttgagcagcagcagcaacatcattaaaataaacaacagttggccgtaactggtttttgtgctacgttttttcgagttaacgtgtctctttgcggttggcagctcttttgtggtgcgctctcttagctgaaagtctctttgcagataatcatgatcatcttcattagcagcgtttatctgggattcccgccttttggggggcccagcccctttgttttagtttatcaacaaagttgccagagaggcgagagacacaaaaaccaggcaaaacaaaaatcacgacgctctcaacattttggtacctttgccagcgtttttgtttacctttcgggccaagtcagtacgctttgatttcttgaccatttacgttattgaaatattttcgtcgtcgcggcaaaacggcgaggagtaatcggtaatcatttttcttggctcactgtggtgcgtgtgctacggttacagttacagttcttgcggctttctttattgcttcttttagccagttggtgtgcaattgcattcgtcatgtttttctgccacatggccaagaagttttcttcgttttcctcggatcggtttgggaaaggggaacaactgtttgggcgcgcgcttttctaattatggtttatgtgtcagtcaggtgtaaattaatgattataatttgctgcgtgtctcggattcaaagtcatcattaagtcgcgttcgttgcttaagtctttcgatttgccagtggtgaagtgtgcgtgctaatgcgtgtgtatatactgccgttggctacgaacccgtaaaaataaaaagcaaaaaccgcacagccgtcatcataatgacaatcacccaacgctcaattactcaatgctagaaaatatcaaattcgcgctgctcttattttttatggcaaattttatttcgctccgtttttgtcattaaaagcagtgaaagtcgttgggtcgagcgcttttcttttcggtcacctttatttagaaattcgagcatgacaaagccaattctttggtcggttacgattatgcctcttaggattttgggtacattggcttgtccgtgggaatcaaaagattgatgggctgtatcaaaatttgggcacacttgaggttgaattttgtaaaaaaaaaaaacgctaataaacatggagaatctgatgtgtagatatgacatcagcagaacaagtgagattataattagagatgattgctttagtcaatcttgacttcgacaaggaaccgtttgaaatttttattaatgggtaaaatggcgatcgtgctataaataacaaaaatacatgcataggtatacgattataaatcttaattttttaagaacagaaaacggaacatgcattgtatcattcagcatgagttggttactcctgttaacaacacttttgtttataagttgctgaaataacctttttatttaagcaaatatgcatcaaatcacccagtagttatcagtttcattttgttgaagttcgtttattttttgaagggcatttccagttcgttgcctgatctttagattgctctttccggttggctattgccatttctttgggtctgacctttacacattttaagttgttactcaatagttttcgttgcctttcggttttgcttcggcttggtttggtttgatttggcttttgtcatcacaaccatttattggcgtttatttatgtccgtcaattgtttgcagcttgctgtttgctatattagcccgctttgatcctctcctacgcctctgattcggcttcaaacttgagttcggctttcgtttgtttttctatttccacattagttttattgacatttggcaacaagttgccagaaaccagtttcaagttgtttctgcgctcagctgttctgaagcgggatggttagtcatggaccacctcatccgaacgcgaatactgtgtaccgaatggcagtggatattggctaaaagatacgaaacgaatgatattgattataatttacaaacaaaatatcactaaatttagttaacttaaatctgtacattttaatcgatttctactgttggtaaacaaagttgaatgtttgcatgtcagtttgttggtgctaattgtgtccaatgtaactaatctttgacgctgtttgccaattttccagttgcaccgatcaacgagccaccgagtgccacacagattacgcagaatcagaggaaggtcagcaacaccgccagcaccaccagccacatgaccacaacgaactcaagcaattccagcaccacctcggtgaccacgcagcagcagaaggagcagatcggaggcagttcctccaccacatcgaaggtgtacatcaagaagaccgggagcagtagcaatagcactaccagcagcaccaccacagcttcctcttcggcgggtcgcaaggagagctttggttcccgtgactccctgaacgatatccttagtgaaacgggtctgcccaccggcaatgtggctgcccaaaggaaatccctggagaacaagaacctggacctgactaagccacctggagtgggagcatcagtgtccattggacagcagcggagcagcacctctagtgccaccacctcctcagccactacagtagccactggactaacctcatcatcagtgagcaagtccatggagaacatgctggacgagaaggtcaagtcgccaccaccgccggtgctcagcaagaagcccagtgtgccgctcaagaaaactcccaccggcggagttcctatgactggtgagtactgtacacagtagtgccacaaatccttaaaacaatgctaatatattatctcacaatcgcaggtaaccttttgggcggcaagaaaaagaataccgagggaaagctcaccactgccgtgtcccatgatttggcggatggtcttgcggccagcaagatgctttcaggtgctaatcaactacctgaatctggagcagctggcaatgtggtgatccggagagctgccacgattgcagtggaggatacagatttcgatcgcgtggagagggcttccatactcacggatatgcggcaaggaagggtcaaggcgccaaagagacgtccaccatcggcggctatcaatgtgctgggcgaaagtaataacaattccgtatatgtaaatggcagtggaatgtccggatctggtggagcaggaagtgccagtgagttgagtgaagatggcggtgctggagggaagacttctgatgacaattccaccggcgaggaaccacagttggccaaacccaagccacgtgagtgggagaagaagaaggcgccttggatggaggagctgaaggcctcgcaggtcaccaggaaaaagacctcacccagtgtggagccacgaggagcttcggtggccgaaaggacatccaaactctttgcggccgagcaagctgtcagcagcaatagcagcagtatcacaacgaaagtccaatcttcagcggtgacctcctccatgtttgtggagaactcaacgaccagcagctcggtgatcaccagtagctcccacaccaccaccaacgatgccatcatgtcgcgcagcttgtcggctgccaaagtccaaaccgccagcagcgacgaggagacgagagccacaaggccaaacagtctagctatacgaaatcaacgaagtgtttcgcctctggtaaagagctccaatgccagcagctcgcagtcccaggaggagaagcccaccagccagctgaacaaccaccaggatgccagttcctcaagggtggcccaattggagcaacgggtggataagctggaggggctggtgctaaaccaacagcgaaccattgaggagctggtaaatgccctgaaatcggaagctgaacgcgtcaagattttgaggagcgaactggacaaatacgcgcagtgcgtgacgcaagtttgagcctagttgaatcgccttttagctagcttttgaatacttgatttttagcgtctgctgaactctacaatatacccaggcctaaaagcgtagaacgtagtagagtagagaccgaacccaagacaatcccaaatatctgtactctgtgttctgtacttatataccagaatgatctatccaaaaccactagcgatcaatcgtttttgcatgccaaaaccgtttcgtttttcgctacaatactttgtattcccctgtatatctgataatttcgataagtattttttatacactcgtacattccgaagagcaaaagggtgtgatttcttttagctgctttcgattgcgatttgttttgtttattcgatttatgattattttttaaagatgtattaaagttatgagtaaactgtactataaactatatacctaacgagagagaaacatacaaagttcgatggagtcgatgatgatgcctaaaacttaagcaataccaataaataatgcaaataaatacttcaatgttttctgaatgtttttcattttcttatttcgatgtgattctgcttttatttttttctaaatgactgatatagatagttagcgatgtagagaatccacatatctaagcccggataataaactaacctttttgataaaatttctttttcataacagcaagcaaactcgtcgcgggaaattcgacaattggatgttttaattgatcagcggatcagatcagccgttagatcgaacgatccagatatattagatatttataacccagacccgcctgtacagaatattcctttttcttttgtgataagcctccgcataaccagctttgtagtctaatcaaatcaatctgcgtagctagccacccgcaattcccgattgttagcaaatatgttgtggtttacttggaaatatcgcattttgtatggcttaacatgtaaatattattgtaaattaatatgggatattaaataaacatttcatatttagtaaaacaaatgccaaatctagttcaactatcagtggctgatgggggggacttgtattctatttatttttgttatcaatttccatctaaacgtttctacatgctgacaatatcacgctttaaagttcacgcttagaccttgcaccttggcctgctatacaaaatttttttattcaaaatagcttaacatctattacttttgttatggttaaaataaatattggggaccaaatcaattttgccttggttcatgtctttgctaatatatcatagacacattttacattttactttttatgtaaaataataagcttcgatcatgttgaagtaatttaaattgttaataagtaattaattaaatcaggaaaataaaaatatgcgtgaatattattttttttccatatttccatattttattcttaagaatatagatagaatctagatataattaaactgtataaaattctggacttagaaatcagctttggtcaagtgtccacgcgacatgacttcaagccatcatcaaatgtgcgaatcttggcgagcacaaactgatcgagagagtctgactttggggagcgatttgtttgctggcggatttatgtttgtacttgcgctttttgcttcgcctttcgtgttttcggtttttgccttggcacttggctgtgttctgttgtgaatgtggcttaaacctggtgtttgagccaagtcgtacgcgaccgctctcggagcttttcagcctggcttcttgggcgacttatcagtttctgatcgctgt

SEQ ID NO: 26600 - DNA, 1861 bp, DROSOPHILA
tacgttattgaaatattttcgtcgtcgcggcaaaacggcgaggagtaatcggtaatcatttttcttggctcactgtgttgcaccgatcaacgagccaccgagtgccacacagattacgcagaatcagaggaaggtcagcaacaccgccagcaccaccagccacatgaccacaacgaactcaagcaattccagcaccacctcggtgaccacgcagcagcagaaggagcagatcggaggcagttcctccaccacatcgaaggtgtacatcaagaagaccgggagcagtagcaatagcactaccagcagcaccaccacagcttcctcttcggcgggtcgcaaggagagctttggttcccgtgactccctgaacgatatccttagtgaaacgggtctgcccaccggcaatgtggctgcccaaaggaaatccctggagaacaagaacctggacctgactaagccacctggagtgggagcatcagtgtccattggacagcagcggagcagcacctctagtgccaccacctcctcagccactacagtagccactggactaacctcatcatcagtgagcaagtccatggagaacatgctggacgagaaggtcaagtcgccaccaccgccggtgctcagcaagaagcccagtgtgccgctcaagaaaactcccaccggcggagttcctatgactggtaaccttttgggcggcaagaaaaagaataccgagggaaagctcaccactgccgtgtcccatgatttggcggatggtcttgcggccagcaagatgctttcaggtgctaatcaactacctgaatctggagcagctggcaatgtggtgatccggagagctgccacgattgcagtggaggatacagatttcgatcgcgtggagagggcttccatactcacggatatgcggcaaggaagggtcaaggcgccaaagagacgtccaccatcggcggctatcaatgtgctgggcgaaagtaataacaattccgtatatgtaaatggcagtggaatgtccggatctggtggagcaggaagtgccagtgagttgagtgaagatggcggtgctggagggaagacttctgatgacaattccaccggcgaggaaccacagttggccaaacccaagccacgtgagtgggagaagaagaaggcgccttggatggaggagctgaaggcctcgcaggtcaccaggaaaaagacctcacccagtgtggagccacgaggagcttcggtggccgaaaggacatccaaactctttgcggccgagcaagctgtcagcagcaatagcagcagtatcacaacgaaagtccaatcttcagcggtgacctcctccatgtttgtggagaactcaacgaccagcagctcggtgatcaccagtagctcccacaccaccaccaacgatgccatcatgtcgcgcagcttgtcggctgccaaagtccaaaccgccagcagcgacgaggagacgagagccacaaggccaaacagtctagctatacgaaatcaacgaagtgtttcgcctctggtaaagagctccaatgccagcagctcgcagtcccaggaggagaagcccaccagccagctgaacaaccaccaggatgccagttcctcaagggtggcccaattggagcaacgggtggataagctggaggggctggtgctaaaccaacagcgaaccattgaggagctggtaaatgccctgaaatcggaagctgaacgcgtcaagattttgaggagcgaactggacaaatacgcgcacaagcaaactcgtcgcgggaaattcgacaattggatgttttaattgatcagcggatcagatcagccgttagatcgaacgatccagatatattagatatttata

SEQ ID NO: 26601 - protein, 545 aa, DROSOPHILA
MTTTNSSNSSTTSVTTQQQKEQIGGSSSTTSKVYIKKTGSSSNSTTSSTTTASSSAGRKESFGSRDSLNDILSETGLPTGNVAAQRKSLENKNLDLTKPPGVGASVSIGQQRSSTSSATTSSATTVATGLTSSSVSKSMENMLDEKVKSPPPPVLSKKPSVPLKKTPTGGVPMTGNLLGGKKKNTEGKLTTAVSHDLADGLAASKMLSGANQLPESGAAGNVVIRRAATIAVEDTDFDRVERASILTDMRQGRVKAPKRRPPSAAINVLGESNNNSVYVNGSGMSGSGGAGSASELSEDGGAGGKTSDDNSTGEEPQLAKPKPREWEKKKAPWMEELKASQVTRKKTSPSVEPRGASVAERTSKLFAAEQAVSSNSSSITTKVQSSAVTSSMFVENSTTSSSVITSSSHTTTNDAIMSRSLSAAKVQTASSDEETRATRPNSLAIRNQRSVSPLVKSSNASSSQSQEEKPTSQLNNHQDASSSRVAQLEQRVDKLEGLVLNQQRTIEELVNALKSEAERVKILRSELDKYAHKQTRRGKFDNWMF

SEQ ID NO: 26602 - DNA, 12039 bp, DROSOPHILA
gcataatagatccatatcagggttgtttcgtttccatttttcatccgtgggcattgtggaaacaaagaagtatatcctattataatatattatgaaaataaaggatttaattgcaaggacatgtaaaaggaatcttagcgattagacatcattaagaaggttactttattttcagtaggctattttcattcgattattcatcagtcataatcaaaattttaagtttcaaattatcttatggccgccttttataaattacagctcttctaaattatctttatggtacgaaaagtcaagtaagtctataaaatttggtggagttttcaggctttcgagacctgtgccattttggggctcggtgcacagctgttgctctctccgcccgccttcccctctctcctcctccaaggaaccaatgtcaaaagaaagttctccggtgcgaccggcaaaaacagctttgcgctaggccaaagttcgttgatgttccagtctctttactgggtgacattggggtatatcagatccgtgctaagtgggtaacagctagatgaaagccttagtgatttccatacgaatttcatagtgtcattttaaacttagcctttcaatgtgttggattagaagtgaggcaaataaagatgcaattctgagattataatatataattaatatataaatatactttgtataactcaactatcctatggagatattaattgggtatagttagattttacgatttattacatgaaatgcccacaattcgttagccagatttgatatgttagctttggtagctaagaggtatcatagattcgatccgcccatttctatcgagaacaaatcattgccggcagggagcacgcgcagacatcgaaactgcgagaggagcctcacagattgggagagaacgttaatgttcccattgaaaccaccacgaccactctcccacggaactagtcgaaagtttcgagtttgtgcgctcgaccagtccgacggacagctttgaagtgaacggttcgcgagttcctgggcagaagagagaatcagagtgcagcagagcaaccgtttgcgaattcgcgctgttctacctacatagaccaaaaccaaaccaattccaagcaaaccaaaccaaacgcaaccccgagaccaaacgcaaaaaaaagaggccggcaagttgacaaaacctcgcgcacataggatacataggaaccgtgaatttgtatgtgctgagcgcggtacataagctaaagaaaccacgttgactcacgacccgtttgaaattgttttgtagtgctggagcagcgattacccactttgcgccaggacaacgacaataggcgcagagcgctccttcggaactttcgccatcaataagtaagtcgccggtcggtcggcggactgcgtctatcgatcaagtgcatagccatttaattgcataatttgtgctcaatttcttcttccactcggttcggctggtttctttccccagccctttctcgccgtccaaccattgtaatttgccatcgtcactctctggcagacatgtgttaattacattttattctattctattccataccatgccataccatgccataccgcaccataccatgtcgtagcgtagcatacccccatgcccccaaacacacacccgtgcgatagacaccatcccagagagggaaatgtggctgttttattttcggactcatcctacttgctgcccaatatttatgaccttcttatggtttcgccattggggaaacgtgtttgtcgcacatagatccataatctatacgtagtgtgcgcgattactcggaaattatctacatatcgtgtgcagtgtgatcagggattgcgaacgggggtgatccgaaatttaaccagtttatgggcacagtttgatttgtttgattgctattgattcgccgggaccgacaggccgtcacatatacttgtatggagagctggacccggactagtcaatgtcaaagcttcgtctctatcagcttttcgtttggcgtgataaggtctagagtctagacaggctgctcaagtaaatataaggttttcgaacgaatgtaagatctctgtaacttttgctggcaaagagagagttttgttaaaaaatagaagatcctgggcgacacgagttaatggccatagacttaattttctagcgaaaatataatataaaaaatagaagatcctgggcgttccatctccttatcaatcattgctatttatagtttttctttttagttcagaatgcggattatataacttcacatctggaactgaaatactgaatgcagtttaagaaaacaactagtaatcggaagtagaaaagtccatctattcttattctcacattttggcgacaaaatcaatgtacgacctacattcaaaagcgactttgaccttagcagcttgtcgttcaagatcatacgtttgtggagcaagaaaaataaataaaaataaaatcatagcacgcacattttcctgtgcaaaagttggtgaacaaaagcaaagcgttcaagtgactggggcattccagtactattagtgtgtagttagttggctatcatgttattattacataatcgcccattccgatgggcaaacacaatcgggcttcgggtgggttttggctgagttttggttgggttttcgtatgccgtgtcaacaacgttttcgtgtaattgcatgagattggccctgacagcgcccacttttctttcagaaaatatgaggcaacacacccagtcaacaagcaacaggataattgatagcctgcaaatattgccagaaatacagcacaaaaaaaggtgctgaagctatcccagaaatacctgaaataaaccctgatttgcatgcgaaaatacgtgttattttcacatcatgctaaccaattgtagacatgcattcttcactttattccgatgctaatgcgctttaatttttaaatacagcaggggagccagtgatccggtcttcaaatagtttaaattctaattgaaacgtaaatagatatagattctttatcgcagatcgatatttaaattatttattgaaaatccttttcattcttacgaaagcgataggagaaaagcttccgattataatttccgcttgcggctaagattagatttgccacgtttcacagataccagtttcaaaacttttattaacctaaaaataaagattatttctaaacaacagagtgctttctatcaactcacaacgacttcttactccccgtgtaacttttagagcaatgatgttataaagcttaaggaaacttatattctgatgttatcaggattgagtttcaaaacttcgagcagagtattttagggatgtggctatcttttatcattaatagcattcttaaggtctgcgtgtcgagtgcttcttccgctccataaggtgacattgggcttatctttccaataatactaccaatggggtttgagcaactttgttggatctagtaatttataacacaatcgtgaggtaatgcggtgcaaattaacagagttagcaaacaaaattgatgctaagagaggaatatttaattagagtggaccaaactaaagatttccatcacgtagcgactatttatagatcccaaacaggggggccatatagatgtgcactcccactgggaatgataatatttaccagagtccgacctctgatgtgttaataaagcgggcttatcgactggtcattatctgcacctgtgtcacacatcaaatacatatgtcaacatgggttctagattatctatgggctcctcggaccactgcgaccccctttcattggggcatgcacttcacgtgcggttgcgaggacccccacttaattgcaactactcatggtaaacactcccttttgctggccaaaaatagaggcgataggagaatggttatcaaaccgattatcgcggggtcaagattccaaaagatctcctttggatttcgttcacctgaccagttctcctctcttctgctttagtttccatcgcactttaagtaggtttctgtctggcatagaaagtggactttgccaactcgtttttgtgcaagcaaagacgagcccccacagaggtctacagactagaaagtactcactagttgagtccgatttgagtccggaatctgaattgcaaagccggtctctgacgcacccgtgcaccactaagcgtgtccgtatgtctctatatgtctgtctgtctgtttcatcgctgacgggggctacaaaacccatttgaatcgctgataatgagcaaaacaccctaaaagctaacagacataaaataaataaaatatgttatggcatgtgcggcataagcgaactgacaaccaacggacagtggatactcttcccttaaatttgttgctcaaaatatgtaatctttagtatgtactcattttttccgtcttaatatgactaagtatgtatgtactaatcaatataagctaacagctttaaacaataagaataagcttagaaaacttttacatatatctataaactacaagtgcacatatatactaatgaattgagatgtgtatatggataatgatctatctatgtctcttttattacctatccactgtttatccaaacggttagatccactgaaaatatccgatgaacttcaagtgcgaaaacgtgctgcagcagtagcaaatatttgttaatctattactaagctaatatacgtaatggttgtaaaataggcagtattaatacttcaattaggggaatttttcggagtttacaagcaaaacgcataagaaaacacaagctgaaaagctggcatttaattgtacaagtttgccgtgcatttttaaaacctgctttgaattttgatcacgtgagtcaactcatgttaatgagcagaccgattgttctgtttagtggaataacaccgaagtaccaagcggtggactttggtcagaagattataattgtacttaggccaacagatgcggtcggaattttagaaacccagattcccaagagggaaccactctttactttcaaacaaagtccagaataaaaaaatgtactctacctttttttatatggtattagcagtcgttgtaacccgtcgtgttcttaaatttccaattgcaataacttcaaaacgagaccttctagatccgcttgtttgtttgtttgttttttcgaaagtaatgtcgataaccttaaggcatttgtggcaatcgagctttcgaaattaacagataattaacgcgtttaatgcaatctctcaatcgtaaagcagagcgttcattatttcaaatattgccattgatgatttaaggtggttaagcggtggttggttgcgactgttatcaaatatttctatttcaaaatcaggttttagtgttacagttactggaattataacgtaatatgtttataaaccaaagcaccacatttccgaaaattaagcggtataaaagctaaaataatagctctgattataataaatctgttatgtatttttgcaatctttcagatacatttaagtcctaggcgggatcagcatgttcattccggccgcccagtccgcgtacaggacgctgcgcaagacccagccacgcgtccggctcaacgccatcttcaaaaatggctactccagcaaggtgagttacttagattagatcaatttaaacacgaaagaaaatgcacccaaactccacccacaggtggagtacaagcccatccggtcagtgctggtggctaaccgcggtgagatcgccatccgagtgttccgtgcctgcacagagttgggcatcaaatcggtggcggtctactcggagcaggataagatgcacatgcaccgacaaaaggccgacgagtcgtacatagtgggcaagggtctgcccccggtggaggcctacctcaacattccagagctaattagggtgtgcaaggagaacgatgtggatgccgtgcatcccggctacgggttcctttcagagcgcagtgacttcgcccaagcggtgattgatgctggactgcgcttcattggcccctcacccgaagtcgtccagaagatgggtgataaggtggcggctcgtgtggcggccattgaagcgggtgtgcccattgtgcccggcaccgacggtccagtgaccaccaaggaggaggcactggagttctgcaagaagcacggactgcccgttatcttcaaggccgcttacggaggcggaggtcgcggcatgcgcgtcgtccgcaaaatggaggatgtggaggagagcttccagcgagccagttccgaggccaaggccgcctttggcaatggtgcgatgttcattgagaagttcatcgagcgaccgcgtcacattgaggttcaactgctgggagacaaggccgggaatgtagtgcatctgtacgaacgtgactgctccgtgcagcgtcgccaccagaaggtggtggagatcgccccagcgccacgcctgcccatcgaaatccgggacaagatgacggaggcagcagtgcgcttggcccgccatgtgggctatgaaaacgccggaaccgtggagttcctttgcgacgagtccggcaacttctacttcatcgaagtgaacgcccgtctacaagtggagcacacggtcaccgaggagataacaggcatcgatttggtgcagtcgcaaatccgcgtggccgagggcatgaccctacccgaattgggctacacgcaggacaagatcgtgccgcgtggctatgccattcagtgccgtgtgaccaccgaagatccggccaacgattttcagcccaacaccggtcgcttggaggtcttccgatctggcgagggtatgggcattaggttggacagtgcgtccgcctacgccggagccatcatttcgccatactacgactccctgctggtcaaggtgatctcgcacgccagcgatctgcagagctccgcctccaagatgaaccgtgccctaagggaattccgcattcgcggcgtcaagaccaatatccccttcctcctaaacgtgctggagaaccagaagttcctccacggcgttctcgacacctacttcatcgacgagcacccgcaactgttcaagttcaagccctcgctcaatcgcgcccagaagctgctcaactatatgggtgaggtgctggtcaacggaccccagactcctctcgccaccactctgaagcctgccctcgtctcgccccacgttcccgaggttccgctgggtgagttctgcgcaccttatccactagaggatccccactttaatggcatgtgcttttcgggttcacgcttgcttatgtggctaccacttaagccaatcgcctctttccgaatgtttcagcggggtcctctctcgaagcattaaacatcccgactaagaaactatcttcaattgccaagttttaatttcgaggatttgctcaaatatcaaatgagattgtaacttatttaaacttaactatcattttctattcgtttttgctcaatggtaacaattttcgaaatatcattgcatgtattcaagttgtaatgtcaatccaggatttaaaagatttatgagtaatttaataatctctcatctaactcagtacattgcttcgtgttaggaccccagagatactaaatctattaaatggatatactactatcaaacttaatagatcctcaatgcacttcttttcaaaagtaatcaatgaaaaggcatgtttgttccacgcatctcctgtgaaatgttctttgcttttctgatatgctttaatcaaacctttatgtttttactctttcaactatcaatttttgttgcatctgttattaatcaaccaataccgaatcgaaaccgcgatcgcaatcgaatcggcatttgcaaaacaccaataccaatatcacacaccaatgtctgtaccgacaccaatcaacaacgattacaaatcgcacaacacaccaaacccacgaccacgaccacgaccacgcccactccgcctctaccacatgatcatacatagatctgtccccggaagctatagaacgcgaagaacgtggcgaggcaaaaggtacgttcacttctttatcccgaaatcacgcaggacatttgtacatacgagcatctatcatgtcggtttatgttgaagggtatctatcctaaggtactcctaacactttggaccaatcgttttgggattatcggaatatagagctaatatacatacaataaacatatgtgatgttgtggtgtttcaatttgattgcatatataatcattttgggtttaagctaatgttatttactatactgaaacaattgtatttttgcaattttttaattacgcagcttttggttttaccagcttttttgatgtttagcttttatgtattaaattggtattattgttgttgtattgaccttaaccgttgatgtcccaaatttaatgatataatcccgtaaaaatattgatatatttaaaccttataattgggaatatatcgactatacccaatcaaaaaactaacacgattttatggtatatacagttacggaaccaccgaagggactccgcgaggtcctggtgtgcgaaggtccggaggccttcgccaaggaggtgcgcaaccgtaaggaactgctactcatggacaccaccttccgcgatgcccaccagtcgctgctggccacccgcgtgcgttcccacgatctgctgaagatctccccctacgtgacgcacaagttcaacaacctgtattcgctggagaactggggcggagccaccttcgacgtggcgctgcgcttcctgcacgagtgcccgtgggagcgcctggaggagatgcgcaagcgcatcccgaacattcccttccagatgctgttgcgcggagccaacgccgtcggctacaccagctatccggacaacgtggtctacaagttctgtgagctggctgtgcagaccggcatggacatcttcagggtgttcgactcgctcaactacctgcccaacctgatcctcggcatggaagccgctggaaaggcgggcggcgtggtggaggctgccatctcctataccggagacgtcagcgatcccaagcgcaccaagtatgatctgaaatactacactaaccttgccgatgagctggtcaaggcgggcacccacgtgctctgcataaaggatatggctggtctgctcaagcccgaatccgccaggtgagtctgaaggggtttttaatttttttctgttgtgtactattttgtttccatcccctgaaaggcttctgatcacagccattcgtgacaagcaccccgacatcccaatccatatccacacccacgacacctctggagcgggagtggcctccatgctggcatgcgccaatgccggagccgatgtggtggacgtggccgtcgactccatgagcggcatgacttcccagccgagcatgggtgccgtagtggcctccctgcaaggcactccgctggacacgaacttggatctgcgcacggtgtcggagtactccgcctactgggagcagacccgcaccctgtacgctcccttcgagtgcaccacaacaatgcggtcgggcaacgccgatgtctacctcaacgagattcccggcggccagtacaccaacctgcagttccaggccttctcgctgggtctgggcgacttcttcgaggacgttaagaaggcctaccgtgaggccaacctgttgttgggtgacattatcaaggtgacgccctcgtcgaaggtggtaggtgatcttgcccagttcatggtgcagaatgacctgaccgccgatcaagtgctggagcgggccgaggagctgtcgttccccaagtcggtggtggagtacttgcagggctctattggcattccgcacggcggattccccgagccgctgcgttcgcgagtgctcaaggacatgccccgcatcgagggacgtccgggagccgaactgaaggacttggactttgacaagctgaagaaggaactgcaggagtctcacacctgcgtcaccaaccgtgatgtcatgtcagctgccctctacccgcaggtgacgaatgatttcctaaacttccgcgaaaagtacggacccgtcgacaagctggacactcgcatcttcctcacgggtcccaaggtgggcgaggagttcgacgtacctctggagcgcggtaagacgctgagcgtgaaagctctggctgtgtccgccgatctcaagcccaacggtatccgcgaggtattctttgagttgaatggccagctgcgcgcggtccacatcctggacaaggaagccgttaaggtaggttcagtcagcagtcatcggtgatctttaggcaatggaatcatttgcttgctcttcttccgcaggagatccatgtccatcccaaagcgaacaagtcgaacaagagcgaggtgggcgcccccatgcccggaactgtcatcgatatccgcgtgaaggttggcgacaaagtggagaagggtcagcctctggtcgtgctctcggccatgaagatggagatggtggtgcagtcgccattggcgggcgttgtcaagaagctggaaattgccaacggaacgaagctggagggcgaggacctcattatgattatcgaatagacagtgccaccggatcaaaatgtccattgtctaagctgccaccgcacacacccaatgtaaaattaagtgaaaacagtgataatcttagggactctgtcagttcgattgatcataaaactgtccaaagtcgcctgtgtctatttttatatgaatcaaaatcattcatgtttccgtgtttccaggatcaatcgaccatgagtaactggtcaaattttttagctgtccctgccaaaatatatcggattgcataagttcgtgcccaagtatatttgtaaatttgtcgtagggcttttcccgcaagtcatttgaatcaaatttgtacgattatggaatttttaattcgcaaacacctgtgtcgagattccccctctagtaaatacgtaagtggttattaatgttatattaactattgtgtaataaacgttatacaaaataaaaagtaacgccctggtttttgtagtgtgaaattggtgattaaacatctcgaaacaaatatgtaatgtatggttatctactttatttttttcctaaaattaattaaactgaattaagttaacaatcatgaatgaaacggctccgaagctaaagcctacatgcacttgacaatgaactctaggaaagccagatccttgttcagctcggtgacccgcttaaagtgtctctggacgtacggagtgagtacctcgaccatgttgccattgtagtagaacctcgccttgggatccagaagagcatctccgatcaagtacttgaggatcatgttgcccgcctgcgaatggcgcgagttggtggtccatgccttgacgtgctgcagcagcgcaacccgctggtcaacgttcaactggtcaaccaattgccggagaccgggctcatctcgcttgcggacaaagtggttgataatatcgaaactggctttgggcttgtccaggttcagagccaacacgaaggccttgtgaagctgcttctgggcgtgcagaagggaatgtagggtctgctcctgctccaatgcggcctgccgcttgtccagcgcttcgtttcgcgtcacctgagtgacatcaccgaagcgaatcagcttggagtccgcgccgccggtgtaaaagaaccgattgctcctggcggatacggccagcgcccaaaccctatcgttgtgctcgtccagggactgcagacatgtgttggtcttgatattccacagcttaagaaggccatccgaagcagcggagataatgaacttgccgtgatccaggaactcggctctcagtatggtgcactcctgatcgaaacgttttatgcacgaaaaattgctgatggaccagatgcggagagtacagtccgacgatgaggtgagcacgatctgatccaccggagagaagcgcacactccacacaccgcgggtgtgtccccgcaacactccttgcagcgtgttgga

SEQ ID NO: 26603 - DNA, 4308 bp, DROSOPHILA
cagctttgaagtgaacggttcgcgagttcctgggcagaagagagaatcagagtgcagcagagcaaccgtttgcgaattcgcgctgttctacctacatagaccaaaaccaaaccaattccaagcaaaccaaaccaaacgcaaccccgagaccaaacgcaaaaaaaagaggccggcaagttgacaaaacctcgcgcacataggatacataggaaccgtgaattttgctggagcagcgattacccactttgcgccaggacaacgacaataggcgcagagcgctccttcggaactttcgccatcaataaatacatttaagtcctaggcgggatcagcatgttcattccggccgcccagtccgcgtacaggacgctgcgcaagacccagccacgcgtccggctcaacgccatcttcaaaaatggctactccagcaaggtggagtacaagcccatccggtcagtgctggtggctaaccgcggtgagatcgccatccgagtgttccgtgcctgcacagagttgggcatcaaatcggtggcggtctactcggagcaggataagatgcacatgcaccgacaaaaggccgacgagtcgtacatagtgggcaagggtctgcccccggtggaggcctacctcaacattccagagctaattagggtgtgcaaggagaacgatgtggatgccgtgcatcccggctacgggttcctttcagagcgcagtgacttcgcccaagcggtgattgatgctggactgcgcttcattggcccctcacccgaagtcgtccagaagatgggtgataaggtggcggctcgtgtggcggccattgaagcgggtgtgcccattgtgcccggcaccgacggtccagtgaccaccaaggaggaggcactggagttctgcaagaagcacggactgcccgttatcttcaaggccgcttacggaggcggaggtcgcggcatgcgcgtcgtccgcaaaatggaggatgtggaggagagcttccagcgagccagttccgaggccaaggccgcctttggcaatggtgcgatgttcattgagaagttcatcgagcgaccgcgtcacattgaggttcaactgctgggagacaaggccgggaatgtagtgcatctgtacgaacgtgactgctccgtgcagcgtcgccaccagaaggtggtggagatcgccccagcgccacgcctgcccatcgaaatccgggacaagatgacggaggcagcagtgcgcttggcccgccatgtgggctatgaaaacgccggaaccgtggagttcctttgcgacgagtccggcaacttctacttcatcgaagtgaacgcccgtctacaagtggagcacacggtcaccgaggagataacaggcatcgatttggtgcagtcgcaaatccgcgtggccgagggcatgaccctacccgaattgggctacacgcaggacaagatcgtgccgcgtggctatgccattcagtgccgtgtgaccaccgaagatccggccaacgattttcagcccaacaccggtcgcttggaggtcttccgatctggcgagggtatgggcattaggttggacagtgcgtccgcctacgccggagccatcatttcgccatactacgactccctgctggtcaaggtgatctcgcacgccagcgatctgcagagctccgcctccaagatgaaccgtgccctaagggaattccgcattcgcggcgtcaagaccaatatccccttcctcctaaacgtgctggagaaccagaagttcctccacggcgttctcgacacctacttcatcgacgagcacccgcaactgttcaagttcaagccctcgctcaatcgcgcccagaagctgctcaactatatgggtgaggtgctggtcaacggaccccagactcctctcgccaccactctgaagcctgccctcgtctcgccccacgttcccgaggttccgctggttacggaaccaccgaagggactccgcgaggtcctggtgtgcgaaggtccggaggccttcgccaaggaggtgcgcaaccgtaaggaactgctactcatggacaccaccttccgcgatgcccaccagtcgctgctggccacccgcgtgcgttcccacgatctgctgaagatctccccctacgtgacgcacaagttcaacaacctgtattcgctggagaactggggcggagccaccttcgacgtggcgctgcgcttcctgcacgagtgcccgtgggagcgcctggaggagatgcgcaagcgcatcccgaacattcccttccagatgctgttgcgcggagccaacgccgtcggctacaccagctatccggacaacgtggtctacaagttctgtgagctggctgtgcagaccggcatggacatcttcagggtgttcgactcgctcaactacctgcccaacctgatcctcggcatggaagccgctggaaaggcgggcggcgtggtggaggctgccatctcctataccggagacgtcagcgatcccaagcgcaccaagtatgatctgaaatactacactaaccttgccgatgagctggtcaaggcgggcacccacgtgctctgcataaaggatatggctggtctgctcaagcccgaatccgccaggcttctgatcacagccattcgtgacaagcaccccgacatcccaatccatatccacacccacgacacctctggagcgggagtggcctccatgctggcatgcgccaatgccggagccgatgtggtggacgtggccgtcgactccatgagcggcatgacttcccagccgagcatgggtgccgtagtggcctccctgcaaggcactccgctggacacgaacttggatctgcgcacggtgtcggagtactccgcctactgggagcagacccgcaccctgtacgctcccttcgagtgcaccacaacaatgcggtcgggcaacgccgatgtctacctcaacgagattcccggcggccagtacaccaacctgcagttccaggccttctcgctgggtctgggcgacttcttcgaggacgttaagaaggcctaccgtgaggccaacctgttgttgggtgacattatcaaggtgacgccctcgtcgaaggtggtaggtgatcttgcccagttcatggtgcagaatgacctgaccgccgatcaagtgctggagcgggccgaggagctgtcgttccccaagtcggtggtggagtacttgcagggctctattggcattccgcacggcggattccccgagccgctgcgttcgcgagtgctcaaggacatgccccgcatcgagggacgtccgggagccgaactgaaggacttggactttgacaagctgaagaaggaactgcaggagtctcacacctgcgtcaccaaccgtgatgtcatgtcagctgccctctacccgcaggtgacgaatgatttcctaaacttccgcgaaaagtacggacccgtcgacaagctggacactcgcatcttcctcacgggtcccaaggtgggcgaggagttcgacgtacctctggagcgcggtaagacgctgagcgtgaaagctctggctgtgtccgccgatctcaagcccaacggtatccgcgaggtattctttgagttgaatggccagctgcgcgcggtccacatcctggacaaggaagccgttaaggagatccatgtccatcccaaagcgaacaagtcgaacaagagcgaggtgggcgcccccatgcccggaactgtcatcgatatccgcgtgaaggttggcgacaaagtggagaagggtcagcctctggtcgtgctctcggccatgaagatggagatggtggtgcagtcgccattggcgggcgttgtcaagaagctggaaattgccaacggaacgaagctggagggcgaggacctcattatgattatcgaatagacagtgccaccggatcaaaatgtccattgtctaagctgccaccgcacacacccaatgtaaaattaagtgaaaacagtgataatcttagggactctgtcagttcgattgatcataaaactgtccaaagtcgcctgtgtctatttttatatgaatcaaaatcattcatgtttccgtgtttccaggatcaatcgaccatgagtaactggtcaaattttttagctgtccctgccaaaatatatcggattgcataagttcgtgcccaagtatatttgtaaatttgtcgtagggcttttcccgcaagtcatttgaatcaaatttgtacgattatggaatttttaattcgcaaacacctgtgtcgagattccccctctagtaaatacgtaagtggttattaatgttatattaactattgtgtaataaacgttatac

SEQ ID NO: 26604 - protein, 1181 aa, DROSOPHILA; identical to SEQ ID NO: 1425

SEQ ID NO: 26605 - DNA, 7703 bp, DROSOPHILA
tatggcatgtgcggcataagcgaactgacaaccaacggacagtggatactcttcccttaaatttgttgctcaaaatatgtaatctttagtatgtactcattttttccgtcttaatatgactaagtatgtatgtactaatcaatataagctaacagctttaaacaataagaataagcttagaaaacttttacatatatctataaactacaagtgcacatatatactaatgaattgagatgtgtatatggataatgatctatctatgtctcttttattacctatccactgtttatccaaacggttagatccactgaaaatatccgatgaacttcaagtgcgaaaacgtgctgcagcagtagcaaatatttgttaatctattactaagctaatatacgtaatggttgtaaaataggcagtattaatacttcaattaggggaatttttcggagtttacaagcaaaacgcataagaaaacacaagctgaaaagctggcatttaattgtacaagtttgccgtgcatttttaaaacctgctttgaattttgatcacgtgagtcaactcatgttaatgagcagaccgattgttctgtttagtggaataacaccgaagtaccaagcggtggactttggtcagaagattataattgtacttaggccaacagatgcggtcggaattttagaaacccagattcccaagagggaaccactctttactttcaaacaaagtccagaataaaaaaatgtactctacctttttttatatggtattagcagtcgttgtaacccgtcgtgttcttaaatttccaattgcaataacttcaaaacgagaccttctagatccgcttgtttgtttgtttgttttttcgaaagtaatgtcgataaccttaaggcatttgtggcaatcgagctttcgaaattaacagataattaacgcgtttaatgcaatctctcaatcgtaaagcagagcgttcattatttcaaatattgccattgatgatttaaggtggttaagcggtggttggttgcgactgttatcaaatatttctatttcaaaatcaggttttagtgttacagttactggaattataacgtaatatgtttataaaccaaagcaccacatttccgaaaattaagcggtataaaagctaaaataatagctctgattataataaatctgttatgtatttttgcaatctttcagatacatttaagtcctaggcgggatcagcatgttcattccggccgcccagtccgcgtacaggacgctgcgcaagacccagccacgcgtccggctcaacgccatcttcaaaaatggctactccagcaaggtgagttacttagattagatcaatttaaacacgaaagaaaatgcacccaaactccacccacaggtggagtacaagcccatccggtcagtgctggtggctaaccgcggtgagatcgccatccgagtgttccgtgcctgcacagagttgggcatcaaatcggtggcggtctactcggagcaggataagatgcacatgcaccgacaaaaggccgacgagtcgtacatagtgggcaagggtctgcccccggtggaggcctacctcaacattccagagctaattagggtgtgcaaggagaacgatgtggatgccgtgcatcccggctacgggttcctttcagagcgcagtgacttcgcccaagcggtgattgatgctggactgcgcttcattggcccctcacccgaagtcgtccagaagatgggtgataaggtggcggctcgtgtggcggccattgaagcgggtgtgcccattgtgcccggcaccgacggtccagtgaccaccaaggaggaggcactggagttctgcaagaagcacggactgcccgttatcttcaaggccgcttacggaggcggaggtcgcggcatgcgcgtcgtccgcaaaatggaggatgtggaggagagcttccagcgagccagttccgaggccaaggccgcctttggcaatggtgcgatgttcattgagaagttcatcgagcgaccgcgtcacattgaggttcaactgctgggagacaaggccgggaatgtagtgcatctgtacgaacgtgactgctccgtgcagcgtcgccaccagaaggtggtggagatcgccccagcgccacgcctgcccatcgaaatccgggacaagatgacggaggcagcagtgcgcttggcccgccatgtgggctatgaaaacgccggaaccgtggagttcctttgcgacgagtccggcaacttctacttcatcgaagtgaacgcccgtctacaagtggagcacacggtcaccgaggagataacaggcatcgatttggtgcagtcgcaaatccgcgtggccgagggcatgaccctacccgaattgggctacacgcaggacaagatcgtgccgcgtggctatgccattcagtgccgtgtgaccaccgaagatccggccaacgattttcagcccaacaccggtcgcttggaggtcttccgatctggcgagggtatgggcattaggttggacagtgcgtccgcctacgccggagccatcatttcgccatactacgactccctgctggtcaaggtgatctcgcacgccagcgatctgcagagctccgcctccaagatgaaccgtgccctaagggaattccgcattcgcggcgtcaagaccaatatccccttcctcctaaacgtgctggagaaccagaagttcctccacggcgttctcgacacctacttcatcgacgagcacccgcaactgttcaagttcaagccctcgctcaatcgcgcccagaagctgctcaactatatgggtgaggtgctggtcaacggaccccagactcctctcgccaccactctgaagcctgccctcgtctcgccccacgttcccgaggttccgctgggtgagttctgcgcaccttatccactagaggatccccactttaatggcatgtgcttttcgggttcacgcttgcttatgtggctaccacttaagccaatcgcctctttccgaatgtttcagcggggtcctctctcgaagcattaaacatcccgactaagaaactatcttcaattgccaagttttaatttcgaggatttgctcaaatatcaaatgagattgtaacttatttaaacttaactatcattttctattcgtttttgctcaatggtaacaattttcgaaatatcattgcatgtattcaagttgtaatgtcaatccaggatttaaaagatttatgagtaatttaataatctctcatctaactcagtacattgcttcgtgttaggaccccagagatactaaatctattaaatggatatactactatcaaacttaatagatcctcaatgcacttcttttcaaaagtaatcaatgaaaaggcatgtttgttccacgcatctcctgtgaaatgttctttgcttttctgatatgctttaatcaaacctttatgtttttactctttcaactatcaatttttgttgcatctgttattaatcaaccaataccgaatcgaaaccgcgatcgcaatcgaatcggcatttgcaaaacaccaataccaatatcacacaccaatgtctgtaccgacaccaatcaacaacgattacaaatcgcacaacacaccaaacccacgaccacgaccacgaccacgcccactccgcctctaccacatgatcatacatagatctgtccccggaagctatagaacgcgaagaacgtggcgaggcaaaaggtacgttcacttctttatcccgaaatcacgcaggacatttgtacatacgagcatctatcatgtcggtttatgttgaagggtatctatcctaaggtactcctaacactttggaccaatcgttttgggattatcggaatatagagctaatatacatacaataaacatatgtgatgttgtggtgtttcaatttgattgcatatataatcattttgggtttaagctaatgttatttactatactgaaacaattgtatttttgcaattttttaattacgcagcttttggttttaccagcttttttgatgtttagcttttatgtattaaattggtattattgttgttgtattgaccttaaccgttgatgtcccaaatttaatgatataatcccgtaaaaatattgatatatttaaaccttataattgggaatatatcgactatacccaatcaaaaaactaacacgattttatggtatatacagttacggaaccaccgaagggactccgcgaggtcctggtgtgcgaaggtccggaggccttcgccaaggaggtgcgcaaccgtaaggaactgctactcatggacaccaccttccgcgatgcccaccagtcgctgctggccacccgcgtgcgttcccacgatctgctgaagatctccccctacgtgacgcacaagttcaacaacctgtattcgctggagaactggggcggagccaccttcgacgtggcgctgcgcttcctgcacgagtgcccgtgggagcgcctggaggagatgcgcaagcgcatcccgaacattcccttccagatgctgttgcgcggagccaacgccgtcggctacaccagctatccggacaacgtggtctacaagttctgtgagctggctgtgcagaccggcatggacatcttcagggtgttcgactcgctcaactacctgcccaacctgatcctcggcatggaagccgctggaaaggcgggcggcgtggtggaggctgccatctcctataccggagacgtcagcgatcccaagcgcaccaagtatgatctgaaatactacactaaccttgccgatgagctggtcaaggcgggcacccacgtgctctgcataaaggatatggctggtctgctcaagcccgaatccgccaggtgagtctgaaggggtttttaatttttttctgttgtgtactattttgtttccatcccctgaaaggcttctgatcacagccattcgtgacaagcaccccgacatcccaatccatatccacacccacgacacctctggagcgggagtggcctccatgctggcatgcgccaatgccggagccgatgtggtggacgtggccgtcgactccatgagcggcatgacttcccagccgagcatgggtgccgtagtggcctccctgcaaggcactccgctggacacgaacttggatctgcgcacggtgtcggagtactccgcctactgggagcagacccgcaccctgtacgctcccttcgagtgcaccacaacaatgcggtcgggcaacgccgatgtctacctcaacgagattcccggcggccagtacaccaacctgcagttccaggccttctcgctgggtctgggcgacttcttcgaggacgttaagaaggcctaccgtgaggccaacctgttgttgggtgacattatcaaggtgacgccctcgtcgaaggtggtaggtgatcttgcccagttcatggtgcagaatgacctgaccgccgatcaagtgctggagcgggccgaggagctgtcgttccccaagtcggtggtggagtacttgcagggctctattggcattccgcacggcggattccccgagccgctgcgttcgcgagtgctcaaggacatgccccgcatcgagggacgtccgggagccgaactgaaggacttggactttgacaagctgaagaaggaactgcaggagtctcacacctgcgtcaccaaccgtgatgtcatgtcagctgccctctacccgcaggtgacgaatgatttcctaaacttccgcgaaaagtacggacccgtcgacaagctggacactcgcatcttcctcacgggtcccaaggtgggcgaggagttcgacgtacctctggagcgcggtaagacgctgagcgtgaaagctctggctgtgtccgccgatctcaagcccaacggtatccgcgaggtattctttgagttgaatggccagctgcgcgcggtccacatcctggacaaggaagccgttaaggtaggttcagtcagcagtcatcggtgatctttaggcaatggaatcatttgcttgctcttcttccgcaggagatccatgtccatcccaaagcgaacaagtcgaacaagagcgaggtgggcgcccccatgcccggaactgtcatcgatatccgcgtgaaggttggcgacaaagtggagaagggtcagcctctggtcgtgctctcggccatgaagatggagatggtggtgcagtcgccattggcgggcgttgtcaagaagctggaaattgccaacggaacgaagctggagggcgaggacctcattatgattatcgaatagacagtgccaccggatcaaaatgtccattgtctaagctgccaccgcacacacccaatgtaaaattaagtgaaaacagtgataatcttagggactctgtcagttcgattgatcataaaactgtccaaagtcgcctgtgtctatttttatatgaatcaaaatcattcatgtttccgtgtttccaggatcaatcgaccatgagtaactggtcaaattttttagctgtccctgccaaaatatatcggattgcataagttcgtgcccaagtatatttgtaaatttgtcgtagggcttttcccgcaagtcatttgaatcaaatttgtacgattatggaatttttaattcgcaaacacctgtgtcgagattccccctctagtaaatacgtaagtggttattaatgttatattaactattgtgtaataaacgttatacaaaataaaaagtaacgccctggtttttgtagtgtgaaattggtgattaaacatctcgaaacaaatatgtaatgtatggttatctactttatttttttcctaaaattaattaaactgaattaagttaacaatcatgaatgaaacggctccgaagctaaagcctacatgcacttgacaatgaactctaggaaagccagatccttgttcagctcggtgacccgcttaaagtgtctctggacgtacggagtgagtacctcgaccatgttgccattgtagtagaacctcgccttgggatccagaagagcatctccgatcaagtacttgaggatcatgttgcccgcctgcgaatggcgcgagttggtggtccatgccttgacgtgctgcagcagcgcaacccgctggtcaacgttcaactggtcaaccaattgccggagaccgggctcatctcgcttgcggacaaagtggttgataatatcgaaactggctttgggcttgtccaggttcagagccaacacgaaggccttgtgaagctgcttctgggcgtgcagaagggaatgtagggtctgctcctgctccaatgcggcctgccgcttgtccagcgcttcgtttcgcgtcacctgagtgacatcaccgaagcgaatcagcttggagtccgcgccgccggtgtaaaagaaccgattgctcctggcggatacggccagcgcccaaaccctatcgttgtgctcgtccagggactgcagacatgtgttggtcttgatattccacagcttaagaaggccatccgaagcagcggagataatgaacttgccgtgatccaggaactcggctctcagtatggtgcactcctgatcgaaacgttttatgcacgaaaaattgctgatggaccagatgcggagagtacagtccgacgatgaggtgagcacgatctgatccaccggagagaagcgcacactccacacaccgcgggtgtgtccccgcaacactccttgcagcgtgttgga

SEQ ID NO: 26606 - DNA, 4138 bp, DROSOPHILA
aggtggttaagcggtggttggttgcgactgttatcaaatatttctatttcaaaatcaggttttagtgttacagttactggaattataacgtaatatgtttataaaccaaagcaccacatttccgaaaattaagcgatacatttaagtcctaggcgggatcagcatgttcattccggccgcccagtccgcgtacaggacgctgcgcaagacccagccacgcgtccggctcaacgccatcttcaaaaatggctactccagcaaggtggagtacaagcccatccggtcagtgctggtggctaaccgcggtgagatcgccatccgagtgttccgtgcctgcacagagttgggcatcaaatcggtggcggtctactcggagcaggataagatgcacatgcaccgacaaaaggccgacgagtcgtacatagtgggcaagggtctgcccccggtggaggcctacctcaacattccagagctaattagggtgtgcaaggagaacgatgtggatgccgtgcatcccggctacgggttcctttcagagcgcagtgacttcgcccaagcggtgattgatgctggactgcgcttcattggcccctcacccgaagtcgtccagaagatgggtgataaggtggcggctcgtgtggcggccattgaagcgggtgtgcccattgtgcccggcaccgacggtccagtgaccaccaaggaggaggcactggagttctgcaagaagcacggactgcccgttatcttcaaggccgcttacggaggcggaggtcgcggcatgcgcgtcgtccgcaaaatggaggatgtggaggagagcttccagcgagccagttccgaggccaaggccgcctttggcaatggtgcgatgttcattgagaagttcatcgagcgaccgcgtcacattgaggttcaactgctgggagacaaggccgggaatgtagtgcatctgtacgaacgtgactgctccgtgcagcgtcgccaccagaaggtggtggagatcgccccagcgccacgcctgcccatcgaaatccgggacaagatgacggaggcagcagtgcgcttggcccgccatgtgggctatgaaaacgccggaaccgtggagttcctttgcgacgagtccggcaacttctacttcatcgaagtgaacgcccgtctacaagtggagcacacggtcaccgaggagataacaggcatcgatttggtgcagtcgcaaatccgcgtggccgagggcatgaccctacccgaattgggctacacgcaggacaagatcgtgccgcgtggctatgccattcagtgccgtgtgaccaccgaagatccggccaacgattttcagcccaacaccggtcgcttggaggtcttccgatctggcgagggtatgggcattaggttggacagtgcgtccgcctacgccggagccatcatttcgccatactacgactccctgctggtcaaggtgatctcgcacgccagcgatctgcagagctccgcctccaagatgaaccgtgccctaagggaattccgcattcgcggcgtcaagaccaatatccccttcctcctaaacgtgctggagaaccagaagttcctccacggcgttctcgacacctacttcatcgacgagcacccgcaactgttcaagttcaagccctcgctcaatcgcgcccagaagctgctcaactatatgggtgaggtgctggtcaacggaccccagactcctctcgccaccactctgaagcctgccctcgtctcgccccacgttcccgaggttccgctggttacggaaccaccgaagggactccgcgaggtcctggtgtgcgaaggtccggaggccttcgccaaggaggtgcgcaaccgtaaggaactgctactcatggacaccaccttccgcgatgcccaccagtcgctgctggccacccgcgtgcgttcccacgatctgctgaagatctccccctacgtgacgcacaagttcaacaacctgtattcgctggagaactggggcggagccaccttcgacgtggcgctgcgcttcctgcacgagtgcccgtgggagcgcctggaggagatgcgcaagcgcatcccgaacattcccttccagatgctgttgcgcggagccaacgccgtcggctacaccagctatccggacaacgtggtctacaagttctgtgagctggctgtgcagaccggcatggacatcttcagggtgttcgactcgctcaactacctgcccaacctgatcctcggcatggaagccgctggaaaggcgggcggcgtggtggaggctgccatctcctataccggagacgtcagcgatcccaagcgcaccaagtatgatctgaaatactacactaaccttgccgatgagctggtcaaggcgggcacccacgtgctctgcataaaggatatggctggtctgctcaagcccgaatccgccaggcttctgatcacagccattcgtgacaagcaccccgacatcccaatccatatccacacccacgacacctctggagcgggagtggcctccatgctggcatgcgccaatgccggagccgatgtggtggacgtggccgtcgactccatgagcggcatgacttcccagccgagcatgggtgccgtagtggcctccctgcaaggcactccgctggacacgaacttggatctgcgcacggtgtcggagtactccgcctactgggagcagacccgcaccctgtacgctcccttcgagtgcaccacaacaatgcggtcgggcaacgccgatgtctacctcaacgagattcccggcggccagtacaccaacctgcagttccaggccttctcgctgggtctgggcgacttcttcgaggacgttaagaaggcctaccgtgaggccaacctgttgttgggtgacattatcaaggtgacgccctcgtcgaaggtggtaggtgatcttgcccagttcatggtgcagaatgacctgaccgccgatcaagtgctggagcgggccgaggagctgtcgttccccaagtcggtggtggagtacttgcagggctctattggcattccgcacggcggattccccgagccgctgcgttcgcgagtgctcaaggacatgccccgcatcgagggacgtccgggagccgaactgaaggacttggactttgacaagctgaagaaggaactgcaggagtctcacacctgcgtcaccaaccgtgatgtcatgtcagctgccctctacccgcaggtgacgaatgatttcctaaacttccgcgaaaagtacggacccgtcgacaagctggacactcgcatcttcctcacgggtcccaaggtgggcgaggagttcgacgtacctctggagcgcggtaagacgctgagcgtgaaagctctggctgtgtccgccgatctcaagcccaacggtatccgcgaggtattctttgagttgaatggccagctgcgcgcggtccacatcctggacaaggaagccgttaaggagatccatgtccatcccaaagcgaacaagtcgaacaagagcgaggtgggcgcccccatgcccggaactgtcatcgatatccgcgtgaaggttggcgacaaagtggagaagggtcagcctctggtcgtgctctcggccatgaagatggagatggtggtgcagtcgccattggcgggcgttgtcaagaagctggaaattgccaacggaacgaagctggagggcgaggacctcattatgattatcgaatagacagtgccaccggatcaaaatgtccattgtctaagctgccaccgcacacacccaatgtaaaattaagtgaaaacagtgataatcttagggactctgtcagttcgattgatcataaaactgtccaaagtcgcctgtgtctatttttatatgaatcaaaatcattcatgtttccgtgtttccaggatcaatcgaccatgagtaactggtcaaattttttagctgtccctgccaaaatatatcggattgcataagttcgtgcccaagtatatttgtaaatttgtcgtagggcttttcccgcaagtcatttgaatcaaatttgtacgattatggaatttttaattcgcaaacacctgtgtcgagattccccctctagtaaatacgtaagtggttattaatgttatattaactattgtgtaataaacgttatac

SEQ ID NO: 26607 - protein, 1181 aa, DROSOPHILA; identical to SEQ ID NO: 1425

SEQ ID NO: 26608 - DNA, 2410 bp, DROSOPHILA
cggaggttttataagggatttccatgaagaaacgcaagttactttaaagatagtttatttatttcttaattgcaatgtttgtttagctgataagctttacaatcatacatctagtgtgaccatgactaagatggtcaattatactagccatcccagaaatgttttgaaaaggttaaaatatgtttttggtatttttgaaggcttgtttatttttggcatctctaagaatgcagtttacatttgagtgcaaaagaaagcgctgctttaataagaatgcgaatttcacgcctcttccaagtggacaggatggcgaacgttacaagggaagatttacaggactatccgtcgagatagttgatcccgaacaggctaaatccctgcacgataatggttgttttggcaagggaagcaaatctcgcggaggaccagcaagtggagacgagaacgaaaccctgtttctcggaatggaagagtcttgcttcctggcccactatttaaatgttttagatataaccaactcagctggttatttaatggacttctgcatgtttgtggaggtcgccaaagagcacaatgagaaatttgttgagaacttggccagctatgtgtatttgaagtccaagaattgggtcatcaagagcggtattaagttcggcggtgattttcgtaagttcttaactgaagagctgcgaaatatatatactaactttccttttttagttatctacaagcaaagtcctcgattgtaccatgccagctttttggtcattgtgcaaaagcctggtgatacggatcactatcaatcaaagaacttgaagggtgttcaacgcgtggcagaaacttctgataaggatgtgctgctcctgactgtccaaccgcctaagaagataagctcttccagggatttgcaggaagccacagtaacagagactattgtgcggcgttttaattacttaacttttgtacaaagcaaacaacaataaggaactactcagggactctacaacttctccagccggtgcttcttgggtatgccagtgctgcgatagtcggcgcgctcctgcagatatatctgcttgcactcctccttgaaggcttcgttctgataccactgggtgaggcattccttcagggctgagttctgtttccgacaggtggccaccatcagtatactgctggccttgcagcactcctggaagtcggccacctcctttgagcagaactccgtcttggcacgatcgcgcattatcttgggtatcagcacttcgcgctccaccttgcgcaacctagtatcatttggatcgcctagcaagggcagtgtcagttggtggtcatattcgattattctgaggactcacccagtccatggggattgtggggatccacggctggctgttgttcaaggctcatattgtgttaaaaatactatttattttgtataacaacttttagagtgactgccaccggtgcgatgaaaaatactagggatataaaaataccacgagtatactaaaattagattcatttttaagatataaaatataattttataattcgatttcttgaatattgaaattacttaatgatcgtctagaacacaaaatttgcccgactgatcgctaattcaataatatatttttttttaaaccgataaaccaccttcgtgtattaaattagccaagaatccagacgcattttattacaaaactgcattttaaatgcttaaatcaaaacctaactaagcggccaggctagcagcgctgattggctccaaatctcgcacaccatccttgtccacgacggcgacggtgaagttcttgaggttgacgaccaggcgcttctggatttcggcaatgcacttcttgaagacgtcgtaggcctccgcctgggttatattggggtgccagtatcggtcatagatgctggatgcgaagatcgcaccatagccatgaccggcgtaattcacaggcagtgcattggccaaatagtcaatgaaggtgagctccggacccgcgttgggatcgtagctttggggagaagaaacagattaggcacggaaagcaaatggattgactgatctcatgatccttacccggccacaaacatgaacacttggtagggcgtgcgactgcgaagatattcggccagattcttgcgagtaaaatgagccgattcacgtggacttaaatcgtagccattgcgcatcttgtacaacgctatgttcttcgaaatgaattcggtaaattgctccgtgtcgcccgattcgccgacggttgaaataagcagactatccgacaccttgtggattttgttctgatctgcaatggaaattcaaggagactaacgaaatgagtcccaagccgccaagaaaatgagcaccatttgggcttaccctctttcatcactataa

SEQ ID NO: 26609 - DNA, 357 bp, DROSOPHILA
atgagccttgaacaacagccagccgtggatccccacaatccccatggactgggcgatccaaatgatactaggttgcgcaaggtggagcgcgaagtgctgatacccaagataatgcgcgatcgtgccaagacggagttctgctcaaaggaggtggccgacttccaggagtgctgcaaggccagcagtatactgatggtggccacctgtcggaaacagaactcagccctgaaggaatgcctcacccagtggtatcagaacgaagccttcaaggaggagtgcaagcagatatatctgcaggagcgcgccgactatcgcagcactggcatacccaagaagcaccggctggagaagttgtag

SEQ ID NO: 26610 - protein, 118 aa, DROSOPHILA
MSLEQQPAVDPHNPHGLGDPNDTRLRKVEREVLIPKIMRDRAKTEFCSKEVADFQECCKASSILMVATCRKQNSALKECLTQWYQNEAFKEECKQIYLQERADYRSTGIPKKHRLEKL

SEQ ID NO: 26611 - DNA, 3836 bp, DROSOPHILA
tatttcgctattagttgctcgagccactcgagtccgcaaaccattgccacattcccacacgtagtggggaatgctcccactcgggaagagggttctcagcatcgactgtagatatccgtacctcggagctctcctgtcagtgcgtccatgattaataaatgcgacatactgtcgaccgcaacattactgacacctccagaaggccaacagccgacaaggtgggctaagtatgctgtggcttttcagcccgcctatcctcctcctctctgcttttgccggttcccaaccacacacgcacacacacacacatatggcactcactcacgcccagaaatacacaagcaaaaaatcgatattaatcaatattattcaaaaaccgtatttctagtatttctagtttgggatgcaaaatgtgttgcatgcatttcatcaacttttttattaaactattttaagagcgttacatatatttttgggatatttttttgtacttgcttcaatagaagtaatttatattttggtggctaggaatttagaaatacttttccgtgtgcatagatatgcaaagtttatcaaggcacgcagctcttttgtcacaaacaggtaagacaacaagtacacgtagacataacgtgcaccaactgctctcaaaaggcgaacttgagccacaaagccaaggataaaatggtatatttgtatgcacacgtgaatacatcaaatttacgaacagccaaaagggtattgtggcttttgctcagcattacggaaaatataattaattttgtcgaatggggagttttagcaacagcgagaataagtcaaatgctaggcaattgttaaaccaggcaaatagtacaagaaaatgttgaaaaggaactctgagggcttactaaaagttatgccaacttatatagattgccattgaaatcgcactgaatgctaaaggatctcatttatcccttgtcaaagcaaattaaccaagatatttattatcccttgcagattgaggaaatccattgaccgacggttttacagcattcaatcaagcgcaaattggctcaacttgcaaaaagggcacattttcggccttgcaaattccaatcttgaaactaaatgacgcctgtgtctgaaaccgagaccctgctgccaaataccgcaacgctggacgccagacgacggccacaaattagccagccagccgtagatttgcaagtctaaggagtcgccctgcccaccagaacgcagaaggggatccctgttcaaaggagccagcgaaggccacacacaggagaaagatcaaaaggagcaccagccagtgtgactgcgactatttttcgggagcgccaaaggattcattaaaaaaccgccaacctggaactaatggaattagagaatattgtggccaatacggtctacttgaaagcgagagaagaagaagcagccggctcgcactcagcccatacccattccggagcatctgttaaccactagtcacagcgtgtcctccacgacggtcgaaagctgatagcagagatcagtcgaggatgcctttaagcggacgcctgacgtagacgtcgacacatagcacaaattgcgcacagttaccccggatcggaagagttcagcaggagcataataactttagagcacaacctaattataaaaccgaaactacatcggtttatccttcagttgacgcgcaagaagcatttttgaaattgtacttttacatcaaattttctaatgaaagttgttcaagctgatttcgacacacaatatatatttataaatgtttcaaaaagactcctaaccgaaacaacacacacattgagcacacattagagagttaattaattgtaattgtggtaacaagaataccacttactataccactttgagagctaaggccgtcagtttgtcacagcacccaaaaataatgttacttaaatacgagcgctatacaatatacacgcgtcgccagaagcgggacaacggcggatgggcaggaacagcactacgtagacggctgagtaatatgtaatttttgtatagtagtttgtgatcgacgggacagcgttggacgatagatgttctagttagcatttgtaagttaagaaaatgacatgaatactcgaaaacttgaatgcatttttaacaaatacttaacacatgctactacgttgtacatgcgtagatgcgatacaagcgtgcaacctaatcagatgtaaatgtaaaatctttaattatttatacgactcctaagttttattgccgcactcttttgctaagcttttcatatcgttcttttactttttctgttgcctaagtttaagttgccgaaggttcccatggaagaacgttattactgatatttgtttcgtcacgtaattaaatgaacagcagcagcagttatgctaactaatgcaaattcattgagatatcgatgtcagctagcgtctaagttttgtgtaatagtagcgtaggcattttgtaattagcaattagcaacaaagaaagaaacaaaagtaaaccaattggagaatttattatgttagtatgaaaattaattatgattatcgaaccggttggctggcagcatggaacgcgccagctgaacgtcttagtttcaattcacttgatttaggcacaactagtaaattgtaaggcatataatgaacaactactaacagcacaaccaaccagcattcaaaacagcaaacgccatcagcatcagctccaaatccaatttagcaccacgactacataaagtaaaccaaactgagcaagcgccgaaatatttatctctagcaattaaaggcatatttatagagcatcgtaaataccagatatacatacataaataaatctattctgtaagcgaaataatacaaaatacaaccgaaaagtcaagagatggacactcaaaaacaataaacgtattaaactatcaagttgtgtggcgtttcattcttttcattcagacaaggttaaaaagtaaaggacgaaatataagattttgcccattgggtatgctaggtaagccatttaaatttggcgccaaagaatacacttctgatggttgcaaagaattgcatacttttgggagtgcgcttttgcaaactaacggttgattctaagaaaattttaccagctggtaggcacttgctacaaattatgttcgcctggtattgaaaatcaaaaaacttgctacatgggcactgcgatttgacaatctgtcggccaatttgacggcttgtttgaattgaaataccaggcgaacagaaataacagcaggtggataaacaaagttaaaactaatcagcgcctactggtatgcactgcagtatgacacccaagtgtgtcggcgccgcagaaaagtatgccgcataaaataatggttcgacttttgttgcggctcccaaaagtataccaagaattattgtttggcagtgaagaaaccgctactccccaaaagtatactagctttattgaagtacacagattaattacgattctaagccctaaagtattcatttcaaatgatccagccatctagcattggcaggcgggaaattcttagtatctaagaggtcaccagagatggctcataccgctattttactttctaaactgtacacaaaatcaaatcttaaaccaaagcggctttcgccgacagttgaaaatccttgtcgtctgccgtacgccagtgtagtcaagaaggcactcagctccgttgttctcgaaggatatctctcccagcttgtactcgggattgagggccactcgcaggatgtagcgtcggttgatgggaactcgggtaacatccacccactggc

SEQ ID NO: 26612 - DNA, 3836 bp, DROSOPHILA
agattgaggaaatccattgaccgacggttttacagcattcaatcaagcgcaaattggctcaacttgcaaaaagggcacattttcggccttgcaaattccaatcttgaaactaaatgacgcctgtgtctgaaaccgagaccctgctgccaaataccgcaacgctggacgccagacgacggccacaaattagccagccagccgtagatttgcaagtctaaggagtcgccctgcccaccagaacgcagaaggggatccctgttcaaaggagccagcgaaggccacacacaggagaaagatcaaaaggagcaccagccagtgtgactgcgactatttttcgggagcgccaaaggattcattaaaaaaccgccaacctggaactaatggaattagagaatattgtggccaatacggtctacttgaaagcgagagaaggtggttccgacagcaacaagggaaagagcaaaaaatggcgcaaaatattgcaattcccacacatatcgcaatgcatcaacctgaaagacaaattagatataagctatggctacgtgatagatcagcaacccattggtcgtgagctcttccgtctgttttgcgagaacaaacggcccgtctactttcgctacatcaccttcctggatgaggtggtcaaatacgagatcgagtacatctcgaaccgcatattcattggccatgacatcggccgtcgcttcttggatgtcgaggcacagctggagctgcgcaacggcagcgggggcgacgccttggacgccgagacgcaggaggagctgctgctcaacagcagcaatgccaatccaactgaaacagctgagactgaacactgcaacaataccaccgccaacaactgcaacaacatcaacaacagcaacaactcgcagcacagcagcgacatcaatcacaagaagctggacacgcgcaatcacaacggcgacgacgccactgggaacgggagcagccaccaggacgacggggacgagagcgtcaagtgccaggagggccatgacgatgcggaaaagggtggtggcggagagggaggcggcggcggaaagtgtgtccccgtgggcgggtatcctgacgaactcgtgttggacgtgcttaacgatgatctcattgcgcaagtgcgtaacaaactcaacagcggcggcaaggacatctttgcccagtgtgtgaacgcggttaaggcgttcctggccggcgaaccgttccgggagtttgagagctctatgtattttcaccgatacttgcaatggaagtggcttgaggcgcagcccatcacctacaaaacgtttcgcatgtaccgggtgctcggaaagggcggcttcggcgaggtgtgcgcctgtcaggtgcgggccactgggaaaatgtacgcgtgcaaaaagctggagaaaaagcgcatcaagaagcgcaagggcgagtcgatggtgttaatcgagaagcagatactgcagaaaatcaactcgccgttcgtggtcaatctggcctacgcgtacgagacaaaggacgccctctgcctggtgctgaccataatgaatggcggcgatttgaaattccacatttacaacatgggcggcgaaccaggctttgaactggagcgtgcccgcttctatgccgccgaggtggcctgtggactgcagcacctgcacaagcagggcatcgtctaccgggattgcaagccggaaaacatcctccttgacgatcacggccatgtgcgcatttccgacctgggactggccgtcgagataccggagggcgagatggtgcgcggccgggtgggcacagtgggctacatggcccccgaggtcatcgacaacgagaagtacgccttctccccggactggttcagcttcggctgcctgctgtacgagatgatcgagggccaagcgccgttccggatgcgcaaggagaaggtcaagcgcgaggaggtggacaggcgcgttaaggaggaccccgaaaagtattcaagcaagtttaatgatgaagccaaatcaatgtgccaacagctgttagctaaatcgataaagcagcgcctgggctgccgcaacggtcgcatgggcgggcaggatgtgatggcccacccgtttttccactccacccagctcaattggcgtcgcctggaggctggtatgctggagccaccctttgtgccagacccgcacgccgtttacgccaaagatgtgctcgatattgaacagttctctacggtgaagggcgtcaatatcgacgaatccgacacgaatttctatacgaaattcaacacaggctccgtgtccatttcctggcagaacgagatgatggagaccgagtgctttcgggaactgaatgtttttggtcccgaggagtgtcccacgccagatttgcaaattaatgcagcgcccgaaccagacaaggcgggctgtttcccctttcgccggaagaagaagcagccggctcgcactcagcccatacccattccggagcatctgttaaccactagtcacagcgtgtcctccacgacggtcgaaagctgatagcagagatcagtcgaggatgcctttaagcggacgcctgacgtagacgtcgacacatagcacaaattgcgcacagttaccccggatcggaagagttcagcaggagcataataactttagagcacaacctaattataaaaccgaaactacatcggtttatccttcagttgacgcgcaagaagcatttttgaaattgtacttttacatcaaattttctaatgaaagttgttcaagctgatttcgacacacaatatatatttataaatgtttcaaaaagactcctaaccgaaacaacacacacattgagcacacattagagagttaattaattgtaattgtggtaacaagaataccacttactataccactttgagagctaaggccgtcagtttgtcacagcacccaaaaataatgttacttaaatacgagcgctatacaatatacacgcgtcgccagaagcgggacaacggcggatgggcaggaacagcactacgtagacggctgagtaatatgtaatttttgtatagtagtttgtgatcgacgggacagcgttggacgatagatgttctagttagcatttgtaagttaagaaaatgacatgaatactcgaaaacttgaatgcatttttaacaaatacttaacacatgctactacgttgtacatgcgtagatgcgatacaagcgtgcaacctaatcagatgtaaatgtaaaatctttaattatttatacgactcctaagttttattgccgcactcttttgctaagcttttcatatcgttcttttactttttctgttgcctaagtttaagttgccgaaggttcccatggaagaacgttattactgatatttgtttcgtcacgtaattaaatgaacagcagcagcagttatgctaactaatgcaaattcattgagatatcgatgtcagctagcgtctaagttttgtgtaatagtagcgtaggcattttgtaattagcaattagcaacaaagaaagaaacaaaagtaaaccaattggagaatttattatgttagtatgaaaattaattatgattatcgaaccggttggctggcagcatggaacgcgccagctgaacgtcttagtttcaattcacttgatttaggcacaactagtaaattgtaaggcatataatgaacaactactaacagcacaaccaaccagcattcaaaacagcaaacgccatcagcatcagctccaaatccaatttagcaccacgactacataaagtaaaccaaactgagcaagcgccgaaatatttatctctagcaattaaaggcatatttatagagcatcg

SEQ ID NO: 26613 - protein, 714 aa, DROSOPHILA
MELENIVANTVYLKAREGGSDSNKGKSKKWRKILQFPHISQCINLKDKLDISYGYVIDQQPIGRELFRLFCENKRPVYFRYITFLDEVVKYEIEYISNRIFIGHDIGRRFLDVEAQLELRNGSGGDALDAETQEELLLNSSNANPTETAETEHCNNTTANNCNNINNSNNSQHSSDINHKKLDTRNHNGDDATGNGSSHQDDGDESVKCQEGHDDAEKGGGGEGGGGGKCVPVGGYPDELVLDVLNDDLIAQVRNKLNSGGKDIFAQCVNAVKAFLAGEPFREFESSMYFHRYLQWKWLEAQPITYKTFRMYRVLGKGGFGEVCACQVRATGKMYACKKLEKKRIKKRKGESMVLIEKQILQKINSPFVVNLAYAYETKDALCLVLTIMNGGDLKFHIYNMGGEPGFELERARFYAAEVACGLQHLHKQGIVYRDCKPENILLDDHGHVRISDLGLAVEIPEGEMVRGRVGTVGYMAPEVIDNEKYAFSPDWFSFGCLLYEMIEGQAPFRMRKEKVKREEVDRRVKEDPEKYSSKFNDEAKSMCQQLLAKSIKQRLGCRNGRMGGQDVMAHPFFHSTQLNWRRLEAGMLEPPFVPDPHAVYAKDVLDIEQFSTVKGVNIDESDTNFYTKFNTGSVSISWQNEMMETECFRELNVFGPEECPTPDLQINAAPEPDKAGCFPFRRKKKQPARTQPIPIPEHLLTTSHSVSSTTVES

SEQ ID NO: 26614 - DNA, 3923 bp, DROSOPHILA
cttttgccttaaccccctaagctgaaattgttaagcaactcacttggccctagcgcgtccattcacttacccattcattcattcactcaccgacttattcctgccttgattcattcagttattcgttggtcatgcaaatccctggcacacaaatttacaccttgggtgcagtttgcaaagccccgggataatccgcattagttgcagaatgcagacggccgccacacagcttcggattcggattcggaatgagaccggaccaggaggccaggatccacccgatccgacaggaccatgtggctatagggcttagcctcctcttccctcccccgctaactggtcatattacgctatttgtgcaactcgtgtggaaaggggcaaaggcaaattgaatcgtgttttgtcgagcatttcattccggaatttgtcaaatgtcgaaaatgtgcaaactggcttcgattctgaaagtcctaaaaaccccaaacagaaacagaaaccaataaaatatgtatgttttgtccatcaccatggggtgatggccaactgaccattgcccaatgcccactgcccaatgcccattgccccttgcatattgcaattttaatttttcaattcattttatgttgaatatctgaccgagtcgatgtttttacgccccggcaactggagtcgcagccgcaggggtgccacaaataacaaattgcttgtcattggcatggccaatgggtcccaggtcccaggacctacccctcccacaaggatagcatccaagtccaagaccccttcctcgaaagcctttggacagggcttttacaatttgaatctcgattagaattcattgagttgccgacattagttagccagcagcctgtaagaaagcacagtggtttgatgtcgagagttcagtactttgcttttaaaaataatcaatctagaaaatgcatcaattattaaatgcttttagaggtaaaacactcggaaaagatgtggtaactattttttattcagctttaagttcgagctgctgtacgaggcccaggacctttcgcctctgcagtttatcattgggtgtttttggcagactgtcgatgaaatacacacctcctcgaatgtggtaggctccgctcaagtggtgttccacaatgtttcggatgtgatccgccgtaaggcgttccccctccggacttttggtgcggaccacggcgcaggccgtaagattggtgctcaccgcgtcgggtatgccgaagacacaggcctcactgacgccgggcaatctgaggatgaactcctcgatctgctcgggatagatctggaagttgttgaacttgaagacatcggtgtcacgggtctggatgtacagatacccctcgctgtcaaggtaaccgatgtctcccgtgcgaaaccacatgccgtcggagctgagggctcttcgagtggcctccgggtttcggtagtagcctgcccacttgaaccgcaaacgggcgtagatgatgcccacttcattgatgccaagtggcatcttcagtttgtccagcacccgcagctcaacattccgcataaccttgccctcgcaacccactggtccacccacgtttttgctcagtccgcccatctcggacagcccatagcccacaacaaatctctggttaccaatcaactcgtacatcctgcgacacaccgccttgcacactttagatccagctccaatcaaaacccgtatggattggagctgggccttcagttccatcacatcactgtcatgcttggatagcagggcaatctgatgggaggccaggaacagaaaggtcaccttgtgcctcgccaccagttggagcaggtactccacgctgtatggacgattggtgattatgcgacgacaaccattgaggagcgaggccagaaggattatggttcccgatatccagtagaggggactgaacgagagcagcacgctatctcgggtgtaggtgttcggactgtaaggagatagtattattcctcataatattaataattgaaaatatatagtaatcgttctgattgcttagaaattgtatcataaatatatggaaaaggtgatatccaagaagatggcaggttaaatgaaaacatacttcttgcagttacagagtaaacttcgatgggatcgagtgacgccttttggcattcccgtggttcccgaggagcacacaatgaatgcggtgtgatcgccgtgtagttttggacaaggaacatacctaaaattagaaaacatctattagaattgatttagttcatcgcgaaatacacagaaacttacgcggctgctgtaatgctgtcttcatcatttagcatctcgcttatgtccagcactccttctaattttccattgaccagatagatcttggcgggattttgtagttttccattgaccgtctttattatatggtagttttctacatcgcagaagataaccttcggctcggtaatgtcgtacatgtatttgacagtctctgaaagggaatttaatttcatcataatagtaagcatactaaagtaagtacaggagttttgaacctcaccttcagtaaactccggatgcagtggattaatggggatgccacggagcaaagccgcaattatcacactggttaaatacgtcgagttattggccgatatgccaacgacatcgcccctccgtagacccaatctcttgaaggcctgtgctatgcgggcactctgctgagccaactgagcaccggtgagctcctgacccgtggtatcacatatttgcatcacctgatctgcgttaatctgcagcacgcgcatgatgacctcgcccagggtcatttctggaccgtagaagtccttgccacgcggtccaaaccaagtccgcgaagcggcatcgtagtgcacctcacagctcatagtgttttccaacgtccggcgatcgaataagtgctttattgcgtctcatttgggttttatatggctcggggagtacggaaaacaaagtggagctgttaattagtaggacacggcaagacatcgatgcttgtcgccagtgtcaactaaaatagatgctgatttactcattggcaagtcggagccgcctctgttttccgctaatcaaatcgagccgtccagcagacatggaaactttttaatttctttcacagttcttgtgatgattcactgtgtttacatttattaaacacgattataaacaactcatgtattgtatatttagcataaatcttatctcacaaatgtgtggttgcctcgctcaactgcgaccagatcttcctgcgctgcaccttactgttctgcgtcttcggcagattgtccacaaagaagactcctccgcggatgtggaaggcatcgcttagatgttgtgccacaactcccttgacatccgcctcggtcagctgggcacccaactcatcctcattccgaaccactgcacaggctgtaagattggtggacacctcatcgggaattccgaagacagccacttcgtggactccgggcagatggagaatcacgtcctcgatctgcttgggataaatggggaagtgattgtacttgaagacatcggtgtcacgggactgaaagtgcaggcagccctcatcgtcaaagtatccatgatcgccggtgagcaaccacttgccgtcgggcgtgacggtcacctgggtctcctgcggattgtgatagtagccgccccagcgaaggttgagccgcaccaggatctggcccgtctggttggggcccaaggactgaccgtgtgggtctaccacgcgaacctggacatttcgcagcaacctgccctcgctgcccagtggacctcccacattcttggagattcctccggtctctgtgagaccgtagagcacggcgaatctgttcgcacccagtagctcgtacaactgccgccagatgcccat

SEQ ID NO: 26615 - DNA, 1648 bp, DROSOPHILA
gacgttggaaaacactatgagctgtgaggtgcactacgatgccgcttcgcggacttggtttggaccgcgtggcaaggacttctacggtccagaaatgaccctgggcgaggtcatcatgcgcgtgctgcagattaacgcagatcaggtgatgcaaatatgtgataccacgggtcaggagctcaccggtgctcagttggctcagcagagtgcccgcatagcacaggccttcaagagattgggtctacggaggggcgatgtcgttggcatatcggccaataactcgacgtatttaaccagtgtgataattgcggctttgctccgtggcatccccattaatccactgcatccggagtttactgaagagactgtcaaatacatgtacgacattaccgagccgaaggttatcttctgcgatgtagaaaactaccatataataaagacggtcaatggaaaactacaaaatcccgccaagatctatctggtcaatggaaaattagaaggagtgctggacataagcgagatgctaaatgatgaagacagcattacagcgtatgttccttgtccaaaactacacggcgatcacaccgcattcattgtgtgctcctcgggaaccacgggaatgccaaaaggcgtcactcgatcccatcgaagtttactctgtaactgcaagaatccgaacacctacacccgagatagcgtgctgctctcgttcagtcccctctactggatatcgggaaccataatccttctggcctcgctcctcaatggttgtcgtcgcataatcaccaatcgtccatacagcgtggagtacctgctccaactggtggcgaggcacaaggtgacctttctgttcctggcctcccatcagattgccctgctatccaagcatgacagtgatgtgatggaactgaaggcccagctccaatccatacgggttttgattggagctggatctaaagtgtgcaaggcggtgtgtcgcaggatgtacgagttgattggtaaccagagatttgttgtgggctatgggctgtccgagatgggcggactgagcaaaaacgtgggtggaccagtgggttgcgagggcaaggttatgcggaatgttgagctgcgggtgctggacaaactgaagatgccacttggcatcaatgaagtgggcatcatctacgcccgtttgcggttcaagtgggcaggctactaccgaaacccggaggccactcgaagagccctcagctccgacggcatgtggtttcgcacgggagacatcggttaccttgacagcgaggggtatctgtacatccagacccgtgacaccgatgtcttcaagttcaacaacttccagatctatcccgagcagatcgaggagttcatcctcagattgcccggcgtcagtgaggcctgtgtcttcggcatacccgacgcggtgagcaccaatcttacggcctgcgccgtggtccgcaccaaaagtccggagggggaacgccttacggcggatcacatccgaaacattgtggaacaccacttgagcggagcctaccacattcgaggaggtgtgtatttcatcgacagtctgccaaaaacacccaatgataaactgcagaggcgaaaggtcctgggcctcgtacagcagctcgaacttaaagctgaataa

SEQ ID NO: 26616 - protein, 543 aa, DROSOPHILA
MSCEVHYDAASRTWFGPRGKDFYGPEMTLGEVIMRVLQINADQVMQICDTTGQELTGAQLAQQSARIAQAFKRLGLRRGDVVGISANNSTYLTSVIIAALLRGIPINPLHPEFTEETVKYMYDITEPKVIFCDVENYHIIKTVNGKLQNPAKIYLVNGKLEGVLDISEMLNDEDSITAYVPCPKLHGDHTAFIVCSSGTTGMPKGVTRSHRSLLCNCKNPNTYTRDSVLLSFSPLYWISGTIILLASLLNGCRRIITNRPYSVEYLLQLVARHKVTFLFLASHQIALLSKHDSDVMELKAQLQSIRVLIGAGSKVCKAVCRRMYELIGNQRFVVGYGLSEMGGLSKNVGGPVGCEGKVMRNVELRVLDKLKMPLGINEVGIIYARLRFKWAGYYRNPEATRRALSSDGMWFRTGDIGYLDSEGYLYIQTRDTDVFKFNNFQIYPEQIEEFILRLPGVSEACVFGIPDAVSTNLTACAVVRTKSPEGERLTADHIRNIVEHHLSGAYHIRGGVYFIDSLPKTPNDKLQRRKVLGLVQQLELKAE

SEQ ID NO: 26617 - DNA, 6008 bp, DROSOPHILA
taccctccttcttacttcagtctccttcttgatctcgagtggtgtgatggccggggcgacgtccttaacggtgggcaggccgtgggtgagatagcccggtggcagcttggaggtgaatccgttgcccaggttctgcagtgagctctcttcgtcgtctccttgggcatcaaatgcaagcactgtttaaggtataaaactaacacagctagaggaacatgacaatcgacagaacaggaacaattctactttcggctctgattgattcgatctgattcgatttggttttgaacttatttgagtttagattaagttatcattacgcgttcttcttcgtcttcgtttttcttggctaggaaccgtaattttctgagacatttggctttgtttgtggggctcactgaggcgggattgtgggtttcggattttggggattcgatgaagctcttagtgtaagggggaaagcgagagagagggagagaaggagcattgcagcacattggttcctctcgcctgtcctcgtcttctttcgagtgtggctgtgtgcgtgcgtgcatcacatcgggggaaagggatagacagaggcagagaaagtgagtgagagggagagagagagagagagagaaaggaaagatgtggcggcaggtgcatggctgttaataaactgttaaacactgttaaaggcactcacacaggtgcatatatcagactgcagttggttatcgatatatacagtgttagggcatggacaggtgagtgtgcgagagtgtgcgtttggttaggtgtttggatttggttttcggtttgcagttttgtttttcacctggttaatatacaaagccaattactgaaatcaaaaatttacattttccctactgctgtttagctctggttctgtttcgatcgaatcaacgttatcgctattgtacatcgtttttgcatttttctccacccaatttataattgcttgcacttaaaattatttagttttatgctagaaatatattacacatatattaaacaaggttaagttaacgaccgattgatcgatttcgattctgtaacagtgctgtaattgaagatggtatcggtaatcgggatcaatagctgagagagcgagagagacagagagagagacaggcaagaagtcgctcgctgccgagtttgcataagagtgagtgaaatggagcaagcctagcttcctgtcgctgctgcgttttcgttgttttcttgtgcgataagtttttgttagtggttaggacattgttatctcgggtttcaggatgaatgactgggattagcaacactacacacaatgatgggcgggcaatacagtagcatcgccagtcatgcaaatgtaggatgcacacaagcagagatgaaggagcgaaagagtcggaaagatattaagagagagagggagagagatagagcgagaaagggcactggtccgttattttcagttttgtgagggcgcgtgtgtgtccgctttttaattcgctttccaacactgacacctcactggaccgattttaaacgcgttggcttttctgtgatttgtgatgctctgaattctgatttcgtttcgctggcaaagtgagaatttgaacgttcctattttgcttcatgtcgattccgtcactgttcaatattttggtttgggcggctggcctgtacctacctgtgaattcatcctcccactctaaacccggattaagattgtattcatcttgaagaaatataaagaaataaatatattgtacaaacattgctggtatttggtagtttgtgattcttcaaatcaaaacgcaaaaaaaaaaaaaaaacatgactttggctttagcataccgcccatttaaatcgacaaatcgatagtcaatgtttaaacaaaatgcatacggtaagaagtgaaaaatgttggtttttagtgtgctcaacacttgttgcttggcgaaattattacacgaatatgtaaaatatgactaaatagggtatatgtataagtactattagcacacaagccaggctcatatgatggaacacaaaaggtagcgaggggaggagaaagtgtttataatacaacttaggatgtttagctaatatatctgatacgcaatcatacaaacgatattaagataaaggctattcgtgcttacaaatgaagattcttttatacgtgtgtatgtttgggttatgcatttgattcttagacagtagcatagacttaaaaatactcttgggaaaataaatcgaattcaaatatttaagtaatagatcggttatgctaaaaagtacaaaaaatctaaattataccattggtatgcatgttttagaagaaccctcaatacttataatgggtcatacataaattaagacaaaaaattacaaaaaaaaaaattatgttaaaactcaacttaaagcgattacgaaaagtacttaaacgaataaagaacttaaaaattgggtggagattacaaatttgtttttcattttccattcaatgaacgattttcacacaaggtctctaagatctgatacgaactgatacgaatcttttttcaggtagttatcgagctaattgaaacaaatgtcatataaatcatataaaatgtaataaatatatgtatatagtcccaattgggatgcaaatcaaaggaccaaatcggaaacaaagatcgaagaagcaactacgagaagctaggacatagggcatatatatattctaggataggattaccatatcaagcgtacactaagcaagtcagaaaaactctaaggagcatagatcgtgttgtggatagatattgagcaaactacacaaatacataatgtgagtatatagagaagttcagcatagagaggtttcaaggtaatggtaatatataggactacgggtatagatacgcttcttacgagtggcacacagaccgctacggaggctgaaaagttctaagtacggaattacgcatacaacgaggactactcaccataataatccgtagcatgagctgcagtttttttttcgtgcgtgccaaaaacagttaagagggaagaaagagaaagtaaatagacaaattattaaatgcgctcgaacggtttacactctaatgatctatgggttcggatgtggacatggatggatgtggatggaaagattgatgctggacagcggtggccatgcggaaatgagtcgagactgcggcgttaatgaagcgaaacaaggccaattggtgtaatgcttagtgctaccaataacctttacaaaaacgcgacaaaaattaaagtaataattataaaaaggcgtgtttaaagaggggataaacatgacacattgcgttgcagtaccatttacaacctatatttttaaaagttcggattgaagtgttcagatagtgtgctgaatattgcatagtatacaaaatagtgacgaatggtttttgaaatcgtgtctgagcttttccagtttcgaacatttataaaataaactaacaaaaacaattgctgggatagatgggctaaattgagagcactgaaggaaccaaaaaccaataatgcggattgaccaaatcaagagaaatctgtcataagatgatcaatcgaccagaaactacgtttcttgggcattgcaaccaaattgggccgaggcaaagcaaaaggaagctgtctaaattcaagcagttaagtagatagtccaccgaattgtctacgcatgtacgatgctgacatccttctgcctgcagagccttacagcaaatttagactaagtcgtgtgggcgcttcacatggagctcttcgtgtattcacatgtgtatgccgcttcgttttgtcacaataactttcgtgtgctgatgtgtgattaggtgtggagtttgcttaaaattaagattagtacctttacgtggacgccaccagtcctccatatatcctgacagaggcgaggagtggcaagaaagaactgtatttgttattttatttcactatggattatggtttctgtttgcatctttgttttttttctctgctgggagggacgggagttgggggcacttgatggggaacaaagcgcggaaacagggtcagcatgcagcggtgtaagctagcaccagacagaaagggagagtttggagcacagacatggacagagagagtgagagggacagatagatacactgctcctccggcggacggtgacggagtctgggaaacagcagggaagccaaacacatttaacaacgagaccaagaataagaacggtaacagtagcgagagatggagtcaaactatggatagtggttacggtagagcccaaccagatccccgccccgggggcaatacgcaccatcgccgtttccgcctccggtactggtcgtctgggtctgctttgtgtagaccagtgtctcttttggtggaatgttcgtagcctgcacattgtagacgcttaggttgaggggctgtttctttccgccgctggtggggggtgcacataagaaattggtattagttaggaatcggttaaatggcaatagcaatagtacaatacattgatcgttaaaacttaatcagtactaagcccattgtctaatctgtgtaatactaatttttaaaacggctaatgctaaaattgaattgtaaaaattgccacgctctctaaccaggattccaattttgactactgatatttttttatgttaagcttgtagatggggaatctgtctctacagttgtttagcaaaaaaaacttagggaatcaaatgtctatacctatatgacctgaatatgtctaatatgccctgcgaacttctgcttaagatggtaattctactcacaaagcttttgctatgaactggcttacctctggccattgacagtggcttggaggctggcgtcgggggtctgtgtgttcgagttgtccgaagtcatcgagttgacggaggagagtgaggaaaggacctcggagacgggggccacgcccagcgatgacagcatttcgtcgagatccctgaaagaggcgaacgaaagttggatgatggcggtgctgagtcagctctgaggagaagcttatggcaaacccacttgcgctgatccttgtcgatgcctgctccgccgccaatgcgaccggccgcctcctccatgtccttgatctccttctcgcgacgccggcgatccttctcctcgcgcagggcggccaacttggccttcttgcgttccagctcagccttgcgatccatttctcggggcgattagctgctgcgatttgctgttcgagtgggcgttcggtacgggactctagatctctggcgggccaagttctctgcaagggggatgcatgattaatggtcgccaatattggtagctttgatgatgtcaccaactgctggccagaagcaaagaaagtgggtgcgctgtgtggttctccaccgctcgcttggcgtggcgcagccaactcatatgttctcctatcgccaagtggagcacatttcccggtaacccagtgagtggccgtcactttactttcctttgctcggccaaaaaaaaaaaatcaataatccagcgattggactgtgacgtcttttcgccctggctgcgtttttcaacttccttctctcactgctcttgtgatttttccatgaaatgcacaaaaacccacctcttgactgtctttactcgttgttcggctgctttttaagtacttaaatcatcatttttcaacaatgtaaaaatgcgactgacttttaatgttttgactaactagagatggaacatcgcccacggccagttacttcgcacagttattggcacacgaaggagataatgggcgcggctggtttacatagatgcccaaagggtgtggaagactaggattcttagcgggattccgaattcttaattaacacaagtttaaacacaagaataagattttactactgtacggcgatagctgtgaacagctgtcgtgacagcgatagttccagtctttccatgcactagcgcagcgatctggcagcactact

SEQ ID NO: 26618 - DNA, 1108 bp, DROSOPHILA
ccgtacagtagtaaaatcttattcttgtgtttaaacttgtgttaattaagaattcggaatcccgctaagaatcctagtcttccacaccctttgggcatctatgtaaaccagccgcgcccattatctccttcgtgtgccaataactgtgcgaagtaactggccgtgggcgatgttccatctctagttagtcaaaacattaaaagtcagtcgcatttttacattgttgaaaaatgatgatttaagtacttaaaaagcagccgaacaacgagtaaagacagtcaagagagagaacttggcccgccagagatctagagtcccgtaccgaacgcccactcgaacagcaaatcgcagcagctaatcgccccgagaaatggatcgcaaggctgagctggaacgcaagaaggccaagttggccgccctgcgcgaggagaaggatcgccggcgtcgcgagaaggagatcaaggacatggaggaggcggccggtcgcattggcggcggagcaggcatcgacaaggatcagcgcaaggatctcgacgaaatgctgtcatcgctgggcgtggcccccgtctccgaggtcctttcctcactctcctccgtcaactcgatgacttcggacaactcgaacacacagacccccgacgccagcctccaagccactgtcaatggccagagcggcggaaagaaacagcccctcaacctaagcgtctacaatgtgcaggctacgaacattccaccaaaagagacactggtctacacaaagcagacccagacgaccagtaccggaggcggaaacggcgatgttctttcttgccactcctcgcctctgtcaggatatatggaggactggtggcgtccacgtaaagctcatgctacggattattatgatgaatacaatcttaatccgggtttagagtgggaggatgaattcacagtgcttgcatttgatgcccaaggagacgacgaagagagctcactgcagaacctgggcaacggattcacctccaagctgccaccgggctatctcacccacggcctgcccaccgttaaggacgtcgccccggccatcacaccactcgagatcaagaaggagactgaagtaagaaggagg

SEQ ID NO: 26619 - protein, 246 aa, DROSOPHILA
MDRKAELERKKAKLAALREEKDRRRREKEIKDMEEAAGRIGGGAGIDKDQRKDLDEMLSSLGVAPVSEVLSSLSSVNSMTSDNSNTQTPDASLQATVNGQSGGKKQPLNLSVYNVQATNIPPKETLVYTKQTQTTSTGGGNGDVLSCHSSPLSGYMEDWWRPRKAHATDYYDEYNLNPGLEWEDEFTVLAFDAQGDDEESSLQNLGNGFTSKLPPGYLTHGLPTVKDVAPAITPLEIKKETEVRRR

SEQ ID NO: 26620 - DNA, 2213 bp, DROSOPHILA
agttaaagaatgccagcgctttagtttagagcttgtcgttttaaaaacgtatcttatataggcaccatgcataaatgggttaccgaatacccgttcacataatgtaatgaacattgtaatggtcatttctgaatcgtctatctttttatgaattagttgatttgatagaccacagaccccactaggaaaatttttctcatatacgcaccatgaattaatgtggtagggtatacccgttcacatcctgtgatggttttctcaaatttttgctatcattatgctgtcggaatgttttgtaatgagcaaacagctgttaagctgttttctagtaattagagcggaaacctttgtttcgccttactaacagtatggcaaccttcgcggtaacttttgtcgacgaacttatccaacccttgctaaatcgaacattttattgccgaccgcaaaatctttcttgtcaaatccaaggtggggtcagaaataaattttttagaaaatacctaagtggcagaatgatcttgtgatgattggaaataaatattaatgaaccacttagtaaactatttttttcctattccctattttttataagctcaatatggtgggtaatggctaggatggttatgaaatataaaacgtatcattatggataccaataactaatgtgtagaatcctagaactccatatgctcacttcaccagtcaagtcatacaaagacagccctcgaaaagcaagaagttgtctagtgtaaacgtgacctcagcggaactttagtacagtagttacaacatatctcaaacgatttcgatttagcaaaatgcaaccctttatatacaaatcgttaaccggaagtaaagtcgttttcctttccttctatctacttgaacaacaacgatcaaaatataggttctgtggattaatatatctgaaattggattaatgtaagtatttctattaaaataatgtattttttcactgtttatatacatttttaaacagatgccacgggaaattaaagaagttaaagattttcttaataaggcacgccgttctgatgcgcgtgctgtaaaaatcaagaaaaatcccactaacaccaaatttaagatccgttgttcgaggttcctttacacccttgtcgtacaggataaagaaaaggctgacaaaattaagcagtctttaccgcctggactacaagtaaaggaggtgaaataaactactaaatgatggcagtgcctcaatatttctactgctaaggaatacattttggttcgcgataaatttgtttctgaataataaaatgaattaattgcacctaacataaatttagtcttgattatattaaaactaaaatttacatacaggaaaaatgtatatataaacaatcacgttcactctatatatgtaaccttgattttaagacgcatatggttttgcctattgtttataaagaatttggatagctttgggtcagcaagtggcacctttaacgcgtacggaaaatcgagttcgcacagtatcaatcagttccacgtctgagcatctcagttttaatgcaaacaaaattttcaattttataggagcactgggattagactactgtattattgagctgtcatagcagtacccgaaacataaatgaaaaatctttcgttttttataatctcatatctcggttttaatttgtagtttcatatctataatctgtagcttatattggaaagtgattgataccgaaaaatctctggttgagttccaggactgatacccgcgctcagttaatgggagagctagtaatgcatttcaacactttcagtggctcgcagcttatttaaaagcgaaacaattttgaacaaaaaccaaatgaaaccttttccgtgccgcagcttatatcgtgcagttcattcatttaaccttttatattttctgtcattctgaaatttaggaaaataaaaatatgaaaacagatttcagaagtgttggggtggcagttttgggtgtttgtgggcgttagagtgagcgtctatgtctatgcttaatctcaacattctagcttttatagttcctgatatcgaggcgttcacacggacaggacagacggatatattaaatattaaaatcacgcatgatagataaccatttatgattttgaatacaagtgtatggaaaacgacaatatttaattctcgtcaatgttagattataacttaacagc

SEQ ID NO: 26621 - DNA, 213 bp, DROSOPHILA
atgccacgggaaattaaagaagttaaagattttcttaataaggcacgccgttctgatgcgcgtgctgtaaaaatcaagaaaaatcccactaacaccaaatttaagatccgttgttcgaggttcctttacacccttgtcgtacaggataaagaaaaggctgacaaaattaagcagtctttaccgcctggactacaagtaaaggaggtgaaataa

SEQ ID NO: 26622 - protein, 70 aa, DROSOPHILA
MPREIKEVKDFLNKARRSDARAVKIKKNPTNTKFKIRCSRFLYTLVVQDKEKADKIKQSLPPGLQVKEVK

SEQ ID NO: 26623 - DNA, 3232 bp, DROSOPHILA
ggattccctggctcccaatcgaggtgtggctggggactctggcggtgtaatggatagggtggtgtcgcagctattggcagaaatggatggaatgagcgatggcgacactagcaagcccatattcattctggccgccaccaatcgcccggatcttattgaccccgctcttttgcgtcctggtcgctttgacaagcttttctacgtgggaccttgttcaactgccgaagacaaggcagccgttttgcgtgcccaaacccagcgattcgctttggacgccggtgtggacatggaacagattgccgagcgtttgaagagcgaaatgagcggcgcagatctgtactccatctgctcgaatgcatggctctccgctgtgaggcgcaccatagacggacacttgagtggaacaatatcagagaaggaactggtgccggagaacgtaattgtgcaggaggaagatttcacgaagtctttcaacaagtttgtgccctcgatcagcgccaaggatctggagtatttcaacaacctaaaggcttcatatagtgtctagagtatgcgcagatggttaactagttctaagagttagttttttacagacatttttcgttgtttttcaataaacccgttgatagttcacaattcccagcgagcttccactcgtttgaaccacttaaggtgggtggagctctcgtatgaaataggaaccagcgtgtggaagtgcgactcgaattactgtggaagacagcaggaggtaggtgattccaattaacctttgcgaagtggcttcttatcatttcggacaatagcttccccccatgtcgagtaggaaaattacgtcttttgatttaaatgatccctgcgctgatctgtacttcataatctcgggctggtgaggcatcccttatctacagtgtgtgcttatcgcgattccccggtttatggatttcgccggacaaaagcgttgatgctggcacctaatcttagtgggttcagtgcgagtctgggaggtgcgtcaagaggtgttgtcaaacattgtatatttccattctcctgttatataacagccatggctttggtttgcgtagaggactttgaaaagaaggccgttgggcaactggagaagaatgccctggactactaccgtagcggagccggtgagcagttcaccttgggactgaatcgcgaggccttccgccggctacgcttgcgacctcgttgtttgagagatgtctcccgcctggacattagtaccaagatcttcggcgagcagatgcagtggcctctgggcattgctccgacggctatgcagaagatggcccatccggacggcgaggtaggcaatgccagggcggccggaaaagccggctccatctttatactcagcacactgtccaccacttcgctggaggatttggcagccggtgccccggataccatcaaatggttccaactgtacatctacaaggatcggtgagttgattatctttatgtatgtaagcaaatacttctttattaaacacataacttcctaaatacagtaccataacggaaaagctggtacgtcgtgccgagaaggcgaacttcaaagcgctcgtcctgaccatcgatgctccaatctttggacaccgtagagccgatgtgcgcaacaacttcagcttgccgtcgcacctgtcattggccaatttccagggcgttaaggctactggagtgggtaatgccgctatgggcgcctcaggcattaatgagtacgtctccagccagtttgatccaaccataacctggaaggatattgcctggttgaagggcatcactcatctgcccattgtggtcaagggagtgctgactgccgaagatgctgtgttggcccaggagtttggatgcgccggactcattgtttccaaccacggtgctcgtcagatcgatacggttccggcctcgatcgaagccctgccggagatcgtaaaggccgtgggagataatctggtggttatgctggacggaggcattatgcagggcaatgatatcttcaaggctttggctttgggagccaagacggtctttgtgggtcgtccggctgtctggggattggcctacaatggacagaaaggcgtggaggagatgctgagtgtgctgagaaaggactttgagaccaccatggcgctgatcggttgccaaaatttgggagacatcacgtcggcaatggtggtacatgagagtcaatatgccaagctgtaaatcaggaacgttttagtgtagatacataaaacttatcaaacttgctttcataaatccaataaacatgtcaataaataaatatataataaatagatagatagatagataaataaacagattccagcaattaaaacctatcatcattcttcagacaaacaatataataggaagattatatttacatgtcagactttttggaaatattcctatttttaagacacaactgttgtgcatattagcttacagattattgttatgctcttttcaaatcaaaggttttctttcacaagagatcattgttttaaatttatataaatttcttaaatggtgaaactcaatttttaaattaatgataacctagaacggtaaatagtcgtccgataacaatgcttgggttgatgatgtgcgaaaaactggcagttatcgcaatgctcccatctctatgaggcatgtacataaaagaaaaaattaacaaaacgcgaataccattaaaatacaatgctagacggttggtactgcagatccctggccaaccaggaggatggcgccataaaggacgagccgccgagcgacgacgagcccgcacagcccgccagagatcgcgtcccgccaatttcccgcggagcagcgcccgctagctcatcctccgtatccgcgggcctgggcgcaggcgagactgacttcaaggagcgctacaagaacctcaagaagaagctgaagttcctcatctatgtaaatatctaaagttgaacttggccaatggcaagtcacagctttttgtgtttacaggagaacgagtacttccaggatctattgcacaccaaccagcggcgtctgctgaaagtttcccgggatcgtaccttcctgctggaccgtctgctggtgtacgagaagccggccaaggactctagcgactcggatgccaccgacagctccgattcggagccagcttctacgtccggcgttgccggcggatcgcaaacatccaaggacgccattc

SEQ ID NO: 26624 - DNA, 1164 bp, DROSOPHILA
ggaggtgcgtcaagaggtgttgtcaaacattgtatatttccattctcctgttatataacagccatggctttggtttgcgtagaggactttgaaaagaaggccgttgggcaactggagaagaatgccctggactactaccgtagcggagccggtgagcagttcaccttgggactgaatcgcgaggccttccgccggctacgcttgcgacctcgttgtttgagagatgtctcccgcctggacattagtaccaagatcttcggcgagcagatgcagtggcctctgggcattgctccgacggctatgcagaagatggcccatccggacggcgaggtaggcaatgccagggcggccggaaaagccggctccatctttatactcagcacactgtccaccacttcgctggaggatttggcagccggtgccccggataccatcaaatggttccaactgtacatctacaaggatcgtaccataacggaaaagctggtacgtcgtgccgagaaggcgaacttcaaagcgctcgtcctgaccatcgatgctccaatctttggacaccgtagagccgatgtgcgcaacaacttcagcttgccgtcgcacctgtcattggccaatttccagggcgttaaggctactggagtgggtaatgccgctatgggcgcctcaggcattaatgagtacgtctccagccagtttgatccaaccataacctggaaggatattgcctggttgaagggcatcactcatctgcccattgtggtcaagggagtgctgactgccgaagatgctgtgttggcccaggagtttggatgcgccggactcattgtttccaaccacggtgctcgtcagatcgatacggttccggcctcgatcgaagccctgccggagatcgtaaaggccgtgggagataatctggtggttatgctggacggaggcattatgcagggcaatgatatcttcaaggctttggctttgggagccaagacggtctttgtgggtcgtccggctgtctggggattggcctacaatggacagaaaggcgtggaggagatgctgagtgtgctgagaaaggactttgagaccaccatggcgctgatcggttgccaaaatttgggagacatcacgtcggcaatggtggtacatgagagtcaatatgccaagctgtaa

SEQ ID NO: 26625 - protein, 366 aa, DROSOPHILA
MALVCVEDFEKKAVGQLEKNALDYYRSGAGEQFTLGLNREAFRRLRLRPRCLRDVSRLDISTKIFGEQMQWPLGIAPTAMQKMAHPDGEVGNARAAGKAGSIFILSTLSTTSLEDLAAGAPDTIKWFQLYIYKDRTITEKLVRRAEKANFKALVLTIDAPIFGHRRADVRNNFSLPSHLSLANFQGVKATGVGNAAMGASGINEYVSSQFDPTITWKDIAWLKGITHLPIVVKGVLTAEDAVLAQEFGCAGLIVSNHGARQIDTVPASIEALPEIVKAVGDNLVVMLDGGIMQGNDIFKALALGAKTVFVGRPAVWGLAYNGQKGVEEMLSVLRKDFETTMALIGCQNLGDITSAMVVHESQYAKL

SEQ ID NO: 26626 - DNA, 3142 bp, DROSOPHILA
ctgtcattggccaatttccagggcgttaaggctactggagtgggtaatgccgctatgggcgcctcaggcattaatgagtacgtctccagccagtttgatccaaccataacctggaaggatattgcctggttgaagggcatcactcatctgcccattgtggtcaagggagtgctgactgccgaagatgctgtgttggcccaggagtttggatgcgccggactcattgtttccaaccacggtgctcgtcagatcgatacggttccggcctcgatcgaagccctgccggagatcgtaaaggccgtgggagataatctggtggttatgctggacggaggcattatgcagggcaatgatatcttcaaggctttggctttgggagccaagacggtctttgtgggtcgtccggctgtctggggattggcctacaatggacagaaaggcgtggaggagatgctgagtgtgctgagaaaggactttgagaccaccatggcgctgatcggttgccaaaatttgggagacatcacgtcggcaatggtggtacatgagagtcaatatgccaagctgtaaatcaggaacgttttagtgtagatacataaaacttatcaaacttgctttcataaatccaataaacatgtcaataaataaatatataataaatagatagatagatagataaataaacagattccagcaattaaaacctatcatcattcttcagacaaacaatataataggaagattatatttacatgtcagactttttggaaatattcctatttttaagacacaactgttgtgcatattagcttacagattattgttatgctcttttcaaatcaaaggttttctttcacaagagatcattgttttaaatttatataaatttcttaaatggtgaaactcaatttttaaattaatgataacctagaacggtaaatagtcgtccgataacaatgcttgggttgatgatgtgcgaaaaactggcagttatcgcaatgctcccatctctatgaggcatgtacataaaagaaaaaattaacaaaacgcgaataccattaaaatacaatgctagacggttggtactgcagatccctggccaaccaggaggatggcgccataaaggacgagccgccgagcgacgacgagcccgcacagcccgccagagatcgcgtcccgccaatttcccgcggagcagcgcccgctagctcatcctccgtatccgcgggcctgggcgcaggcgagactgacttcaaggagcgctacaagaacctcaagaagaagctgaagttcctcatctatgtaaatatctaaagttgaacttggccaatggcaagtcacagctttttgtgtttacaggagaacgagtacttccaggatctattgcacaccaaccagcggcgtctgctgaaagtttcccgggatcgtaccttcctgctggaccgtctgctggtgtacgagaagccggccaaggactctagcgactcggatgccaccgacagctccgattcggagccagcttctacgtccggcgttgccggcggatcgcaaacatccaaggacgccattcggcgcaagcacaaagacaagggggcaccaggaattccaggtgtgcctccgcacatgcccacagtgggcgccccacgaggtcgaagacgaaaaatcctaaccggaatgttgcccgcgaaccatggaatcccagcaattgctgcgaaaaaacaacttaccgccacggtgtcaccttcgcagcagccaccgcaactacagactgctccgaaggatgtgtcgcccggcctcagccaagcggagattgcccgccagctgcaggagcgacgaccgacgccgttggagctattgagtccggaatgcacttcggccaccgtgcccacaacgatgctcagcgatgaaagcccctctaagtggtaataagttgtgcaattcccacgttgcagcaccaatctaataatcgtgttctcttagttatcccaatgaaagcctgcagcatctgatggaggacgactctcactcgcacgaggtggccgccgaggagtgcgtgcccatggagtacacaagttaatattctttactgagctaaatatgaaaatacgaaaataaattaactagatccagctggattgatatattatttagtttgtttttaaataactttcttggggctcctctacaagattgaaatttactaacatgtttattctttaaataatcgaaaagggcttacaaggaaattaaatggaaataaaatcattgtaaacattttaagcctttttactcccgataaaaaaaaaacaataaacatatataactttaatttatagctttaatttccctgatcagttggcaaactttaaaagcttaagaagcgagtagttgaaataaattaaagttaactaaaattcctacaaatgattgcaaaaattaaaatttttgttcgtatccctgcgttaatctgaaaattcgttggcgcgaaagtgcctgcttaccgatagacgctgtatatcgagtgaatgcgcagtcctggtcatcggtaattgttagccagccctgccgagcaaaacaccaatgcagaacaaccctgcctttgtaatttatttcgacgcgacgcgagtggagaaaaacaatcaaattaaattctctaagacgtgataaattctggcgctttaccagctaaacgcttcgaacggaccgcagccgatacgggtgccacccgatgagcagctcgtgaacgatggcgctgaacaaaaggaagagcccttactcggacccaatttcgggcgccgaagtggactacaagttgtcatgtcgctgctgcttgaagacgaacgtggagtacgtcaaactggactcggtgtcggtggcgcgcagtctggacccggcggacgccactgagaagataccgctccttcgttgcctgctgttctgcgtgagcgccgataatgcgccggagctgccgcaacacatatgcctcgagtgcagcaagagcctgcaggtggcctactacttccttcagaatgcgctgcgtgcccacgagatcctgtgccggaaactatgtcccaaggtttcaaagagactgaatggcactttggctcaggagcaggaaaagccagcgtgtgcagaggtatgtttg

SEQ ID NO: 26627 - DNA, 1027 bp, DROSOPHILA
cccatctctatgaggcatgtacataaaagaaaaaattaacaaaacgcgaataccattaaaatacaatgctagacggttggtactgcagatccctggccaaccaggaggatggcgccataaaggacgagccgccgagcgacgacgagcccgcacagcccgccagagatcgcgtcccgccaatttcccgcggagcagcgcccgctagctcatcctccgtatccgcgggcctgggcgcaggcgagactgacttcaaggagcgctacaagaacctcaagaagaagctgaagttcctcatctatgagaacgagtacttccaggatctattgcacaccaaccagcggcgtctgctgaaagtttcccgggatcgtaccttcctgctggaccgtctgctggtgtacgagaagccggccaaggactctagcgactcggatgccaccgacagctccgattcggagccagcttctacgtccggcgttgccggcggatcgcaaacatccaaggacgccattcggcgcaagcacaaagacaagggggcaccaggaattccaggtgtgcctccgcacatgcccacagtgggcgccccacgaggtcgaagacgaaaaatcctaaccggaatgttgcccgcgaaccatggaatcccagcaattgctgcgaaaaaacaacttaccgccacggtgtcaccttcgcagcagccaccgcaactacagactgctccgaaggatgtgtcgcccggcctcagccaagcggagattgcccgccagctgcaggagcgacgaccgacgccgttggagctattgagtccggaatgcacttcggccaccgtgcccacaacgatgctcagcgatgaaagcccctctaagtgttatcccaatgaaagcctgcagcatctgatggaggacgactctcactcgcacgaggtggccgccgaggagtgcgtgcccatggagtacacaagttaatattctttactgagctaaatatgaaaatacgaaaataaattaactagatccagctggattgatatatt

SEQ ID NO: 26628 - protein, 297 aa, DROSOPHILA
MLDGWYCRSLANQEDGAIKDEPPSDDEPAQPARDRVPPISRGAAPASSSSVSAGLGAGETDFKERYKNLKKKLKFLIYENEYFQDLLHTNQRRLLKVSRDRTFLLDRLLVYEKPAKDSSDSDATDSSDSEPASTSGVAGGSQTSKDAIRRKHKDKGAPGIPGVPPHMPTVGAPRGRRRKILTGMLPANHGIPAIAAKKQLTATVSPSQQPPQLQTAPKDVSPGLSQAEIARQLQERRPTPLELLSPECTSATVPTTMLSDESPSKCYPNESLQHLMEDDSHSHEVAAEECVPMEYTS

SEQ ID NO: 26629 - DNA, 7198 bp, DROSOPHILA
catattgcttatgggaccgcgaggtcctcctggtcccattggccccatggggggaccgcattgtccgggtccaggcccaaaattgcctccaaagcccatgttcatcagctgcataggaagtggaggcggtcgattcatcggaggatagttcctgtcctggtagctttgcggacctccgcctccatgaaaggcattgttgctattcgaagaccaatgtttacgtccgttgccgttgttgttattgttgttgttgttactattgttattgttgctccgttgtagtccgcttttggtatccggtttcagtgcatccttgcatttcttccaatctgcaaacgacattttcagcggcttagtttcaggctcatctttgccggactccggaacgacttccttggaatcctctggtgccgcctccacgtccccgttttcagacatctcgcaccttagagagtgggaatacactttataaatatatcaacttaattttatttgagttttgcttagcgatggcaaacaaaaatttcaataacaacaaattgaaggaacagccgatgttttctatcgatattttcgtgcttaaaattttagggagtttcccctgaagtattttcttaagagtcctgttgttcttaaaaaagaacagtagtttccaaatgtattctctaaactttccgctataccagtaaatcttcatttgttaactagtaagcgatatattaatgcccaacgtaatataatatatatttaacattttcgatcccatgcagacacaaccggcggggaatagtaattgcccagcgtccagataccatagtgaattgttggttatcagcgataagtgtctgatttcgtaacatttatttcatatttaaatttaaattttaatacgaacacatctgtgatgcgaaattgatgtgagctttttgactgcgctttacgtgaactggtctggatagctgtggcgcatctctaaaatctaacgtgttcgatcaggtggcaacacccaccgtaaaaaacgattttagtcgcagtcgcagagattttggttttggtaagctctagtaatttattggaaattacgatccaaaatacaccgttttaagagacgtttcaatcggccattaaagtaaataataagcgcgacgaagactaaacatcaaaagtgttgaaactagaacgagagtgcaaagtcggtcgccagcaaaacgcgtagtttgcttattttaacgaaaagcggccagtgccattaaaatattactcaatttcacagagaattttggccgaaaacggatgcaatatatggatatatagaccctgtttcctgaaagttaacttcctttttgttctacgcccaacacggtcgtcaactgcgctgccatcgtcgacgtcggcagaggccattcttgttgttgctattctcgacatatgattcaatagagcgatcgcctctctctttctccctcccacggacaatttcagttttttgtaatatttctgttagctgtgttttagttgcccatgtttgtttgttcttgttgttgttgctgctgctgctgttgctgcagcggcagtaagtgatatttaaaaaagaaatgagttgttcgcatggagcgaaagtcgaactgaaataacacaaatggtcgtccgtttgtcgttcccattcgatatatgccaacaattttcatcaattatttacatattttgcttttggaacttcgcaccgattaactgagcagaagccagaagctcagaaggcgccaatgggttaatttggccactaaactatagataaatcgcggtgttatcagctaaagccgcttatcaaacgtgcacatcgttaagatatacgagagctttgcgtcgcaatattcgagattcggtcggaaacgaggccaatctccatatcctaagaaaccttttggttgtccatgctctcggccattactcccaagttctaatgcaatatagtcggctttgatcatcctagcagctgaaagcatgtatccaaatagtacaatagttttaatgtaaacaatacatttgatcgataactaacctttcttgtgtttacagggggaggtgcggaaacagcttctacgattcatttttgatcaattcttcaacaacatttaaacgaacgaataagttagcagaccatatagactgaaatcagcagatccggacaccaggcgggacaaccttaagacttcttcacgagacgatatcgaatccaacgaatcccgagaatggctcacacacacctgggacgcgccgtgaaaaacattgaggcgccacgcccgttgaagacacaatcgcgatcgtcgttgaagaacagctacctggtgatcgaggagctaatccagttgatagacaacgtgaccgtcggtcttcagtcgtgcaacaccacgccggaatcgatcacgctgctcctgcacaacctccgggtgcatggaccgcaactggaggcggtgtccaaggatacactggaccgggccttcgtcgttttccgcaacgcttcgcaggacgaacggctgaatataacgacgcgcctcaagctgctcgaactcatcgagctgcgcgccaagagctgggacaatgacgacacaatcgcgtactacaagtccaagcagcagatctccaacgtggaggtgagtagagtacatagaatcgatctcactttggaaaacgatcaaatatgtatcgttgctttgcagctgccttcggaataccagtacgatgccggcgtgcagcctggcgccttcagcacctcccccacattcggcgtcagcggcggtgttggtggcgttaacgatggagccgcagccgccgctgccgccgtcttcaatgcagcatctgcagctgcagccgcccaagctgcggccattgcggccgtgggcacatccaaccagcagcacatgctgctgccgcccggtgaggtcattcgtaattcgggcaagttccccaaaccgaccaagattcctggcaagacgtactgcaaggacgaggtcgtgattcgcaatgctgactccggcaaaggtaagtttttcaatcagctgaggagtgttctggagcacacagatctacagaaatggttttcaataatgtattcctccattcccgtggccaaaaagtaatgggcatcaaggggcgtcgcgtgcacatgatcgaggagctaagcgaaaccattatatcgtttcaaagaggtaactccagagagctggttttaattgtgatcctcaccgcacccccatttcatttggcacgcttatttaaatcaattaatgcccggtggcttctacaaaatttactaatagaaattataaatacgcatgttccagattttgtccattcaacgacaccacattaagccaaaattgatcgttaaaggcattttgaaatcacatattttcatactgtatatatgcattttgtttttaaatgttttcgcatcccaattatttttcataaatataaatgcttttttcgagaacaattatgaatgccttgttttcattagtcaacccgggtgccaaggagcgtttggtgcagattactggtccagctgaggataaaattaagtgagtaaagtaaataaattaaagctaatttacctttatgtcaaaatgttttaattctacgacagctatgccaaacaacttatggaggacaccattcgtcggaacgcctcgccggtgcgcctggaacccgctcctgccgttggaggatcctgctcctcgcttaactcgtccaactcggacgacgccattgtgcaaccaagaacgccaaccggaagcagtttggccaaccggctaagctttaactcggcccaaaacttcatgaccgccacagctgctgcacagcagatctcgcagcagatgcaccaccaaacgcatcacctgcagcaccaacagcagcagcaggtcgccgcagtagccgccgcagcagcagcggcggcacatgctcaggcgacagccgctgccggtaaagtcttgcgtcccaatcaacagctgctaatgcactcatattccacaaacgatgcttccgtaggtgaatacaagttcacggtcaacgtgggccagcacctgatcaagatcaccggcgactgctgcgaactagtgcgcgtgagtaatgttgaagttttcaattgtgaaatttgttaaatcccctgcgatttcaaggtggccaaactcgtgctcgatgactattttagcagctcggagtttctggcatccattgaggctggcgccgccttcgacggcacttcgctggtgaccacgccatcgactccgcttcccggagccgggccgccgcaattttggctgcccggcacggacagtggcattggactgaattgcgttgtttcctcgtcagcgaacaacaatggtgaaggcgacgacgaggtgttcgctgagcccagcaatggaggatcatcgactagcaatcagaatggactggccagatcgcgtcgcagccacttttcgcgcaaggagtccacgccggagaccaagggcgctcgggaaaagggtgacttggacgatttggcaggcaccaattccttgaaaagcaatgcatgtaagattacaatccttttatgcttaaccaagtctttgatgcttaaacttaaattacagctcgcgtttcttacgatattgaacacttgctctactactccatgagtccgcactcgtggaccctgcccaccgactggcaaaagatgcaggagacagcgccctcgattctgcgcaacaaggtaatttcgccgttcgatggctcacttggccgtacggcttactcttcgaacatccccgatgctatcatcgccagtgcacctaactcatcagtaataacacatccgtgggctttaaatgcaataacctcctccccgaacacaaatatcatcagcaccgccgttggactagctgctgtcgatgcgtcggcagacaacaatcccctaaccgtcactaacaagcaatcaaaagggatcttcgccgaacgcgagaaccgtcgccttcccaaaacatcggccgtgtccgatcgaaacctgtataacaagcaattgcaaatcataactaatactgtgggtcaatcggtggcaacacaaggaaagcatcgccagtctagctatcaaacatcacaagtgaaggcaatttttcaacgctactgcgaggacgatgagttttcattggcactgtgcgaaacagaatcgaataataaccgcgtttatgtgtaatttcatttaatttcatttaatttaatttaattttacgtagccggaatacgtattattgaatctcagtcacagataggcttttcttttcatgtcagtatttttgctgttttaattttatataacttatcattaagaaaaggtgaagcgtgaagaacttgataatgaatcaagtcaatacatcattatcattatcatcatccagtcattagattaacgacataccatcgaaaccaaaccgatcgctagtcttagaggtaacaatacatataatgcattgaaattaaaatgtaactatagggagaatctgtgttttggctgtgaaacagattaagtcgtcgctaaggataagctggaaaggcggttgaaaccgcttaaccgctaacaaacaaacattctcgaattcaaaccaacatttacaaatctgtaatcaatacgatttatattaactaataaacaggactttcaaagtccgtaacaaagcttggctgggtttaacttacaccaccacacaccccacacattgtaaattataaattgtaacttgtgttttaccaccgaagcatcataacatcaccacctaaccaccactccagatggctaacttagttactaaactgttccgtatgtatatatgttcgttcatccctggatagcttgcgtgtcaatgttactttgaaatcagatattaaaccatttctttgttcgacaacaggatctgcaggatgagagccagcgcttcgatggtgataagtatctggccagcattaagacggccgccaagcgagacattgtggctgccgatgaggtcgagactctggacgaataaagccatcaatcgagcggctcgaactgacaatatagagtgtcccggggtgaagtgcctgctcccagacggagctgcagtatgcttcaatgcttttggccatggccacatctaacaatcgcaaactcaaaacgaccaaaacaaaacaaacaaaaaaaaaagaatattgaaaaatatgcaaactaaccctagaaattaccaacgaaataatcaaaaatttcaaaataactagaaaattcaacgaagctcttagttaagttcaatcgaaatgggaatccggaatattcccaatatatactaattcaaaaaatgcagctaaatgaaaagcctcgaagcggccctaacttgataatatggcccaaatgaaatggaatgcatttttagtaactcaatagagaatgacacgtttttagttggaaatttgtttctcatccttacgcaaactttgtttctcccaaccaaataattctcaaaacggaaatggaaatgtattaattcatctatgtgttttattattattattttgtaattctcttgtgacttgcgctgaatgtcacttttcaagatttgaaattgtattttgttttctctagtctatgcatcatagaaatttgtatactattttgttaaattcacaccaaattctttgaatttctgtttatgctttagttaatttattttatttattttgtacaaatacaaatcatatattcttcaaaaagatatttgcaaggaaataaaatggaatcaagatcaaaacacaccttctttcgcccaaaactccaaatctttggttatttaatttggttaatgtacatttacataaatttatttatcacacacaatggaacataaatataacaatagtttaaagtttgatatgtatcatcatagaacgttggctaggaggagtaaaatagatcgaatgaccacgtcgattgtgcggctagcagaatgtgctccgagttgcataacaagtcaagtgtagtggaaatggcattagcatcgcaattggttattggttagtaacaaacagaatcgatctattgcacatagttgcccaataaaggccgcctgttcatgtggcggcactgcatcgcgcttttggcatgtacacaaagcaaatatacatttagaaaaag

SEQ ID NO: 26630 - DNA, 2328 bp, DROSOPHILA
caacacccaccgtaaaaaacgattttagtcgcagtcgcagagattttggttttgggggaggtgcggaaacagcttctacgattcatttttgatcaattcttcaacaacatttaaacgaacgaataagttagcagaccatatagactgaaatcagcagatccggacaccaggcgggacaaccttaagacttcttcacgagacgatatcgaatccaacgaatcccgagaatggctcacacacacctgggacgcgccgtgaaaaacattgaggcgccacgcccgttgaagacacaatcgcgatcgtcgttgaagaacagctacctggtgatcgaggagctaatccagttgatagacaacgtgaccgtcggtcttcagtcgtgcaacaccacgccggaatcgatcacgctgctcctgcacaacctccgggtgcatggaccgcaactggaggcggtgtccaaggatacactggaccgggccttcgtcgttttccgcaacgcttcgcaggacgaacggctgaatataacgacgcgcctcaagctgctcgaactcatcgagctgcgcgccaagagctgggacaatgacgacacaatcgcgtactacaagtccaagcagcagatctccaacgtggagctgccttcggaataccagtacgatgccggcgtgcagcctggcgccttcagcacctcccccacattcggcgtcagcggcggtgttggtggcgttaacgatggagccgcagccgccgctgccgccgtcttcaatgcagcatctgcagctgcagccgcccaagctgcggccattgcggccgtgggcacatccaaccagcagcacatgctgctgccgcccggtgaggtcattcgtaattcgggcaagttccccaaaccgaccaagattcctggcaagacgtactgcaaggacgaggtcgtgattcgcaatgctgactccggcaaagtaatgggcatcaaggggcgtcgcgtgcacatgatcgaggagctaagcgaaaccattatatcgtttcaaagagtcaacccgggtgccaaggagcgtttggtgcagattactggtccagctgaggataaaattaactatgccaaacaacttatggaggacaccattcgtcggaacgcctcgccggtgcgcctggaacccgctcctgccgttggaggatcctgctcctcgcttaactcgtccaactcggacgacgccattgtgcaaccaagaacgccaaccggaagcagtttggccaaccggctaagctttaactcggcccaaaacttcatgaccgccacagctgctgcacagcagatctcgcagcagatgcaccaccaaacgcatcacctgcagcaccaacagcagcagcaggtcgccgcagtagccgccgcagcagcagcggcggcacatgctcaggcgacagccgctgccggtaaagtcttgcgtcccaatcaacagctgctaatgcactcatattccacaaacgatgcttccgtaggtgaatacaagttcacggtcaacgtgggccagcacctgatcaagatcaccggcgactgctgcgaactagtgcgcgtggccaaactcgtgctcgatgactattttagcagctcggagtttctggcatccattgaggctggcgccgccttcgacggcacttcgctggtgaccacgccatcgactccgcttcccggagccgggccgccgcaattttggctgcccggcacggacagtggcattggactgaattgcgttgtttcctcgtcagcgaacaacaatggtgaaggcgacgacgaggtgttcgctgagcccagcaatggaggatcatcgactagcaatcagaatggactggccagatcgcgtcgcagccacttttcgcgcaaggagtccacgccggagaccaagggcgctcgggaaaagggtgacttggacgatttggcaggcaccaattccttgaaaagcaatgcatctcgcgtttcttacgatattgaacacttgctctactactccatgagtccgcactcgtggaccctgcccaccgactggcaaaagatgcaggagacagcgccctcgattctgcgcaacaaggatctgcaggatgagagccagcgcttcgatggtgataagtatctggccagcattaagacggccgccaagcgagacattgtggctgccgatgaggtcgagactctggacgaataaagccatcaatcgagcggctcgaactgacaatatagagtgtcccggggtgaagtgcctgctcccagacggagctgcagtatgcttcaatgcttttggccatggccacatctaacaatcgcaaactcaaaacgaccaaaac

SEQ ID NO: 26631 - protein, 653 aa, DROSOPHILA; identical to SEQ ID NO: 5394

SEQ ID NO: 26632 - DNA, 4029 bp, DROSOPHILA
ttaatattataatcgcattcaaacgcatttcgtttcgtttgttatgcgcccacacgcagcacttatgtatagcatttattatgtaggacttatagcgaaaacaaaaaaaatttcctatgaatatacaagaaattaatcagttgttcttcagataattgataactatcctagtgggcttttctctggccccacctcctctccacggatttttacttgagaattgtagtttgcttggccagaactgaattggagttcagcttcaaaaaaaaatttaaaataagataggaagctgcgagatccgatccgcctgggcaccttgctcgtatcgtcctcttcctgtcctggtgattagttctacatgtgtgttctcttactttcaccacaattgattgcaattgcgatgattgatggtgactcatccaggctatccacagatttcggttatatacgtaaaacgctgtcgcatacgtattttctttaagtctaaacttatgtttaccgtgtggtaagctcccttgcttaccatctagatgttattgaggtttctgggatacttcgggatcgaaatcatctattcgctatctctgcttgtttgtttctggtgtgctcgcttaacttacaaagtagtttaaacgtaaatctgcaagaaaatgtgcgcagttttgaaaactattcaacgattcaacaacgactcacttaccttatattttaaatatttggctcttgattttgttgttgctgcggtgttttgtttgttgtttgttgttgttgcttcgctgtgggtgcttttcgcttcggtgtccaggctttctcgagtttagtttaaatgcggcaagcacacgaaaataaatgtgatgaaaaatgacttgaacgaataaccaacaaattcgaaaagaagctcgtggctatttgtgagtgtggcgtgtttagtgttgtagtgtttcatcatcgatttgaaccattttagttgaaatttttttttggcacgggcagcgctagcttagaagggcatatccaattcgttgttctcctcctcctcgatcaagtcatcaacatcgaattcgctgggcgagaagctggtctgttgctgctgcggttgcagctgttgctgctgctgctgcatttggatacgttgcggctgctgcacgattatgctgttgcgtgtgcatgttgtcaccttggcgcctaacatacgtgcattggccaacgcggccgtcttgagaggattacgcagatgtgtcgcctgggaggctaacgaagatgtggcggctgatgctgtggacgatgcggcgttaattgtgcccgtggtaccgggatcattgtaacgtggacgcttattctgcagcttggttgcccagcattcggtggcccggcgacgggcattggcacagatattatccccggatgaggacgatgaggaggaggtggagggagctgctgccgccgatgaggtggaggccggattggccttctccccattaaacattatatggcggcgctcttcctgggtttgcttcatcatctggtgatagttgaccatctgtttcagacgaggcatactatcaactgtgctggacaagatggtcgcgggtgctgatgtttggtcattcgacgatgatttagagtgcgccgctgttgtattaacaaagatattatcaagggaagcagtcttgttatcggccaagacatttttctccagttcgtggggatcaccgccggcttgcagacgctgcttttgacgcagatgctgcagctcctccgccgaacgttgcttgcggaaatcaaagaccagcgggtatatgtgctggatagccgattcaacgtggtttacgctagccgctaaataaatatgacgaaaattagaattagaattagttttagtacagtttgaggataacaacagtactcaccggtgactgttacgctgccggtggagaagatcttcagggtggcctttggatcgggatcgcgcatcttgtaagtcactccaggatgcagctcgggctcgtagctggcgttctcgcgatggcgctccgaaaagttgacgatcttgatggcccacggcatgctgcaggtgcccagtacgttgacaatgcgaaagttgaggaaacgagtgggaaatcccagcttgccaaggcatctggcatagcggcgtgcagcgaccttggcctaaaaagatcatcaactattgagataacaaaaatgtataatttaatgctaaatcataccattgactcggaagtggcaccagtgcaggtaatcctccccgacgaccaaatcgaggcagtggtgtatggatggcggagcttcattgtcaccattccgttctcgcgacggtactccacatttgatccctgcagcgcaatttcgcgcagcttcaggtgacagccgacgctaaacgagcagaccacattgtttatcacaatgtccagctcgtgctcattatcagcaattggctggtgaaggtcaatgggtttggcattattgctgctctcttcttcgtcttcagcgacttcctttttctcctcgtcatcgtcatcaatcacagttatcgactgcatgacctcctcctccaatagatccattttggctgtgatcagaccattgccattgctggcgacggtcggcagattagccttattttcgctgctagtaaggaacatatttttactgccggttgccagaacaatggtatccccgttggcaagtttcctttgcaaactgggtccgccggccgtttgcattttgctgaattgcgaaaaatagcgaacggtaccggctgttgaggctgtgccagatgaaccaccgacgacttgtccgctcattcttccggtggacgccactcccgccatttggcgattggtcatgaatgtggaggagggcgttaggtatacacgtggggcattggccagcaccgccgaggatacgacgccgccggaggtcactacaccaactccggaaccgctgctggccgctttaaggccgccgttcaaattggccaccggtatgctgaccatatcgttttgcatcagcttgtgctttcgattccccttcaacgagcgctgactggccttctccagctgcttaatcttgatcagataatgctcgcgctgcaaacgcaactgacgtttacagtcctccctatattccttcaagaatcgttcgtattccaagcgctgtttctcctttttctggcgcaatttacgttcgcgttttacgcgattttgctgacgacgatgctgctccttctgttggcgcaatttttctaggacaaactgtttctgttgctcaaagaggtggcgctttcgctctcgctgctcctccagttctttcttctgttgcaactgtcgtagctgtaggaagactttatcctgttgcaactgtcgctcctgtggcaagtgtttctcctgttgcaattgtttctcctgttgcaagagtttctcctgttgcaagagtttctcctgttgcaagagtttctgctgttgcaagagtttctcctgttgcaagagtttctgctgttgcaagagtttctgctgttgcaaccgtttctcctgttgcaaccgtttctcctgttgcaaccgtttctcctgttgcaaccgtttctcctgttgcaaccgtttctcctgttgcaagagtttctcctgttgcaaaagtttctcctgttgcaaccgtttctcctgttgctcttgtggaaagaatttctgcaaaagtagtttcagatactcatatagcaacagttgctcctttgaaaagaatttctcctggtgccagaataccaccagttgcaacttttgatatttttttaaatgtttctgttgctgcttcagttgcaggtcctgttctggttggccttcctcatcaatactgctgtatacgtcttccagtttgtaagctccaaataccttatagagctgtatgctaaggtccaaactagatttatcatcccctaaaggatttgttacgaatttcaagaacttcctttcctttgagaagataaatggtttataatcctcctcagaatcacaaatg

SEQ ID NO: 26633 - DNA, 1899 bp, DROSOPHILA
atgcaaaacgatatggtcagcataccggtggccaatttgaacggcggccttaaagcggccagcagcggttccggagttggtgtagtgacctccggcggcgtcgtatcctcggcggtgctggccaatgccccacgtgtatacctaacgccctcctccacattcatgaccaatcgccaaatggcgggagtggcgtccaccggaagaatgagcggacaagtcgtcggtggttcatctggcacagcctcaacagccggtaccgttcgctatttttcgcaattcagcaaaatgcaaacggccggcggacccagtttgcaaaggaaacttgccaacggggataccattgttctggcaaccggcagtaaaaatatgttccttactagcagcgaaaataaggctaatctgccgaccgtcgccagcaatggcaatggtctgatcacagccaaaatggatctattggaggaggaggtcatgcagtcgataactgtgattgatgacgatgacgaggagaaaaaggaagtcgctgaagacgaagaagagagcagcaataatgccaaacccattgaccttcaccagccaattgctgataatgagcacgagctggacattgtgataaacaatgtggtctgctcgtttagcgtcggctgtcacctgaagctgcgcgaaattgcgctgcagggatcaaatgtggagtaccgtcgcgagaacggaatggtgacaatgaagctccgccatccatacaccactgcctcgatttggtcgtcggggaggattacctgcactggtgccacttccgagtcaatggccaaggtcgctgcacgccgctatgccagatgccttggcaagctgggatttcccactcgtttcctcaactttcgcattgtcaacgtactgggcacctgcagcatgccgtgggccatcaagatcgtcaacttttcggagcgccatcgcgagaacgccagctacgagcccgagctgcatcctggagtgacttacaagatgcgcgatcccgatccaaaggccaccctgaagatcttctccaccggcagcgtaacagtcaccgcggctagcgtaaaccacgttgaatcggctatccagcacatatacccgctggtctttgatttccgcaagcaacgttcggcggaggagctgcagcatctgcgtcaaaagcagcgtctgcaagccggcggtgatccccacgaactggagaaaaatgtcttggccgataacaagactgcttcccttgataatatctttgttaatacaacagcggcgcactctaaatcatcgtcgaatgaccaaacatcagcacccgcgaccatcttgtccagcacagttgatagtatgcctcgtctgaaacagatggtcaactatcaccagatgatgaagcaaacccaggaagagcgccgccatataatgtttaatggggagaaggccaatccggcctccacctcatcggcggcagcagctccctccacctcctcctcatcgtcctcatccggggataatatctgtgccaatgcccgtcgccgggccaccgaatgctgggcaaccaagctgcagaataagcgtccacgttacaatgatcccggtaccacgggcacaattaacgccgcatcgtccacagcatcagccgccacatcttcgttagcctcccaggcgacacatctgcgtaatcctctcaagacggccgcgttggccaatgcacgtatgttaggcgccaaggtgacaacatgcacacgcaacagcataatcgtgcagcagccgcaacgtatccaaatgcagcagcagcagcaacagctgcaaccgcagcagcaacagaccagcttctcgcccagcgaattcgatgttgatgacttgatcgaggaggaggagaacaacgaattggatatgcccttctaa

SEQ ID NO: 26634 - protein, 632 aa, DROSOPHILA
MQNDMVSIPVANLNGGLKAASSGSGVGVVTSGGVVSSAVLANAPRVYLTPSSTFMTNRQMAGVASTGRMSGQVVGGSSGTASTAGTVRYFSQFSKMQTAGGPSLQRKLANGDTIVLATGSKNMFLTSSENKANLPTVASNGNGLITAKMDLLEEEVMQSITVIDDDDEEKKEVAEDEEESSNNAKPIDLHQPIADNEHELDIVINNVVCSFSVGCHLKLREIALQGSNVEYRRENGMVTMKLRHPYTTASIWSSGRITCTGATSESMAKVAARRYARCLGKLGFPTRFLNFRIVNVLGTCSMPWAIKIVNFSERHRENASYEPELHPGVTYKMRDPDPKATLKIFSTGSVTVTAASVNHVESAIQHIYPLVFDFRKQRSAEELQHLRQKQRLQAGGDPHELEKNVLADNKTASLDNIFVNTTAAHSKSSSNDQTSAPATILSSTVDSMPRLKQMVNYHQMMKQTQEERRHIMFNGEKANPASTSSAAAAPSTSSSSSSSGDNICANARRRATECWATKLQNKRPRYNDPGTTGTINAASSTASAATSSLASQATHLRNPLKTAALANARMLGAKVTTCTRNSIIVQQPQRIQMQQQQQQLQPQQQQTSFSPSEFDVDDLIEEEENNELDMPF

SEQ ID NO: 26635 - DNA, 3528 bp, DROSOPHILA
gttccagttcacgtaagactctgtgcagttctgaaaggagaggaaataatgttatgatcaaacgttctgtgaccaaacgcaggacaactcacttcctggtcgcacatgtagtaaacacatatttctagcctgcgatgtgttgagtccgatcgaagttgttgatagttgcgcaggtgatggcgataaagtttcatatgtgggaattctttgccgcagggctgacacaaaaacactccatctttatgtaccccggaatcgcgatgggcttgaagacagtccttttccttgaagtacgaggaacagtactcgcacacataagcatcccgtaggagttccacgtctatcttcgagccaaaacaggctgtcttcacggaatttacatgggctaggagggtttcgcggctatcacttaatagaccgcaggtgctgcacacgtgcacatctttttcgatgatcagatgcttcttcatgtgaatattgtaagtagcttcggtggcaaattcccgggaacaaagttcacagcttattacactgccgtgcatggctctctgaaagaaggatttcaattacttcctgtaccacaaagcgtattcgaaggatttgatgtttagattcatgccctaccatgtgtccatttagccggccccgcgactcaaagttggccatacattcgctgcaagagtaggtcgtgctgctaacattggcatgcgacttattgtgctccataaaaacggaggggtcccggaaagtgcggtcgcaactaggggataaataattaatataaatgtcttaacaagcatttgtaatactaacaggtcgcagaataaggtgcccactggctcatgagaataatttaaatgctgaaaaagttcatctatgttcgtggtggcatagtcacagacgaagcaagctcttggtctgtgcttttctaagtgaaactggctgtggaaattaaaactgtaaagaaatataagtattattagtattggtttggttaactttagagagaataaacataccgcttccaggaaggaaactccagcgaacacatttcacaataagagcgaaaacctcgcttcttttttattacatgcgcgcaagaatgcttgttgtactgcagaatgttggagaacgtcaatttacattccggacagctgccgtagatcggaattctaggtaatacaagcatcatatatattacacaaatatttcctttagtaaatataattactcagccactggcgcgtgcaacaaaacaagatgcatggctaggaatttgcgacctttcaactccttgttgcatccttcgatgggacactcgtagacatctctccggcttttgtgtgcctttgacaagtgactaaaaaggctctcgaatgtgggacatttcagagagcagtgcttgcacacagtgcaccactgaaatgtcagcttttcaaagctcgtcttcaccacggtggccaagtactccggaatattatcaacttcatcctctgtaaatgtaaagatatgtagaattgtgattgccttttagtttttgatattatacccactctctttgatgtccacaaagttaaacagaacaacattgctagtctctccctcgtcgatgtcatcatcgctttgactttcctcagcttgagctaccaatctagacgaacaacttatgggttttaccttaacattgtccaaatttggatccataacatctagaacaatttaagtgttacttaatggacggaaaaggtaaaattaaaacaaaccctcatgctcgtatatgtaaacattctcatccggattggtgtctgtcacagcctcgctgtttaggatgactatttggccaggggcttctgtttcctctgtgacctggacagcttcactggactcctctttcactgcggtctcatcctcaacaacagcttcctcttcgtccagaatattttgtataagcacactaaaatgttcctgatctgctactttagaaaccagttttggctcacttttggaaacagcatcttcggtggaaggcgtctctggtggctctggagatctagatgtatcaggcgttacattggaagcagcagccgctctattccttatccgggcactcggttcccgggtgggaataatgggcactggtcgcagaaccttagtcaggggccttgaaggcactgttttcttggctggtttcgcagctggtggagttgcctggacctcggtaataataatggggtcctcctctgccttggaatctttgccctgggccgcatccttcgcagcttcccgttctctttccagttcatcgatgtcaaagaggcgaatgagattggtgacacacacttcgcacaggagttgctgcttctgcggatcgggcgacacttcgagctggtaatgcctggacagcagggactgcagtcccagttcgattccaaactcatcgaagatctcctggtactggtatttcgtactgaatacgctgcaatgcaggcagctattgtttttcgcgttttccgacatcttaatctttgtccgtcagcaaattgtaggcgttatggcatttctggtttgttttttagtgttacctttccgtaccagcagctgtctggtattttccgcagtgtgactgtcttgcgcagatttctaaaaccgttaccacgatttgaaaatagtgtgaaaataaataggcataaaaagtaaataaaagatttaggaaaccccaaggaaagaagacacaattagtttttcgaactatataataagcaactgctaatttctacacaataatttcatttaatgtacgtgcataacgttttgagtgcttttaaaaatcggcttgaaaatctttaggtgctgcggtgtttcgaaatttaactgttgacgcgcttcagcagtgcgaagtagctgtaggagcagttgacgatctgaaaggagaagagcataaccagtaataaatgatatataaaggaatttctgctgccctacagaaccaaaggcctccaagctgaaagcaaaggtggggttaaaggtgctcaggagcatcggggaattaaagcgctgcatcatgagaaggacaatccggcggtttgccctgttccatcccgtccattgggagctgtagatgctgtgacacaacctagagctctggacagttacctcgttggaggcgtagcaaatgatgaagatctgccagagcatcaccagctgatagatacaggtcttgagcataaagatggcatcgccgtttgcaatggacatggtggacatgtcgtacaggttggacaccagcaccagaacagaacacatgagctgcacagatcctggcccctttatgaacagctccaccaggtccttgaaacgaacaatcctgttgtagtaggcggcacactcacgcagttccattgcgattttctcattatcctggggttcgatcacaggacccaacttttctaatcgcaggaccagcatttgtagctgaaccttcaagaaacagagcaacgagtaggccaccgagtcgtaggttatattcag

SEQ ID NO: 26636 - DNA, 1355 bp, DROSOPHILA
caaagattaagatgtcggaaaacgcgaaaaacaatagctgcctgcattgcagcgtattcagtacgaaataccagtaccaggagatcttcgatgagtttggaatcgaactgggactgcagtccctgctgtccaggcattaccagctcgaagtgtcgcccgatccgcagaagcagcaactcctgtgcgaagtgtgtgtcaccaatctcattcgcctctttgacatcgatgaactggaaagagaacgggaagctgcgaaggatgcggcccagggcaaagattccaaggcagaggaggaccccattattattaccgaggtccaggcaactccaccagctgcgaaaccagccaagaaaacagtgccttcaaggcccctgactaaggttctgcgaccagtgcccattattcccacccgggaaccgagtgcccggataaggaatagagcggctgctgcttccaatgtaacgcctgatacatctagatctccagagccaccagagacgccttccaccgaagatgctgtttccaaaagtgagccaaaactggtttctaaagtagcagatcaggaacattttagtgtgcttatacaaaatattctggacgaagaggaagctgttgttgaggatgagaccgcagtgaaagaggagtccagtgaagctgtccaggtcacagaggaaacagaagcccctggccaaatagtcatcctaaacagcgaggctgtgacagacaccaatccggatgagaatgtttacatatacgagcatgaggatgttatggatccaaatttggacaatgttaaggtaaaacccataagttgttcgtctagattggtagctcaagctgaggaaagtcaaagcgatgatgacatcgacgagggagagactagcaatgttgttctgtttaactttgtggacatcaaagagaaggatgaagttgataatattccggagtacttggccaccgtggtgaagacgagctttgaaaagctgacatttcagtggtgcactgtgtgcaagcactgctctctgaaatgtcccacattcgagagcctttttagtcacttgtcaaaggcacacaaaagccggagagatgtctacgagtgtcccatcgaaggatgcaacaaggagttgaaaggtcgcaaattcctagccatgcatcttgttttgttgcacgcgccagtggctgaaattccgatctacggcagctgtccggaatgtaaattgacgttctccaacattctgcagtacaacaagcattcttgcgcgcatgtaataaaaaagaagcgaggttttcgctcttattgtgaaatgtgttcgctggagtttccttcctggaagcggtatgtttattctctctaa

SEQ ID NO: 26637 - protein, 447 aa, DROSOPHILA
MSENAKNNSCLHCSVFSTKYQYQEIFDEFGIELGLQSLLSRHYQLEVSPDPQKQQLLCEVCVTNLIRLFDIDELEREREAAKDAAQGKDSKAEEDPIIITEVQATPPAAKPAKKTVPSRPLTKVLRPVPIIPTREPSARIRNRAAAASNVTPDTSRSPEPPETPSTEDAVSKSEPKLVSKVADQEHFSVLIQNILDEEEAVVEDETAVKEESSEAVQVTEETEAPGQIVILNSEAVTDTNPDENVYIYEHEDVMDPNLDNVKVKPISCSSRLVAQAEESQSDDDIDEGETSNVVLFNFVDIKEKDEVDNIPEYLATVVKTSFEKLTFQWCTVCKHCSLKCPTFESLFSHLSKAHKSRRDVYECPIEGCNKELKGRKFLAMHLVLLHAPVAEIPIYGSCPECKLTFSNILQYNKHSCAHVIKKKRGFRSYCEMCSLEFPSWKRYVYSL

SEQ ID NO: 26638 - DNA, 3714 bp, DROSOPHILA
agacgccttcattggggccttggcccacaacttggcccgtcatccaacgaggaaactggaggagcacatagccgccgcctgtgccgtggcctcgcaatccgttcagctacccgggacgcagtcgagcttcccacacgcttagagggaaatccccaaaagaatgcaacgcaacaataaatctctatcctgacgtacaatgatctatttaatggtaatcgtaagtataaaaagattatggtccacatgggtgtgcttcggctggcaattcagcgtccagaatccagtgggttgcggactacagatggaggcgtggcagcttcacttctttcccgacttcttgatgccgcctcctacgagaggacccttctttgaggcgttcgccttggccgcctccagagccttctgctgctccttctgcttttgcttgaaggccatgtcgtcctcgtccaggtctttggagtccttcttcggcgccttcagaggcttcttcttaccgccctcgcgtccagacatacttgctcgcttatactgcgtgggaggaaaaatctatgaaaatcgggttggattccacaacaaaaagtcacgcacctttttcacacgtttttccgatttccgctgcacgataaccacgagaacaatcgatagcttcgcgctttcgattggctgtgcgtgttatcggaactggacatatatttcaattaattgatgaaattataagaacaaatttatatgaaattataattatgttgtttctaaaaatcgcttctcgaagcgaacttaaagtcatccttaacagcaatgtgtaccagccaaaataaaaaaatgtcgattttgtcgatggaattttaatgacttttcggaaaaaaaaacatagataagttgaaaaatattaaaccactaactattcaactaattcaaaaggaagaggaatttaccatcgatttcttgagcgacctttacaaaagcgatgtatcgatgaaaaatcgattggaccagctcgtcgataaagttgttgtttgctccaggtttacttttaatttcaaattcaactaatatccgggattaagagtgtaaatcctgtcaggaaaaccatgctaaggccccagtcatcagtgcctgcgcctcagccgcctggcaagcgaaagaagcccgcggaactggaactgacctgcggatggcgcgactgccaggagatctgcactggcgagtggagcctgaacgggcatattggggatcatctggagcactatgcgaaggcccaggacgatcggggggcgcatgcggagcacacggagcatcaatgcacatggaactcctgcgatttccgcaccgaaaaccaggtggagtttgaacggcattcgtactaccacggctactacttgaacctgctcctgcaggggaagctggagtgcgatctgcatccggaaatccccgcctgcactgctccggcccgcctcatggagaagctgcccgctctgggccagaactttcgatgtggttggaccgactgtgagagggagttcgtttcgattgtggagttccaggaccacatcgttaagcacgccctattcgagtacgacatacagaagacgccggaagacgagcggcccaagacgatgtgcaactgggccatgtgccacaagcacatgggcaacaagtaccgcctcatcgagcacatcagtacccactccaacaagaagcaggtggcttgcttccactgcggcgaactgttccgcaccaagactacgctctttgatcaccttagacgccagccggaaaacaacagtgagtgcgagacttgctctttaaaaacacataaaaaaaacccttgctgccatatctatagccatacgttattcctgacaaaacccgcaatgatttaatttagtttacttaactacttggccaccctctaatctgttacagcaaacagcttccagtgcgcccaatgcttcaagttctttgccaccaagaagctgctgaagagccacgtggtgcgacacgttaactgctacaagtgcaccatgtgcgacatgacctgcagctcggccagctcgctgaccacccacattcggtaccgccacctcaaggacaaaccgctcaagtgtagtgagtgtgacacgcgctgcgttcgggagtcggatctggccaagcacgttcagattgtccactcgaagacggtgcaccagtgcgagcatcccgactgtcattattctgtacgcacctacacgcagatgcgacgggtaagccaccgttccccaaagctggattcctttctgccattcgctcgaccgcaagtaaccctcctgtttctcttacagcacttcctcgaggtgcacggcaacaatcccattctgtacgcctgccactgctgcgagcgcttcttcaagagcggcaagtcgctctccgctcaccttatgaagaagcacggcttccgcctgccttcgggccacaaaagattcacctaccgggtggacgagaacgggttctaccgcctcgagacgacgcgcctcgagagcttggaggtgacccagcaaatactgtcgccgcaggtgaacgactcgctagcgaaaccgggcacaggatcctgctacgagatcgtggatcccacaaataccgagttcgagcgcatcatcgtctcgaatgatccgaacgaggcgcagctgatgggtgaagtggtaatctccctgcccagcctagcagaggagctgtgaggaatagagccgcccggcagccaaccctttgatctcgtgtgccctttacattacattaagcatttagtcctacctagaacctagtgcgattggatgagatagcacccggggacgcgataccctgcccactgcacaaacaaaactaatcgtagtgtgtaaggatcaaggagtcagccactctgggaattgaataaaaaaactagcagcttaagggtgttgaattctgcagcacttataggagaaggccatttctcattgcttgtattgctgtcattgaatttttgctttatatttgtgaacttatttgtatttttattgtgcctcacttttttaatttcactaattagtatatcaatgttcaatatcagttttcatttacgtttcgcacctttgtattcggttcttactttaatagagtgtatgaaaactgaaaaactgccttcacttgttcgctggccatatattttaattctcctccatttaacattagatcgaatcctttaaccccaaagatgacacaagagtttcaagggctatttagttttagtaggttcgcaccgaaaaatccattgattccattgatcatattatcatatcgtacgtgcgcgcctgcttctctttgcccagaatttctataagtagctaataagtgacttgacttcatttcttaagttgtgtagcgaataaaaatgcagagaaaaacgaaatatacagatgatctatacaaacttaaaagatgatcagtatttaatgtgcttctacacaggaaagtatttcaacgtatgaaaaatgcttactacgcttgaatctttgaaatttggggaccgaccttggataactttagcactttaatcgctgctgtaaagccacacttctgtggcggctatcattaaactgagctcaattgaaagtgtagtccttctcttaggaagatgtatgtaggttacaacctatcatatctcgaactctttcactcagttttgcggccatttgtgaggtt

SEQ ID NO: 26639 - DNA, 1438 bp, DROSOPHILA
tcgataaagttgttgtttgctccaggtttacttttaatttcaaattcaactaatatccgggattaagagtgtaaatcctgtcaggaaaaccatgctaaggccccagtcatcagtgcctgcgcctcagccgcctggcaagcgaaagaagcccgcggaactggaactgacctgcggatggcgcgactgccaggagatctgcactggcgagtggagcctgaacgggcatattggggatcatctggagcactatgcgaaggcccaggacgatcggggggcgcatgcggagcacacggagcatcaatgcacatggaactcctgcgatttccgcaccgaaaaccaggggaagctggagtgcgatctgcatccggaaatccccgcctgcactgctccggcccgcctcatggagaagctgcccgctctgggccagaactttcgatgtggttggaccgactgtgagagggagttcgtttcgattgtggagttccaggaccacatcgttaagcacgccctattcgagtacgacatacagaagacgccggaagacgagcggcccaagacgatgtgcaactgggccatgtgccacaagcacatgggcaacaagtaccgcctcatcgagcacatcagtacccactccaacaagaagcaggtggcttgcttccactgcggcgaactgttccgcaccaagactacgctctttgatcaccttagacgccagccggaaaacaacacaaacagcttccagtgcgcccaatgcttcaagttctttgccaccaagaagctgctgaagagccacgtggtgcgacacgttaactgctacaagtgcaccatgtgcgacatgacctgcagctcggccagctcgctgaccacccacattcggtaccgccacctcaaggacaaaccgctcaagtgtagtgagtgtgacacgcgctgcgttcgggagtcggatctggccaagcacgttcagattgtccactcgaagacggtgcaccagtgcgagcatcccgactgtcattattctgtacgcacctacacgcagatgcgacggcacttcctcgaggtgcacggcaacaatcccattctgtacgcctgccactgctgcgagcgcttcttcaagagcggcaagtcgctctccgctcaccttatgaagaagcacggcttccgcctgccttcgggccacaaaagattcacctaccgggtggacgagaacgggttctaccgcctcgagacgacgcgcctcgagagcttggaggtgacccagcaaatactgtcgccgcaggtgaacgactcgctagcgaaaccgggcacaggatcctgctacgagatcgtggatcccacaaataccgagttcgagcgcatcatcgtctcgaatgatccgaacgaggcgcagctgatgggtgaagtggtaatctccctgcccagcctagcagaggagctgtga

SEQ ID NO: 26640 - protein, 448 aa, DROSOPHILA
MLRPQSSVPAPQPPGKRKKPAELELTCGWRDCQEICTGEWSLNGHIGDHLEHYAKAQDDRGAHAEHTEHQCTWNSCDFRTENQGKLECDLHPEIPACTAPARLMEKLPALGQNFRCGWTDCEREFVSIVEFQDHIVKHALFEYDIQKTPEDERPKTMCNWAMCHKHMGNKYRLIEHISTHSNKKQVACFHCGELFRTKTTLFDHLRRQPENNTNSFQCAQCFKFFATKKLLKSHVVRHVNCYKCTMCDMTCSSASSLTTHIRYRHLKDKPLKCSECDTRCVRESDLAKHVQIVHSKTVHQCEHPDCHYSVRTYTQMRRHFLEVHGNNPILYACHCCERFFKSGKSLSAHLMKKHGFRLPSGHKRFTYRVDENGFYRLETTRLESLEVTQQILSPQVNDSLAKPGTGSCYEIVDPTNTEFERIIVSNDPNEAQLMGEVVISLPSLAEEL

SEQ ID NO: 26641 - DNA, 10938 bp, DROSOPHILA
tcacggaccaagctgttaataaatagtccggtccaagcagctgcaggtttgttcattactgccgaatgaccacctctaccgaccacgaatttaatgtgtgatttttccttaatttgatgaacgtgtgagaaaatttattatcagaaagtattacttgattttgtcgaaattatcattattgatacattatcattaaacaggtccatttgcatatcaagcaaatttgtcttttgtgctttttgttgccggttacggtacgcattatagactatatatgtgagactactgatcggataattcacagagaaatttggtaagccgaagtttttacagtccttttgtagatgttcgtagatgatttcaagacaatacataacatatttgatcgtttaaaattttgaaagatattgttatctatatatagaagattatataatcaaaaaccatgttcgttgaacaatagcgatgggcctgtccttatccttgccagctttgcctgcctcttttcattagcctcgagtacatcaatcatcggcttgttttaattttaaagaaattgcccaccccctgcggtgtggtttggacccttacctaaatcctctgaatcatgccacaccccagccgcccgtcatcccccgaaatccgaccaaccacatccggaatcccgcccacaaaatgattgagccaacgtacaaacgccatctctttcctgctccaagggaaatttccctctcgagggaaatttgcgcctgaaggagcgccattttgaaagtttttccaccacgcctcacatgagactcccccattttccaagggctcaagttttactttttgtgcgcctgccaagattgatttattttaataagcggcggctcagaaatttttgattacaagaaatgcaaatttcggacgcagaagattttatagcaattttaatttgcttcccgcagcttatcctattttaataatggcattaaagctaaagaaaacaaccggggattacttgacttactgccttttgcagcatattgttctttatgatagatcgtagaattaatcgtttaaaaatacattttgtttatgtttaaattagtgttttgaattagttgaaataaatagttatatatacgctaaagctagtccatctccttattatctgtatagtaatgtttcgtcgtcaagctaatcatcgtccagctcaatcgtcgatttacgcattaaaataaaatctgtaccacgcaataaaaaaaaacacctatataaacacccatgtacagtgggaacaggctgggatagtcatcgttgtccttggtatgatcggtccaacaaactttgaagcttcataaaaaaaatgtaacttttgcttatacttaatactaggctttttctttaaaacccaaaaacaatgatatttaaaagtagcgatgtctgaatatggggcgctgcatcggacgaccattatacatgggcaaggatatggaatcagacgcactaaagcagaagaggctttacaggaaaaaagtgtacaagctagaggaattggagaaaacattagattgctctccttcgtgaactgaatatacacaacaccaaagaaatatgtatgcgaaagaacaaacatatattgaaagcaaagggaaccccacgaatactgcacaaaagagctcaagtggagggcagcagatggtccttaaattccctcgtctaggtctcaaagtatttgtagactgccgtcacataggacatcacctgcatccagtccggtcgttcgatctgacacatatcattgatattctggtagcgaaattttcagataagaataagaataaacaagttgagcttctgttggccatggaaacttaccagtgttgtgccgattcccacggactcggcagccgcaaatgccagcgaaaagttgcgccgcttgttggcgggagtcagctgatcgtacggaatgcgatccggcaaatacgagtgtaagatagcacaaaaagctaacccatcgttccacgacgagctgaagttggtgatgtcgatgttacggtagcccactgttttgttttggcaccacttcaacaaggcgttgcgcttcgaacccccgttcttggccagcatgttaagcgggtccttgcgttcgcctggtaaacacggaaaagttaactttaagatcacgaatacatctacgccagttaaaacttcctaccgctgataaatgactttgagacgttaccaaatggcaacccgccgctactgctgctgcccgcgctgctgggcgtggccggcgtagaaggttgggagacgttctgtacctggctttgggtagatgttatcgcaagctgttgttgatcgcgcagcggcaaagtggctttggtagtgctagctaaatctcctccgctgccagatgaagtattggttccctgtccggcaccaacttcgttgccgacgtttacgtgcaagttggtgctctgcagcacaggcaaccgaatctgtggaaaattcaaagccattacgagcactcaaattcacttccgattgaatactcacgctctcatgccagtcactggagggaggaaagatgatgggcgtagtgcccaggtcaggagtcccgctgtttaggctggacgtcgagctgtagtgggattccgactcgtcggctttgccctgctgtaggaccaaaggagtttgggcacagaaattaatggtttgggcaagattaatgcttcacaggccttaccgctttgttattctcaatactctcaatgagcgttttgacggagagccgcgaatcctgtcggctgaagctaagcttgctgcgtcgtgtggccatctccatctcacgctgaactgtggacagcacggactgcggagtctccgactgttgcatttctacaagggttaagaaaagcattaaacattaccggttgaccgcagacgtcaactgggcttacgctgtttggtaagtttttcaagctgctgctccaacagtctgatcttttctttctgcgtcttgttgtcgagaactagctgctcccgggcgctgagcgcctcagtcttaaagtcgttggccactcgcacagtcatgagaaggtcggcctggaactgctgccactcctcggcctccttgcgccgcagctgcgtctcctggtcgagtctacactctgcctcacccagcttcagttgaacgtcgcccagatggcgctgagtttcagctagcagagattgcaactgggccttgtcttcctgatggcatttgcactgaacctgcagttcggccacgcgttcctctagggcctgccattcgccagctattttgtccttgtcacgttggagctgctctaagcggtattcaaggtgggagaccgcacacttggcgttattcttaactactttgcattcctcagttagcccggatagctgatcacgtagtcttctcagctcagcttggctgcgagagcactgatcttgtaactcagccacacgctcttctagggcatccttctcctttctggccacatccagcacttcgctcaggtctgtcttgtctcctctggacaaatctgcttctagctcctcgatttttgagcgcgcattctccagaagagtgctcaatcgactgatttcgatggccctctgcgaaatctcttccatggcctgcgaaaattgagcctctccttgccgccgctctgcgtttgctgcatccaactgagaatccaggagggcaattcgttccctctggcgctgcagttccagttggccagcttcccgggcctgtttcatttccgccagctcagctcccagttcctcctgcttgagcaaaactgcctcgcgctcctcctgtgatgtcttgatcaggtccagaagcttctgctccctctccgaagcacttacttcgggtgcaggctgtttggtatcccgaagtaacagctcttgcagcgtgctgatctgcgtacgcgattcatttagcttttccgtctgtcggcatagcgactggaagagcacatccttctcctcggccagacgctcgttctccgtctgcgtatccgtcagctgggtttgcaagtccgccagctcctgcaacgtagcctgtagctcctcgttagtggagtagtgtgtctcctccatttgaatgatcttgtcttgcaggcaggctacagagatctcgctggaggatgactgtttatcccagtcgggagtgaggcagggtgtgccatcatgcgcatcgtgtgtctggatatgaaaaggacatggggatagtgttaggggcttttgaatcactagaaatcgtctgaaagtacttacactgggcagggctattgaagcgggcgctgaactgtgcagccgctgcgagtcttgaatgatctggtgcttctccgcatccgacagcggtgagtttactacgtcccgcagtcgattgcgcagagattcattctcgtatttcaaattgccgatttccatctgggacttttcctgtagactctgtaagcacaagtatcagactgatcagttttgcttccctctggtctgcgttaatgtggctgctgttgcattacgacgcaaaagcagactactacacccaattaaaggagcgcaatatcgaattaaacatgcgcggataagtgagggtagcgaagcgcagcgtccgaaaacccggctttgcctataataccccttactatcgctttttaacaccggtataacttcgttatttaaaggcttgcttacatagattaaattctttacggacttattcaaagaataaaagattactatggaactatgctaatattttagctagtaaattaaaatagctaactttcttactaaaaaatctagcccaccccctttgtgcaagtgtgaatctaaatttaccaatgcgggagagccaacaaatacatcaatcagccgtgacaacacagcagcaacttgtggttagccaacgtccccgtttttgctgacagcccacccccgtaagccaacccaaaccatttttcaccatttacacccccctggcgaacttttgcgcacctgcatcttaaccagatcgcccttcagcttggccacctcgctttggtatggcaacagctccgtgatgcgtgtctccagttgcatttgctcgcttctgaatctctccatctgtttgtgcagctcctgcattttattgttagcctgtgtggttgagtttcgattactatactaatgaaaacagggcaacgaatgcggacttacctctaggagttgctgttgctgctgttcgttgttgaggagttgctgttgctgctgctgttgctggtagctgcttgctgccacagcggcaacagcaacggcagctgctgctgcgggaaaagagctgaccggactatcagcactggtgttgctgccgttcgccgacgttgctgttgcagtggccgttgctgctgctgctagttgctggtagaaatctgcagcagcggcggcagcagcgccaccatcttgtagtgcggccaatgcgttgttgttattgatgttgctattgctggagctcccagtcgctgaagcctgcggcactgctgccagggaagtcatcagtggttgctgtggatcatgtggctcaggtgcattgctgtgtggctgctgcactggcaacagcttgggctgcttttgtcccttgagcttggactttttttgaggcaaggtgttgctttggggctgctgcagtagttgctgctgctggcgtctctgctcctgctgctggttagtcagcagtagcgccccctcgtcccccacatccacgcccctttcgtaactggccgtctcctggtgggcgtagaactttgtagttgctgcggtgatgctgtgctgctgctgctgctcgtgggcggtattcaatgaagtgctcgattgcgacttctgccgattgttgttggaggagttctgctgctgcttgtgtgacgagttggaggaatgggagctggagttgccctgtcctctgcggaacaaggatttcagtttgatcatcttgctgccagtctttccttgctcgttgcaaaacgtgaaccatcaaccatatacttgcttttaaacttatttaatagcaaccatcatttattgtggcttgcgtactaattgcaggttagcttgtttaatttgatcttttatcgttcgttgcgcttttaatgtttttaatgtgtaattttagaaatttagcttacatattcgtctttttttgtttgtcaattaatatcacatattttatttcttatgttcttgttataaacttatttcgttgggagtcaatggatgaatagagaaaagcgggcttgaaattggatttcacaagcaacaaatgctcgtgttgcatgcaacatcagccagagtatacaacaatataacccgcttgtggcgacgaacaatcacactgcattgttattgtcattgggagagcgactaagagggagataaagatagaaaccgaaacaaacgcacaaacgcgtttgcattcacacccgattatcaattaaaggcactccgtgatttctgtctctccacttctaccagctcggattcagtcccggaatgtttaaattgaagacgcacggtattctggccgggcccaggtacaacgtcaacgattcgacagccgcactcggacacactgaaagtcacacgtacgcttctggacaaacggggccaagccaccagcatcagaagttaaatcaaataaaatgaacatgtaggcttgcgagaccggtggcgcacaaattgatcgcatttcccatggataattcacgtggaatcaccatatccttgacctctgctgtaggcgttgggtttctaagcaaaggagaggactctttattttcacccactgggcacagagaccaccccgctctccacagcccagagcagtatgcgtgtgtgctttcacatgcatgccgaattactcatgtcacgacggagcgaaaagacaacaggagaacaaatttagtggaactgagcaaatggcattgccagctgaccccagcggagctgcacttacaagttgcaacacgccgaacagaagtgttgcaaaacagtcagatcttaggatttagctagtttaccatgtatggcctcgaatgattttcattcggatttcttttttgtgacagcgacccacgcgaaacatacaaattttgtatttcactttgggctaaaaatttaaacgcaaacagtggagtgacatcatgctgagcacgagcgaaacacgaaattaaattcatgtattcagagaaacactttttccctaattgctgatggacacgggagtttttccttatcacctggcggtgggggtttatctttatcatgtttgcacagcgataagttggataattgggtagaatacaagcacggcatccgacttggcattggaattcttatttccagctgcagtttgaatgcgcgcccaaatttgggaactatgcaatacttaaaatgcaactgcggagctgggagagcgggcaaaacaggatgttgggtgggagagcgaatgagaggggagatctgcttgcccttcaacgagagacagcaacaacaatggagttgccagaaagggaatattaacggaatgaaaatcagaaagagagagcgagagaaaggtggataatgaatcaacgcatcaacaatcaaaaataggcaatgctgtttaactatgtacaccagatagctagatgtaaaaggaatttccttcccttttcacactctcttactctcgtaaaaaaaactgcaacacgccaacaaaacgaaaggccaacttcacacgcacaccaatacgttgctcaaacaatacccgcacacttttacacgtacacgtacatactgagcgaataactttgttgctcattgctaatttgtcataaacattaaatgcagcacatactacggtgggaaacagtaaacaaaaataaaggtaaagttctcaaaacgaggtgagccacgcacgacaccaaataagcgaacaactggcgacaaagcgacgcgcgtttcggtttttctgctgattcccgacaacaacaagtgtctaatcgacggggcctatcgatatacccgataatactcaacgccggggcgctccaggcacggcgcatgcgtgacacgatgtccaacactggttgagcgcgaagaactggtattttcaaatagttggacttattattggtaattctatgatagtaataaacacagcacttctgtccaaggccacaattgctaggggaacaagaacttttatgtaattgtatgtaaatactaaaagtatcctaataatgactgatttagttcatcgaagtctgggtaagccaaattttctccagttcactgaaataaacccagagggctttggtcaaagacataaatatttccataccctactatcttctcttgccatctttctgtttcccttaaaactacacttattgccattatcaggactgtatgatgatgtcgacgaatttaacatgacactacaaaattccatcagtatcgcccagttgaatttgtcctcttctgagcttttcctatgctgcctcttctccagcgtgggccttatcaaagccagcagggcagcaacactgctaaagaaaccgcaagaagcagcaaagcgtgtctgccgttcgtaggagaagaggttcggttcactcgcgactttcagcatttctgctagttccacgtttcttcgctctttccccaccgcatttctcttttatgattcgtactgcttgcaagctacgtacgttagaggtctatgaccaaaggccaggccgaaacagagcttaccgcccgtcccccaaaatattaaggaaaatgataacgaataagagaggcacaaatttttttcagttgggttacgtgagaggggttcaaagcccccggccattcactggcgtctaaaaggcaaaagatctgtgagatttagttttgttcggtgggttccaaacattttttaggtaaatttggtgtagttctaacgcacagcagttagaaaatagaaaagatttttgtgatacccgcgattataaacgttccgctttggcgcaccaaagaaatgtgcgctacgctccaagcagttggctatatcggtgctcttcccacactcaagaaattagggagatcaggtgacagatgacagatcttttcagcagagatatcaatttacgaggtgaccattcctcctaactgcatccccagaacgccaggcagttgaatgcccatgaaaaggaaagttaaaggatcaactggtcatgtgccgcttgcgtccaaggtggaaaatcttagagggcaaggtatagcgatttgaagccgttacagcggactgcgcagtcgcggcgcactgcccgtttaccgttaccactcgacgcggctcctttttgatatttatgtttctcttcgtgtttatcgacctttgttcgtttagattgtcttacgtacattgtgtgttgttgttcgagcggcggacacaataaattatttttagaaaatagtttcgttttcgctaatatatacatttatgcgtggctcggagttttaaagttgctttgttgatggtttacgttttgctgcgctgcttgcgtttttgttgctagtgcagaagcagaaagtggaagttttaaaatttcactttcccgaaatttatataatgctctttgatggttttcgtatcaaaaccgccagaagcaacaacgatctgctttacatttctttgcgtttttgtttcattattttactcaccctgtttcccgcggcgaatgtagaaaacgaagaagtgatatggcgaggagaggaggcagaggcaatctaattcaaacggtactcttcctagattcgccccttttcttttgactgtattttctgcagggcggaatgcgccgtttttgcttgcactactatttgtacgcacttgcacctttgacttttcgttgtttctggacaccgaaaaaacaaaaactaaatgtaaaaacaaaatagatcgggcctttggctaccgctacacacacacacggaacacactcgaaaaaacagctggcgcgttaattacattaaaaattcgcaaggaagccttcgaacaatggcagaaatgcaactaattagcaattatttgcagatttttttttgttttctttacgcctcttctttgcacaaattccaattagacgatgcggcggcagccatctgcaaatgcaatttgttgttgagtcccgttatttcgcagacagagcaagtgcagttataggcgaaactgggggagcggacgagcgaaagaaatagccaatgacctccccttgatgacgggctattaatattcatttacatgtctcttcttgttttgttatgtgcgcaatggaacagatgactccgcataggaggatgctgcttgctgctcttcgatttgttgctttattaatagaagtcaccgaatgccaatctccgattggaatcacagccgctcgcggggacaccgattaccggagttgttacttggttagttagccagcgccaatagccgtgattaatcccgttgcagcctgccaatatgttacgcttttgcttttgttattgtgttcgcttgttatcgcttaacgatacgatttgtccgcggtcaacgtcgcgtcgctgcttattgttgttgcgttttgttattgttgttattgctggcgatgggagatcttcgattagtttaacttttgcagtagtgtggctgtcgcttgagtgtctgcaaataccacagcgacgcacaccaaagactaaatgtttgaaaacattttaatttcttacgaaatttaaaagtagaactctacaagaaatttaaaagcgttcttctattttatcaatcggtatgtgctggtgggaactacagctactccttgaacccctccacctcgctggcttcgaagggcacctcctctaccttgtggaatccggaga

SEQ ID NO: 26642 - DNA, 4154 bp, DROSOPHILA
aaacaacgaaaagtcaaaggtgcaagtgcgtacaaatagtagtgcaagcaaaaacggcgcattccgccctgcagaaaatacagtcaaaagaaaaggggcgaatctaggaagagtaccgtttgaattagattgcctctgcctcctctcctcgccatatcacttcttcgttttctacattcgccgcgggaaacaggaggacagggcaactccagctcccattcctccaactcgtcacacaagcagcagcagaactcctccaacaacaatcggcagaagtcgcaatcgagcacttcattgaataccgcccacgagcagcagcagcagcacagcatcaccgcagcaactacaaagttctacgcccaccaggagacggccagttacgaaaggggcgtggatgtgggggacgagggggcgctactgctgactaaccagcagcaggagcagagacgccagcagcagcaactactgcagcagccccaaagcaacaccttgcctcaaaaaaagtccaagctcaagggacaaaagcagcccaagctgttgccagtgcagcagccacacagcaatgcacctgagccacatgatccacagcaaccactgatgacttccctggcagcagtgccgcaggcttcagcgactgggagctccagcaatagcaacatcaataacaacaacgcattggccgcactacaagatggtggcgctgctgccgccgctgctgcagatttctaccagcaactagcagcagcagcaacggccactgcaacagcaacgtcggcgaacggcagcaacaccagtgctgatagtccggtcagctcttttcccgcagcagcagctgccgttgctgttgccgctgtggcagcaagcagctaccagcaacagcagcagcaacagcaactcctcaacaacgaacagcagcaacagcaactcctagaggctaacaataaaatgcaggagctgcacaaacagatggagagattcagaagcgagcaaatgcaactggagacacgcatcacggagctgttgccataccaaagcgaggtggccaagctgaagggcgatctggttaagatgcagagtctacaggaaaagtcccagatggaaatcggcaatttgaaatacgagaatgaatctctgcgcaatcgactgcgggacgtagtaaactcaccgctgtcggatgcggagaagcaccagatcattcaagactcgcagcggctgcacagttcagcgcccgcttcaatagccctgcccagtacacacgatgcgcatgatggcacaccctgcctcactcccgactgggataaacagtcatcctccagcgagatctctgtagcctgcctgcaagacaagatcattcaaatggaggagacacactactccactaacgaggagctacaggctacgttgcaggagctggcggacttgcaaacccagctgacggatacgcagacggagaacgagcgtctggccgaggagaaggatgtgctcttccagtcgctatgccgacagacggaaaagctaaatgaatcgcgtacgcagatcagcacgctgcaagagctgttacttcgggataccaaacagcctgcacccgaagtaagtgcttcggagagggagcagaagcttctggacctgatcaagacatcacaggaggagcgcgaggcagttttgctcaagcaggaggaactgggagctgagctggcggaaatgaaacaggcccgggaagctggccaactggaactgcagcgccagagggaacgaattgccctcctggattctcagttggatgcagcaaacgcagagcggcggcaaggagaggctcaattttcgcaggccatggaagagatttcgcagagggccatcgaaatcagtcgattgagcactcttctggagaatgcgcgctcaaaaatcgaggagctagaagcagatttgtccagaggagacaagacagacctgagcgaagtgctggatgtggccagaaaggagaaggatgccctagaagagcgtgtggctgagttacaagatcagtgctctcgcagccaagctgagctgagaagactacgtgatcagctatccgggctaactgaggaatgcaaagtagttaagaataacgccaagtgtgcggtctcccaccttgaataccgcttagagcagctccaacgtgacaaggacaaaatagctggcgaatggcaggccctagaggaacgcgtggccgaactgcaggttcagtgcaaatgccatcaggaagacaaggcccagttgcaatctctgctagctgaaactcagcgccatctgggcgacgttcaactgaagctgggtgaggcagagtgtagactcgaccaggagacgcagctgcggcgcaaggaggccgaggagtggcagcagttccaggccgaccttctcatgactgtgcgagtggccaacgactttaagactgaggcgctcagcgcccgggagcagctagttctcgacaacaagacgcagaaagaaaagatcagactgttggagcagcagcttgaaaaacttaccaaacagcaaatgcaacagtcggagactccgcagtccgtgctgtccacagttcagcgtgagatggagatggccacacgacgcagcaagcttagcttcagccgacaggattcgcggctctccgtcaaaacgctcattgagagtattgagaataacaaagcgcagggcaaagccgacgagtcggaatcccactacagctcgacgtccagcctaaacagcgggactcctgacctgggcactacgcccatcatctttcctccctccagtgactggcatgagagcattcggttgcctgtgctgcagagcaccaacttgcacgtaaacgtcggcaacgaagttggtgccggacagggaaccaatacttcatctggcagcggaggagatttagctagcactaccaaagccactttgccgctgcgcgatcaacaacagcttgcgataacatctacccaaagccaggtacagaacgtctcccaaccttctacgccggccacgcccagcagcgcgggcagcagcagtagcggcgggttgccatttggtaacgtctcaaagtcatttatcagcggcgaacgcaaggacccgcttaacatgctggccaagaacgggggttcgaagcgcaacgccttgttgaagtggtgccaaaacaaaacagtgggctaccgtaacatcgacatcaccaacttcagctcgtcgtggaacgatgggttagctttttgtgctatcttacactcgtatttgccggatcgcattccgtacgatcagctgactcccgccaacaagcggcgcaacttttcgctggcatttgcggctgccgagtccgtgggaatcggcacaacactgaatatcaatgatatgtgtcagatcgaacgaccggactggatgcaggtgatgtcctatgtgacggcagtctacaaatactttgagacctagacgagggaatttaaggaccatctgctgccctccacttgagctcttttgtgcagtattcgtggggttccctttgctttcaatatatgtttgttctttcgcatacatatttctttggtgttgtgtatattcagttcacgaaggagagcaatctaatgttttctccaattcctctagcttgtacacttttttcctgtaaagcctcttctgctttagtgcgtctgattccatatccttgcccatgtataatggtcgtccgatgcagcgccccatattcagacatcgctacttttaaatatcattgtttttgggttttaaagaaaaagcctagtattaagtataagcaaaagttacattttttttatgaagcttcaaagtttgttggaccgatcataccaaggacaacgatgactatcccagcctgttcccactgtacatgggtgtttatataggtgtttttttttattgcgtggtacagattttattttaatgcgtaaatcgacgattgagctggacgatgattagcttgacgacgaaacattactatacagataataaggagatggactagctttagcgtatatataactatttatttcaactaattcaaaacactaatttaaacataaacaaaatgtatttttaaacgattaattctacgatctatcataaagaacaatatgctgcaaaaggcagtaagtcaagta

SEQ ID NO: 26643 - protein, 950 aa, DROSOPHILA
MTSLAAVPQASATGSSSNSNINNNNALAALQDGGAAAAAAADFYQQLAAAATATATATSANGSNTSADSPVSSFPAAAAAVAVAAVAASSYQQQQQQQQLLNNEQQQQQLLEANNKMQELHKQMERFRSEQMQLETRITELLPYQSEVAKLKGDLVKMQSLQEKSQMEIGNLKYENESLRNRLRDVVNSPLSDAEKHQIIQDSQRLHSSAPASIALPSTHDAHDGTPCLTPDWDKQSSSSEISVACLQDKIIQMEETHYSTNEELQATLQELADLQTQLTDTQTENERLAEEKDVLFQSLCRQTEKLNESRTQISTLQELLLRDTKQPAPEVSASEREQKLLDLIKTSQEEREAVLLKQEELGAELAEMKQAREAGQLELQRQRERIALLDSQLDAANAERRQGEAQFSQAMEEISQRAIEISRLSTLLENARSKIEELEADLSRGDKTDLSEVLDVARKEKDALEERVAELQDQCSRSQAELRRLRDQLSGLTEECKVVKNNAKCAVSHLEYRLEQLQRDKDKIAGEWQALEERVAELQVQCKCHQEDKAQLQSLLAETQRHLGDVQLKLGEAECRLDQETQLRRKEAEEWQQFQADLLMTVRVANDFKTEALSAREQLVLDNKTQKEKIRLLEQQLEKLTKQQMQQSETPQSVLSTVQREMEMATRRSKLSFSRQDSRLSVKTLIESIENNKAQGKADESESHYSSTSSLNSGTPDLGTTPIIFPPSSDWHESIRLPVLQSTNLHVNVGNEVGAGQGTNTSSGSGGDLASTTKATLPLRDQQQLAITSTQSQVQNVSQPSTPATPSSAGSSSSGGLPFGNVSKSFISGERKDPLNMLAKNGGSKRNALLKWCQNKTVGYRNIDITNFSSSWNDGLAFCAILHSYLPDRIPYDQLTPANKRRNFSLAFAAAESVGIGTTLNINDMCQIERPDWMQVMSYVTAVYKYFET

SEQ ID NO: 26644 - DNA, 3538 bp, DROSOPHILA
tttgttgtctgcatttaccttaaatgaatttattaactaaggcgatattgtgcctctcgctcaatctcgcaaaacgatgctttgtctgctgcttctctgtgcgtgtgtccgtctctttccacggcttttcgtcgagactcacatatacaaacggcgacacactggattggagctggactccgttttggatggcttggctttggctgcgtacccaaaataaatcgcgcttgcagtcccaaatcattttagttcttgacgcctttgttccacaaaaacttccaaccgccgtccatggctcgtgctttctctttcgctcgcgagacgctccaaaagtcgcgagtatgggaagagaatgtatccctcgctctttcacgcctagaagcggctgtagcacacacaagcacacgtaaacccagccgtatgcatatacatatattccctctactagcgagacgtgtgtacgtgcgtatgtatgtatgcttttttcacttctttctcctctgcgttctttgcaccaagtgtcgctgttgctatttgctaccgccgctcctcttgacgaataagtcgggacttgtatcagctctaattcggacttagtttacaaaatgcggctgctttttttccgcgatactcggattagtgatgtaaaaagacgttgatgcttcgaccactgaagtcagtgcgatatgtatcgataattgaatgccatcgattgctacgattaaaactgccaccgcagttagcggagacgctcaccattctctattcgccatttgaaagtatcggtgtaatttgttttcagagaaattaatttccgtttactgtgcaattcggtgtgaaagtgttcagatttatcaatgcgtattctgctttcgacttcgccaccaatctgtgctgcaagttaccattaccaggtccacctggttcccgccagttttctttcattgtggctagttgttgttcgtgccttcgataaagacgtttagaggtgtttttagagtttcgccatctggtcactatagccgtttcgttttttacgtgagtattgtgaatttggtgtgttgatttatatctcagttggagcctgcgtggaaatagtgtcagtacgtttaaaggcatcatcgtaaggttagtcggaaaacaaataaaaagcctacaaatagcaagcaagaacgctttcgcaaccacaagaaaaacgaacatacgcacgcatccatctgtggtagagtcggcttgtgtgggggtgagtggatgtgtgggtgagcatttctggaaagtgccgttctctatgtttcgattctacttatcccttcatcaccatttcatcgttgaatcatcacgaaagaaacatcgaaagtgcacaatcgtttgttatctttgtacgaaaacaacggtgatttccacacaggcataacctgcaagagtaatacgatacaaattttgatctgatatgacctcattttagtcggtttgaattttaaagagagcgactctgcaaactgcagggatatgaacatacaaaattcacaaatgattgtttgcatcctagttgcttatattcatttacacgcatgcttatatgcttacatctgttatcaataattgacgacttggtgcatgcgaagcaaacgcattgaaatgactattgggatccacacactgttaaaaaacacactgattgcactgccacacatttctcaactagaacctaatgttttatactgaacttaactgcaggaaagcccaaaatgcccagcatcaagttgcaatcttcggatgaggagatctttgacacggatatccagatcgccaagtgctccggcactatcaagaccatgctggaggactgcggcatggaggacgatgagaatgccattgtgccgttgcccaatgtgaattcgacgattcttcgcaaggtgcttacctgggctcactaccacaaggacgacccccagccaacggaggatgatgagagcaaggagaagcgcacagacgacattatctcatgggatgcagatttcctaaaagtcgaccagggcacactgtttgagctgatattggcagcgaactatctggacattaagggccttctggagctcacctgcaagactgttgcaaacatgattaagggaaagactcccgaggaaatacgcaagaccttcaacattaagaaggacttttcgcccgccgaggaggagcaggtgcgcaaggagaacgagtggtgcgaggagaagtaaagcgcggcatttcgcgggaccaacattaagttgaaacagctaggggattcgggaacgaattggatttgcagcattgcaactttacttagttgctactttcatttacatttttttttatttttaaccccagcagagactcgatttaaattgtgtataaatgatctgttgctgatttgattcgcggggttcattttttgtcgtaaatatatctcatatacatacatatgcgagattgtaacactctctttaacctattggagtaacacttgatttcactttaataaatataactacccaacacaaagacacagcctattttgtgggcttcccggaggggttagggtccaaggacttctcaaattaagaagtgctctttattcgttatcttgtgtttagaaacgtttgcaagcgtttgaaatggatacgcatgccatttatggtccagtcggtaaaattttacgtgttcccaagaaggtacatatatatcttagattatcttatctatagaaactacattcataagatcacgctttcggcgaatagcgagtaatactgtagctgccactttgccacttagtgtgcaattgaaatgcgcgccaacgcatgttctcatatgcggagcgtttagcagcccttaaaaagcttttcatgttgcttttaaaaagctacgacgggtgtggaaattagatttgtgacgctttatatatcttttttttatatcgtctggggtacagcatggttttaggattttagaagaaagcagtaattttgtaagaatcgaagaacggggggatatttataattttcatattaaccttgtctttgtttgcttttgaaattatgaatacttcgaaagataattatcttgtgcgcattccattctggcttagactgggttgagctaaaaatgatttgaaatacaaatttttaggtgtccgctgatatataaacagtatgatgtttttgcacttttttccctgaagttttccttgttgtctcgcttgccaatgctgaacaaagtagccaaaggacctttacttgaagctttgagagcggaaaatatattcggggacaattgctttaagtgtgcactaggcttggctagatgcccgtgccaaactttctttggaattgatcgctggccttagccaaaagtggaaaaaagaaaggataggatagtgccgcacgtattaagggtcttcttacaaaaggtaactgatattaattcatttgcatactaagcaagctaactcatctgtttattgcaaacaagcgccaattgaagttttatcgaagctcag

SEQ ID NO: 26645 - DNA, 929 bp, DROSOPHILA
tttcgccatctggtcactatagccgtttcgttttttacgtgagtattgtgaatttggtgtgttgatttatatctcagttggagcctgcgtggaaatagtgtcagtacgtttaaaggcatcatcgtaaggaaagcccaaaatgcccagcatcaagttgcaatcttcggatgaggagatctttgacacggatatccagatcgccaagtgctccggcactatcaagaccatgctggaggactgcggcatggaggacgatgagaatgccattgtgccgttgcccaatgtgaattcgacgattcttcgcaaggtgcttacctgggctcactaccacaaggacgacccccagccaacggaggatgatgagagcaaggagaagcgcacagacgacattatctcatgggatgcagatttcctaaaagtcgaccagggcacactgtttgagctgatattggcagcgaactatctggacattaagggccttctggagctcacctgcaagactgttgcaaacatgattaagggaaagactcccgaggaaatacgcaagaccttcaacattaagaaggacttttcgcccgccgaggaggagcaggtgcgcaaggagaacgagtggtgcgaggagaagtaaagcgcggcatttcgcgggaccaacattaagttgaaacagctaggggattcgggaacgaattggatttgcagcattgcaactttacttagttgctactttcatttacatttttttttatttttaaccccagcagagactcgatttaaattgtgtataaatgatctgttgctgatttgattcgcggggttcattttttgtcgtaaatatatctcatatacatacatatgcgagattgtaacactctctttaacctattggagtaacacttgatttcactttaataaatataactacccaacac

SEQ ID NO: 26646 - protein, 162 aa, DROSOPHILA
MPSIKLQSSDEEIFDTDIQIAKCSGTIKTMLEDCGMEDDENAIVPLPNVNSTILRKVLTWAHYHKDDPQPTEDDESKEKRTDDIISWDADFLKVDQGTLFELILAANYLDIKGLLELTCKTVANMIKGKTPEEIRKTFNIKKDFSPAEEEQVRKENEWCEEK

SEQ ID NO: 26647 - DNA, 3193 bp, DROSOPHILA
gaagagaatgtatccctcgctctttcacgcctagaagcggctgtagcacacacaagcacacgtaaacccagccgtatgcatatacatatattccctctactagcgagacgtgtgtacgtgcgtatgtatgtatgcttttttcacttctttctcctctgcgttctttgcaccaagtgtcgctgttgctatttgctaccgccgctcctcttgacgaataagtcgggacttgtatcagctctaattcggacttagtttacaaaatgcggctgctttttttccgcgatactcggattagtgatgtaaaaagacgttgatgcttcgaccactgaagtcagtgcgatatgtatcgataattgaatgccatcgattgctacgattaaaactgccaccgcagttagcggagacgctcaccattctctattcgccatttgaaagtatcggtgtaatttgttttcagagaaattaatttccgtttactgtgcaattcggtgtgaaagtgttcagatttatcaatgcgtattctgctttcgacttcgccaccaatctgtgctgcaagttaccattaccaggtccacctggttcccgccagttttctttcattgtggctagttgttgttcgtgccttcgataaagacgtttagaggtgtttttagagtttcgccatctggtcactatagccgtttcgttttttacgtgagtattgtgaatttggtgtgttgatttatatctcagttggagcctgcgtggaaatagtgtcagtacgtttaaaggcatcatcgtaaggttagtcggaaaacaaataaaaagcctacaaatagcaagcaagaacgctttcgcaaccacaagaaaaacgaacatacgcacgcatccatctgtggtagagtcggcttgtgtgggggtgagtggatgtgtgggtgagcatttctggaaagtgccgttctctatgtttcgattctacttatcccttcatcaccatttcatcgttgaatcatcacgaaagaaacatcgaaagtgcacaatcgtttgttatctttgtacgaaaacaacggtgatttccacacaggcataacctgcaagagtaatacgatacaaattttgatctgatatgacctcattttagtcggtttgaattttaaagagagcgactctgcaaactgcagggatatgaacatacaaaattcacaaatgattgtttgcatcctagttgcttatattcatttacacgcatgcttatatgcttacatctgttatcaataattgacgacttggtgcatgcgaagcaaacgcattgaaatgactattgggatccacacactgttaaaaaacacactgattgcactgccacacatttctcaactagaacctaatgttttatactgaacttaactgcaggaaagcccaaaatgcccagcatcaagttgcaatcttcggatgaggagatctttgacacggatatccagatcgccaagtgctccggcactatcaagaccatgctggaggactgcggcatggaggacgatgagaatgccattgtgccgttgcccaatgtgaattcgacgattcttcgcaaggtgcttacctgggctcactaccacaaggacgacccccagccaacggaggatgatgagagcaaggagaagcgcacagacgacattatctcatgggatgcagatttcctaaaagtcgaccagggcacactgtttgagctgatattggcagcgaactatctggacattaagggccttctggagctcacctgcaagactgttgcaaacatgattaagggaaagactcccgaggaaatacgcaagaccttcaacattaagaaggacttttcgcccgccgaggaggagcaggtgcgcaaggagaacgagtggtgcgaggagaagtaaagcgcggcatttcgcgggaccaacattaagttgaaacagctaggggattcgggaacgaattggatttgcagcattgcaactttacttagttgctactttcatttacatttttttttatttttaaccccagcagagactcgatttaaattgtgtataaatgatctgttgctgatttgattcgcggggttcattttttgtcgtaaatatatctcatatacatacatatgcgagattgtaacactctctttaacctattggagtaacacttgatttcactttaataaatataactacccaacacaaagacacagcctattttgtgggcttcccggaggggttagggtccaaggacttctcaaattaagaagtgctctttattcgttatcttgtgtttagaaacgtttgcaagcgtttgaaatggatacgcatgccatttatggtccagtcggtaaaattttacgtgttcccaagaaggtacatatatatcttagattatcttatctatagaaactacattcataagatcacgctttcggcgaatagcgagtaatactgtagctgccactttgccacttagtgtgcaattgaaatgcgcgccaacgcatgttctcatatgcggagcgtttagcagcccttaaaaagcttttcatgttgcttttaaaaagctacgacgggtgtggaaattagatttgtgacgctttatatatcttttttttatatcgtctggggtacagcatggttttaggattttagaagaaagcagtaattttgtaagaatcgaagaacggggggatatttataattttcatattaaccttgtctttgtttgcttttgaaattatgaatacttcgaaagataattatcttgtgcgcattccattctggcttagactgggttgagctaaaaatgatttgaaatacaaatttttaggtgtccgctgatatataaacagtatgatgtttttgcacttttttccctgaagttttccttgttgtctcgcttgccaatgctgaacaaagtagccaaaggacctttacttgaagctttgagagcggaaaatatattcggggacaattgctttaagtgtgcactaggcttggctagatgcccgtgccaaactttctttggaattgatcgctggccttagccaaaagtggaaaaaagaaaggataggatagtgccgcacgtattaagggtcttcttacaaaaggtaactgatattaattcatttgcatactaagcaagctaactcatctgtttattgcaaacaagcgccaattgaagttttatcgaagctcag

SEQ ID NO: 26648 - DNA, 879 bp, DROSOPHILA
aaacatcgaaagtgcacaatcgtttgttatctttgtacgaaaacaacggtgatttccacacaggcataacctgcaagagaaagcccaaaatgcccagcatcaagttgcaatcttcggatgaggagatctttgacacggatatccagatcgccaagtgctccggcactatcaagaccatgctggaggactgcggcatggaggacgatgagaatgccattgtgccgttgcccaatgtgaattcgacgattcttcgcaaggtgcttacctgggctcactaccacaaggacgacccccagccaacggaggatgatgagagcaaggagaagcgcacagacgacattatctcatgggatgcagatttcctaaaagtcgaccagggcacactgtttgagctgatattggcagcgaactatctggacattaagggccttctggagctcacctgcaagactgttgcaaacatgattaagggaaagactcccgaggaaatacgcaagaccttcaacattaagaaggacttttcgcccgccgaggaggagcaggtgcgcaaggagaacgagtggtgcgaggagaagtaaagcgcggcatttcgcgggaccaacattaagttgaaacagctaggggattcgggaacgaattggatttgcagcattgcaactttacttagttgctactttcatttacatttttttttatttttaaccccagcagagactcgatttaaattgtgtataaatgatctgttgctgatttgattcgcggggttcattttttgtcgtaaatatatctcatatacatacatatgcgagattgtaacactctctttaacctattggagtaacacttgatttcactttaataaatataactacccaacac

SEQ ID NO: 26649 - protein, 162 aa, DROSOPHILA; identical to SEQ ID NO: 26646

SEQ ID NO: 26650 - DNA, 2670 bp, DROSOPHILA
gaattaactggccgtgcctggtattatcagctcgggaacatttcacggcaacgacggccacaacctcatcatcctccgcctcctccccctaaccaccacccatcccattccatctcatcgatgttgtctctcgatgcgataagtcaacaaatcgatgctgttgtttacgcttcgggctcagccttataaagaacatccgaattgtacacagaagatttgtatttctattttcgtttctctatcgaagttgtctgcagattgcagttgaaatctgttcagtttgggattccagctagtgcagatctaaccttgtaatgaccgccatttctggagttcattaccgggcgtatagttttatttgcccggaaagatacaagaccgataaggctatctagtgcattttagtctcggattttacggcgaagtggtgcaagggattacgcccgggcagcttatatattatagaacggaaaacttggctgaacttgaacgcttgatcatgtttggcattcatgcgcttatcacgatgcccggctggcgttttacgtgattcttgatagttgtcgtcgccttagccggaatctgcaataacacattcgcaccgggagaacaaattagtcagctccatcggttgtagcggtgcagcaatgcgatgcgatccgatccggccggcgatagtggtaatgatggtgagataacccggccgaaggtcgccgaattacggttggcatatttatagtggcgaactgtggctattatgtcgcagaagtctatagtttgacgtgattaaattgacgcagagcccgcaggcgaaagattcgtgatgcaagcagattgttgggaaaacaacaccgttattaacggtcaatagcagagctgggctgccagactgcagagatcactgggtcgatagcattgagatcgatagcggacaggtgtcatcactggccgctcgagtgaccgtatgttcccgcatttgttttgtttgtttatagcaattatggatccttcaattattgaatttattggcgaaaaatgcatgatcagcataataccgaacttcagcaacgagcctctgcacctgatatacggacctgtgggccctttccgagccggttttcccgtcttcgtgcccctgtggatggccacgcatctgcgcaagcaacaaaagtgccgaattgtacctccagaatggatggacatggatatattggaggaaatcaaggaggaggaaaagcgctcaaagtatgtatgatgtgggtatgcccgtggaaagcaaatcttattctccgcctgcccataggttctttaccaaaatgccctgtgagcattacatggtagtggcccagttggtcatgagcacggctccggatgacgttccgcgttgcgaggagctgcgcactgtgatcaaggacatcttcgacatacgcgagtccaagctgcgcacttcgatcgacgcctttatcaagggagagggcacatatgcaaagctagacaacctcacgcttctggagatccacagcgtgagacccattctgccctattccctggaccacatagcacggtaccagcgcacggccactgcgtctcaaagggacacctccatgctaagtgcatccatggcaggctccagttcgggtccgaacagtaactctctgttttctcagtgattattccagtcaaacaacattgttgggaacatttaagataatagatttagttattagcaggagcttatgtagcctgtagtcattaaacctctcaaaagttcaaaaatatttgtatgcttaaaattaaatataaatgctttcagaaaattaaaaaaagtaattagaattagaagtttttgataaggcatttcaaattccgataaatttctttatcgatatgcgcttatctaacaggactgcgccttacagcacgacagcaatttaacagcagctgctatcatataattgcactgtatccctggttttccacgaagagaataacaataacttttttatacaaataaataaggataaagcgagatgagcgagtctgcggtagcggtggagccggaagaaaggatggttgctaacaacaaaatccatttctccaaggaggtgaagcaggtcatcgacaaggtgagtcagtggaacatatgttggtagcaattaccaacccaattcgaatgtccataaaaggttctcaaaacggacgatccgatggatgcgccggacttcaacactgtggactacatcaaccagctcttccccaacgagcaatcgctggccggtattgatgagaccatccaaaagatgcagtgcgaggtgtccctgattgatgacaacatccgatccgtggttcgtggccaaacgaacaccggccaggatggacaactggcactgtgcgaggctcaaaaggttatcagctccctgttcagccacatcatcgacgtgaagacccgggcggagcgcaccgaggaaatggtcaaggagataacccgggatatcaagcagctggactgcgccaaacgcaatctaaccgctgccatcacaacgctgaatcacctgcacatgctggtcggtggaattgaaagtctgaacaaattgatcgagcggcgatcctatggtgaaatccttaatcccctccaggcgattaccgaagttaaccagcacttccagcagt

SEQ ID NO: 26651 - DNA, 612 bp, DROSOPHILA
atggatccttcaattattgaatttattggcgaaaaatgcatgatcagcataataccgaacttcagcaacgagcctctgcacctgatatacggacctgtgggccctttccgagccggttttcccgtcttcgtgcccctgtggatggccacgcatctgcgcaagcaacaaaagtgccgaattgtacctccagaatggatggacatggatatattggaggaaatcaaggaggaggaaaagcgctcaaagttctttaccaaaatgccctgtgagcattacatggtagtggcccagttggtcatgagcacggctccggatgacgttccgcgttgcgaggagctgcgcactgtgatcaaggacatcttcgacatacgcgagtccaagctgcgcacttcgatcgacgcctttatcaagggagagggcacatatgcaaagctagacaacctcacgcttctggagatccacagcgtgagacccattctgccctattccctggaccacatagcacggtaccagcgcacggccactgcgtctcaaagggacacctccatgctaagtgcatccatggcaggctccagttcgggtccgaacagtaactctctgttttctcagtga

SEQ ID NO: 26652 - protein, 203 aa, DROSOPHILA
MDPSIIEFIGEKCMISIIPNFSNEPLHLIYGPVGPFRAGFPVFVPLWMATHLRKQQKCRIVPPEWMDMDILEEIKEEEKRSKFFTKMPCEHYMVVAQLVMSTAPDDVPRCEELRTVIKDIFDIRESKLRTSIDAFIKGEGTYAKLDNLTLLEIHSVRPILPYSLDHIARYQRTATASQRDTSMLSASMAGSSSGPNSNSLFSQ

SEQ ID NO: 26653 - DNA, 3215 bp, DROSOPHILA
atctgaagaaaaacacatttaaatttccttatattgaacgcaatctattacttacctttgaacttatcaatgtgcgcgtagtgaacttgcagcacaaggtacttgattggcgagttcttgcccaccttgaaacccactccctcgggcagatttaacttttgggcgtctctggcccaagcgtatacgatctgttgagaggtaagtgttagtccagtaggtgaaattgtctattagcacatttggcagttagttaaaggaaaaactcgataaacaggttcaaaactcttattaaactgtgctgactgtcaaggattgacctattaaaacttagccagttaactcctaattatccgcgcatttcgatctttattcatatgccacatcaatcgttttgaaatgttactatatatgagttcgatttttgtgtcaagaacaagacaaaatttgactttaaaactatctttccgatttttccttaaaatttataatttgtctatcagaaagctgcctagtatgtccgcttcaatttgctgcagatgcaacgagaagatttggccacgggcagtttgcagcttgggtaagacgtaccatccgcaccacttcacctgcaaggagtgcggcctggtggttgatcctaaactgtttttcgcggtggacgacgacgtggtctgcagcgagtgctatctggacaagcatgccgctcggtgctccgcctgccggactccgatcctagagcgcggcgtggctgctgcggagcgcaagtggcacgaaaagtgtttccggtgcgtgagctgcagcaagtcgctggtctcggcgagcttctttgaagtcaacggatacctgttctgcaaggcgcacttccgggaactgttttcgtcccgctgcgcaggctgtgagaagccaatcgatcgtcgagccgtggtcgcgctgagcaccaagtggcatgccaagtgctttaagtgccaccactgccgcaaaaggatcagcgcacgggaattctggatcgagaacggtcaacccatttgcgcagcctgccaaactgtagtcccgagtccccgaaatttgtcggcccaataaatgtgtggtgtctatctgggggcctatttggacatttctttttcttttaatacctgggaattggagtggggtccgcaaggactggcagactcttcttgggaagctcggttcatctcgccacagttcctgtgagcaaaaatgtgcgtgttatttactagtctgaaaacatcacttgcaactcaccaggtggtcttcgaggttccgggctctccgcatccgtagagcagcatatggtgggccgtgttcatcgtggcattaggattgaagccaactatttaagatagaaaggttagttgaagtatttaaggaatgaatctcattcgaaaggacgtaccaatatagtaggtggtagttgggtcgaccttgatgggcgtgcacaagtacagatcgggctatatatgtacacatatatatatttgttagttttgttagagagaacaggcatattggataagtcaacaagtattattcaaatgggagtatggccttcagtgggccgtttgccctttttcgccaccctcgtaaaaacaaattcgtatctacggcgcaggttcgagaagtgcaatctacaggtttcggtttcagggccttacatgtgggtggcgaattgtgtgtattcgggtacaactgaacatatggaaaaatttgcacagtactcttatgggttttccccgcgcggaagatacgggaaaaaccagagcctatatcgaggacttttctaatctgattggaattgtatgcgcacagctgcagctgggcgaatctgttcatccatatggagcgaactccatgatgtatatgtatggcgtttttcaggaacctggacttacggtctggggcgaaacgttgggcatcaggaatggaaacgaagccgttgcgcctgttgcggagttcgactcgagattctgttgataaagggagttttggtaatccccctctttcacaaggccatccacactgatcactccgataagcaggagcagccccacggaagcggctatttcggatatgcgtggcattttcaccgtattcgaactatattcgagtgtgcactgcactgaatactttgtggaaaacgaaaaaaaaccttcctgtttggaagaacaatacgttttgtattgctctctccgatatttttccacacgtagctaggcccagtttatatgtaagtaagtgcgttctaggcagcaatcgatacccagagccattatatcgatgacggcgccagggctgcaggctaagggttagcgggacattcaaatatatataacttgttcgcattaaagtacataaaaccaagtgtaattttcaacctttcgaatacagtgatttaaagacacctcaacgcaaaaggaaaccccacaaaagccagcccaattcaacgtgtctgcgttccgttcgacccactggggaattccccttttcgcatgcgccattcaattgattttctacgagcagagttcccaatgtttacggtgcgctcatttggttgtagctgtaggcctcgagttggaaccgctgggacttggaaaacatacgacgcttaaatggaggatcagggcgacgtgacagaccaagccgctggtaagctgagtagttcgaatgcccagtgctccagaaaccgatgtgctaatggtaaagctatatagatgtacactcaagagcggtactaaattatttacaaaaaatcgtgtaattcccagatgaccccattatgggcagccacagtcagagtcgccagaactcgtccggcatgctgaacatgatggacgccagctccttcagcatgcccccccccaatctgcactcctcaaaggtgatcaacccgaacaaggcgatattcacaatcgacgcgaacacagggcaaatttttatagtgaacaacaaggcctgccagctgctgggctacacgtcgcaggagttgaggaacaagggattcttcgacctgcttaacggcaagacagagagccacatctcctccctggcggagatgcagatcgaaggcgatgagggccgggtcgtcctgctaagtggaaaggtcatcgagatgaagaccaagtcgggcggcaagatcctggtctctctctggatccggcagatcagcagcgatggccgacacatagccgtcgcggagcctg

SEQ ID NO: 26654 - DNA, 657 bp, DROSOPHILA
aaaaatatcggagagagcaatacaaaacgtattgttcttccaaacaggaaggttttttttcgttttccacaaagtattcagtgcagtgcacactcgaatatagttcgaatacggtgaaaatgccacgcatatccgaaatagccgcttccgtggggctgctcctgcttatcggagtgatcagtgtggatggccttgtgaaagagggggattaccaaaactccctttatcaacagaatctcgagtcgaactccgcaacaggcgcaacggcttcgtttccattcctgatgcccaacgtttcgccccagacccccgatctgtacttgtgcacgcccatcaaggtcgacccaactaccacctactatattgttggcttcaatcctaatgccacgatgaacacggcccaccatatgctgctctacggatgcggagagcccggaacctcgaagaccacctggaactgtggcgagatgaaccgagcttcccaagaagagtctgccagtccttgcggaccccactccaattcccaggtattaaaagaaaaagaaatgtccaaataggcccccagatagacaccacacatttattgggccgacaaatttcggggactcgggactacagtttggcaggctgcgcaaatgggttgaccgttctcgatcc

SEQ ID NO: 26655 - protein, 145 aa, DROSOPHILA
MPRISEIAASVGLLLLIGVISVDGLVKEGDYQNSLYQQNLESNSATGATASFPFLMPNVSPQTPDLYLCTPIKVDPTTTYYIVGFNPNATMNTAHHMLLYGCGEPGTSKTTWNCGEMNRASQEESASPCGPHSNSQVLKEKEMSK

SEQ ID NO: 26656 - DNA, 4229 bp, DROSOPHILA
tggaacctgtcttccagcccggacttgaccatgtaccatcccatcagaccttgcaggccaatcagtgtgcccagcagcaggacgctcttcttggtcttcgcacagaagtatccctttctccagaagtaaacagcgggcaaaaggaagaacccgccgatggcacgaccccacatcctgtgcatgtactccatcatgaaaatgaacttgaactcctccacggtcatattcacattctttctgaaagcagaagtttgcatgtagttcctggcgttggatgaatctggggagtactcacagcttgtactctgggtattgctggtagagattgaactcctgcacccattcctcctgggttcggggcatacgttcacccgtcagcttccaagtgaccatggacagtccggactctgtcagtcgggttactccgcctggaagagattcactttcgcaaggaactacaaactttacattttgttattggttacctagaccaacggccacgaagaccatgccgctgactcccaggaaccatcttccgacggtcttgtcgcttttcggagtgctgatgggctttatcactgggatttcctgaaaggtgcggcattaacaaatattactttataaataaaaacatatttttatatgtaatcagtgggatattaatgcaacctttatcgctgtttgcgcaatcgtctggtgaagtcgggggccgggtactactagctttatgagattggttctcttctggagcaatcgcagcattgtgttatttcaagtttggagagattaacttaagcttacagcaaatattaaaggatatattttgttttttaactatatttacaaagccgctaccaagtgtgaccgcagcagtggggtatgcgcatatactaaaatcattttgaaaagtaccggcgaatgttatcgactcgatagcctggccacattatatcagttttgttaataaaaacaacttttgcggcttctgatttacaatttcgccaaataaaatggaaacaatattgaacacgcagttcgatcagctgcaaaaggccatagagggaattaaggaggcgaagagcaaggtaagtccgatttccgtgccagagtacagctctaaatccgtccacatccgtcacgagcaggggcaatcgacggatgaggctcgcattgccaccaccttgatgttcgtggctctgaagcacgccaaccgcgaggtgaagcacaagatcaaagcggggcgcgacaagctgcacctggaaaagtgcaaggtggacctcagccggctgcagctgcagaatcttctgtacgaagtgagccacctgaagaaggagattgtgcgctgccagaagttcaagagcagggacaccagcttggagctgctctcggaagccgagtactccagcgagctgccagacatgcccaacgacgcggaggagctgtccagccacaagcagcaccttcatcgcctcgactgcgagctgcgtctgcggaaggcactcgacaagcagtacagcgccctgctgagctccaagcaggaactgctccaggacaatcttagccacgcccagcggtacgtctccttcgcacccgccttgcgcactctgcagagcgccacaaagccgctgcacgatgcactccagctatccctggacgtggaatggaagctaagcgcagtggtcaagtacctgcccaagccgctctacgttttgttcattgtcctgcaatcgctgcagcgggtcagcgaggagcagtccttcaccgccgaggtggttggctatgagagcgaggctcaaatgcaggagttgcttaaggagaaaaagtgctccacattgaactacagacagactaaaaaggaaagtggagaccgggaaaagattgccgataaaaacaacttggacgactcactcgctcctcacccactacacatttgtttgacggtaggatgacatggtttgctcattccaaaacatttattaacctaaactttaaagattggagcggctggatcgaatcagctcgttttgcagattcgctactttgattttatcaagtgtgccactgtctggggccaacttaactgctccaggaatgccaacggccaggggtaagtttggaacacacctaggaaaaaatcgcataaataactaggcattttttcacagtgacacaaactttgttcaccacctattgcggcatttgtaccccaatgacttgggcaatgaattacccattccgggaatccaatacgaggtaagaacttccttatccaacgttggacaaccaattaaattacgctctttcagctacgaagctcggatttaacagccgaggaatgtgtgcgctacctcaaggccaaggactacggaaaacccttctgttggctgcaaagtatgtgctcgattgcaaccgtcaacagttcgatgctgtacaaacacgaactgaacttgaataagaacaacaaggagattattgaccgcattgccaggcgcttgaactcttggcagcgtttaagccagcagattcgcgggctgaccttcaaggatatcgatttgtatagcttgcaggagaacatctatccagccggcctgtcgtgcagtctcgtccaatggactgccatcacacatgaggagcttcactcgcaaatttcagacgcactgaattcttcgtcagcggacaagggtattacgtacaactcttaccgcgctgtcatcgtccggggatcggccaaaatggagtgctttattagaataccgagtaactatccactggaaatgcctctatggattctgaatgtgcactggaacggatgccttaccgcgcaaaacaattcggcgatcaaggtttgaacttattcaggtattatcctccaattagcttttaaacttgtattcctcagatgatggagttctggaccaactccctgcagcccaaacatttggagcccaacgactgcatcctgtacgcgcagctcttccgcaccatctacagcttcgatatattcctcgaaaccgagggatccatgcaaaacaccattgagtacaacaaggagaagccttacataagcgccttcgccaagcggagccgctcacgcccctacaaatacatcaagaagggatcggtctacgcgttcaagcagtgacagttgaataacgaatgttgtacaacacaatgcgccaatgcggttactaaacgttctcacagttgcgtttattacgattagtaatacaataaataagtaacatttaaagctagctagctacgacttcattggcagttgatcttctgggaagaggtcgctgccaaggatccgggaggtagtgccgtcgcagaagggttctcaaccgcctcccgactctcgtccggcatcactttgtccacgacgtgcttgacgatcagcccatcgtcgcccagatagcagacagagtagccgtcgtaccaggcctcctgatccttcagcacctccttcagttgccagagcttgtacttccagaactggaacatgaccttcaggccggaaatgccgcgcactcgccaccttatccgcactgtgtagtcgtcctggtgcttcgtgatcttgagcacctcgaatttcacgtaggcgtacttcaggtggccaaccgttcgcaggatggcgatctgtttgacgtagtggtacaggcccaccgtgtgcttgcccgttatgttgttgtggaagattaggcccgggctgtaaatggagtagtctaggggctccacgaacagctttggtagcgtggtcctcagaacctcgtaggctctatccaggtcctcgggcttacgctcgttctccttagggttcccgggcagcctctccgctttggtgctctcgtaggcccttcgactttgctggaggttattggcggcatggctgtttaacaacttttgtggacacttcgccggcgcagacgcacttagccgcatggcggacgcccacgcccgctccttggagcaccagttggccatccagctgctccttcttattgatgaaatcccgaaatttcgcaacatcttgcaaggactttgtgtgctacttccttcaccggaactgggtttcctcgattcagatctgcctcgtctgcagatcacaccattcaaattgaacttagatcctggctatttttcgtttgcggccctcaggaatttgacgtgctcgtgtttaggtaacaacatttggaaataaaatactcggcaaaaatcatatggtcgtt

SEQ ID NO: 26657 - DNA, 508 bp, DROSOPHILA
gccaaataaaatggaaacaatattgaacacgcagttcgatcagctgcaaaaggccatagagggaattaaggagtgctttattagaataccgagtaactatccactggaaatgcctctatggattctgaatgtgcactggaacggatgccttaccgcgcaaaacaattcggcgatcaagatgatggagttctggaccaactccctgcagcccaaacatttggagcccaacgactgcatcctgtacgcgcagctcttccgcaccatctacagcttcgatatattcctcgaaaccgagggatccatgcaaaacaccattgagtacaacaaggagaagccttacataagcgccttcgccaagcggagccgctcacgcccctacaaatacatcaagaagggatcggtctacgcgttcaagcagtgacagttgaataacgaatgttgtacaacacaatgcgccaatgcggttactaaacgttctcacagttgcgtttattacgattagtaatac

SEQ ID NO: 26658 - protein, 136 aa, DROSOPHILA
METILNTQFDQLQKAIEGIKECFIRIPSNYPLEMPLWILNVHWNGCLTAQNNSAIKMMEFWTNSLQPKHLEPNDCILYAQLFRTIYSFDIFLETEGSMQNTIEYNKEKPYISAFAKRSRSRPYKYIKKGSVYAFKQ

SEQ ID NO: 26659 - DNA, 6385 bp, DROSOPHILA
cgaggccggcgtgaccctcatctccccgttcgtgggccgcatcctggactggtacgtggccaacacggataccaagaagttcgaggcgctcaaggacccgggcgtgatctccgtgacgaacatctacaactactacaagaagttcggctacaagaccctggtcatgggcgcctccttccgtaacgtgggcgaaatcaaggccctggctggctgcgatctgcttaccatcagcccagcgctgcttaaggagctggagaacgagaccgagtcggtggtcacctacctgtccgtaagcaacgccaagctgcaggacatcgagaagatcaccgtcgatgagagccggttccgctggctgctcaacgaggacgccatggccaccgacaaactttccgagggcatcaggaagttcgccgtggatactgttaagctggagaatttgattaagacctatcttaagtagatgttcctctgggtccgctagcaggtggaggatgaatacattcgtttttgaaaaagacaatgattttatactttaataaacactacaattaaaagagatgacaagattcagttgggagttatggaaattattaaatgggtgaataggtttggcatgcaaatagcatgattactcgttgcagatatggatacgaataataaatactaaaagtttacaaaataaataaaatttgcaaattatatcacagataaagatactttttttttgataccttatcataacaacttcaaacatgttttctacacgcccgtgtagaatatctatgtaagcctgtagagacggctgcttatgtaaagtatcggacgggtgtttctggatttcgctattctacatagctcgggatactttattttattattaatattcgctaaaatagcacatcgtcatttggcatagatgtttttggcccagtaacatatctatctacatcaccgcccgcactatccgataggcagactgactatcgataaaagtatctacttcgttgcatccctaggttgatacataaaataaaaaatatataaaaagtgagttagtactggtattaaaagtaatttttaagctacaaattgatgaattgcgagcacacagagactaagaacattgggaatccggaaaacagtggctggcgcgtcgggtgcgatagaattgcctgtttttcagaccccaaaagtcgctcccaaccgagtcgtgcacctatagtcttggcccgaagttgctcccatgaataaaaatgttcggtaatttcacggtaaacaataaccattgtcgaacgcagggaatagtcgcgttcgcacacgtaattgccatcgcgcagagatgtgattcgcccctgcagcccctcgatctcgaccgacctcccgattttcggacgtcctgcgtcctgcgacctgcgacctgcgtcccatgtccttaaacctgaaatcagtgaaaaatcgttcgcgcatgaatatccaaaatacaatcccatccatcgaattcaatccattcgaatccaaaccaatccaagcagatgcgttgcgatgcgattccattccattcgattcgattcgatccgattcgcgatggtataggtataatatagtttttctaaccaagtgtcaaagaaatggcaaatatttcggattcggaggcacggagcactacgtattgatatatgtacatacatttatttatgtacatccatccattcacacatgcgaaccgagaacttgtgtatatatctaaatacatacgcacgtatatacgagtagatacacaacggtgtgtactcatatctgtgagatatatatgtgcccgtgtccgtgtccgtgcccgcttagatcccgattccgatgccgatgaatttatgtacatatatttacattaaaatctgcatatctgccatatctggcatatctgccaccaccccctccgcctatataggtatatgtgtagggtatagtacgttcatcttcctgcgactcccgtcggtcggcaataattgctagattaaatactcttaatattcgcgtgcctacactcatccgtaaacccacatacgagctaatcgaatccgaatccgcgtatcggacccatccattccattcgagcctcaactgcagatggaattatgttgggttggtatctctatatacatgcgtacctgctgcccagtatgcgcgagagtgccaccctctccgcccccttcttcacctgttacactacgccgatgttgtggatgtcgatgtgaatgagaatgtgaatatggctgtgaatatggatgtgaatatgaatgtgatgaattccaatcgtccgacgcgaatgtccaacgcgaatgaacgcgcgttgcgtggagtaatttttgattttgattttcattccgattccgatgctatgcgagcgcttttgggacccgaaacccagtgactcacgggactttcgtgggcggcaatgtcagcggcgtcgccttggcttagtaggcacccattttggtcgctacactcgcgcgtacgcggatgatatgggggcactgaagtggattcgggattctatgcaatcgaaatgggtttctgctggagaatctcagttagtgggaatagaaagctcgaggatcgttagttctgaaagttctgttactcatttttccatctactataccattgtacgaatgcagcctgctgcagagatccactgaagcgctgagccaacgccaacggtggtgccactgagatcggagatcggagatcgcagaccggagaccgacgagcacacaagggattgtggtttgatccgaggaacccaagcactcagctatactggagcagaacggagaaagcacaaggggtgccgagtcgcccgacgcgaaccaggaaaaccgagcgacgtgttggtggaccccgtgggctgcgatgggttgctttgggtcgcccacctccaagcagtcggacgtgaactcggaggactcgaagagccagaagcgccggagcgatgcaatatctagacagttgcagaaggacaaacagctctacagggccacacacaggctgctcctcctgggggcgggcgagtccggcaaatcaaccatagtcaagcaaatgcgaatattgcatgtcgacggattttctgactcggaaaagaaacagaaaattgatgatattaaaaagaatattcgagacgctatcttggtgagttccatcccgccggccatctaagcccaaacacttgcttaactccttgccaatcccttacagactattacaggagccatgagcacacttaatccacctgtagctttagaaaagaaggaaaatgaacccagagtggagtacattcaggattatgcatctagtaagagcctctgccgccccaacttaagttgttatcaaccattatctgccccgcaggtccggactttaattatcctcctgaattttatgaacatacagaagaactatggaaagacaagggcgttcttcaaacctatgagaggtcgaatgagtatcaattaatcgattgtgcgaaatagtaagtaatgcccacccacatttaacatcctgccatcgatgtgttgagccaaacgaatagttcttgtagcactacaaacagatttaattgtttaatttaattcatctcggagtgcatgccaattgttctgaaagcttaactatgtgtttcacttggaagtgcagaaattcaatgcgttggatcgaaagtatgcaacttttaattctaacaagtaatccgcttgatgaagtaaactttaaatatcgtcgctttgctgcagtatgactatctgaaagtagaaccacaacctaaacctactttcgcattccatatctgtctgtctgtacaataattactacaatatatgggttttagaatgagtccaattcttaaaaggagctagtagtcgaagtagtaccaactacgccatgcacatagaagtatcgtaacgatcatacttttccaagttgagaaggctttttgtttaattccccgaagaaacaagttgctaaacaccaagtcccaattttccgtagtttatgccagctaatccgcatttgtacttgtatctaagcttgattaaggcactgaaaccgaatttgtacttacttctacacttgatattctgctttgaagcttcctggaccgagtgagcacaatcaagaatccaaactacacccctaatgagcaggatattcttcggtgccgtgttttgacttctggaatatttgaaacaagatttcaagtggacaaagtaaactttcagtaagtgtaatcccaagtgatatcgcaatattttagtttctattccattctaatgatgtgcattcgcgtgcagcatgttcgatgtcggtggccagcgggacgagcgtaggaaatggattcagtgtttcaatgatgtaactgctatcatattcgtaactgcgtgctcaagttataacatggttttgcgggaagatcccacccagaaccgacttcgagaatctttggatttgttcaagagtatttggaacaacaggtgaaccgagcaatttggcgccatctcgacaaatggaaactaacgagttgttctttcagatggcttcgcacgatttctattatactatttttaaataagcaagatttgttagcagagaaaattaaggctggaaaaagtaaattgtcggaatatttctccgagtttaacaaataccaaacgccaagtaagtaaaatagtataacccatagtagaggccaattgagggcgagggagtcatcagatcaaccgactcagatctggccaagaaattcgcaattccttttcaaatttgcaaaccgtgcccaagttaacttaagaaatttaatggataatgtattttgtctaatttcaaatgtgctgtcgacacaggtgacgcaataatggaatccaatgatgacccagaagtaatacgagcaaaatatttcatacgagacgagtttctggtgggttatatcacatctccgtttcttcctccacctatctaactagccttaatccttaatgggatctctttcttatatagcgtatatctaccgctagcggagacggaaaacactactgctatccacatttcacatgcgccgttgacacagaaaacattaaacgtgtgtttaatgattgcagagacattattcaaaggatgcaccttcgtcaatatgaattgttataggttatccccatcgccgtaatgcaagtaaataaaaatattaatgacttactgttttaaatataattatcaaatgtaatttgtatttaaatagtcccttgattaaaacaaaaaattcgctgcatttagatctggtatgacctttcacaaaactcaacattaaagaataataaataaacatgttaataacagacacgcttgtttcgattattttggctattctaccaggatgcacctgctttattttctatagtcccttgacatgaagcattttagagtatttccgctatcagagtccgtatccatatccatgggcatttacattcacgcgctgtcgaaggtatcactagacgagctggttgaggatgctgaagctggcggaggccttgtcgatctcgtcgaagttccgcttgagcttactgctccaggtgtccttgtacagggggtccatcctcaccaggtagggcaccaggtcccggtgatggccagacccgatcttgccggccgcgcactgcttcaccgagtacttcgtcttgaactccgactggctgcactcgtagcagacgaccgtttgtccattggcagccgaaatcaatctggggatcagggcatatgtttcagtgattgggaaggggattagtgagttcagtgagtaatggcaaataggcgggcaagcaggcactttggctgccggtatagccacgtattattcggatctgttatctgcatatttacatacattatatatagagcctatttcgataacatccggataagacctgatagcagcagccgagtctcagatatctgatagtactacatataaacctgtcgcacgatgggcatattcacgtgccaccatatcactcacctcactataaacggtccatcgtacttcttcgagccagctttttggggcagcatgtgttagcggtggtaagggattagtgtaagtctagatttttggaatttacatgaatgactctcctctggagggcgaaagtaaaactctttacaaatgcaataatttattaacaattaggagctacatcattttatatgcacatataaaataaagaccaggctgcttatttacatttcagtttcatttcggtcctcgatattgtcaaagtcaatggagtggtgcggaagcggaagcggaagttgggaatgtggcggtttctagtcgcttagg

SEQ ID NO: 26660 - DNA, 1632 bp, DROSOPHILA
ttcgttgcatccctaggttgatacataaaataaaaaatatataaaaacctgctgcagagatccactgaagcgctgagccaacgccaacggtggtgccactgagatcggagatcggagatcgcagaccggagaccgacgagcacacaagggattgtggtttgatccgaggaacccaagcactcagctatactggagcagaacggagaaagcacaaggggtgccgagtcgcccgacgcgaaccaggaaaaccgagcgacgtgttggtggaccccgtgggctgcgatgggttgctttgggtcgcccacctccaagcagtcggacgtgaactcggaggactcgaagagccagaagcgccggagcgatgcaatatctagacagttgcagaaggacaaacagctctacagggccacacacaggctgctcctcctgggggcgggcgagtccggcaaatcaaccatagtcaagcaaatgcgaatattgcatgtcgacggattttctgactcggaaaagaaacagaaaattgatgatattaaaaagaatattcgagacgctatcttgactattacaggagccatgagcacacttaatccacctgtagctttagaaaagaaggaaaatgaacccagagtggagtacattcaggattatgcatctagtccggactttaattatcctcctgaattttatgaacatacagaagaactatggaaagacaagggcgttcttcaaacctatgagaggtcgaatgagtatcaattaatcgattgtgcgaaatacttcctggaccgagtgagcacaatcaagaatccaaactacacccctaatgagcaggatattcttcggtgccgtgttttgacttctggaatatttgaaacaagatttcaagtggacaaagtaaactttcacatgttcgatgtcggtggccagcgggacgagcgtaggaaatggattcagtgtttcaatgatgtaactgctatcatattcgtaactgcgtgctcaagttataacatggttttgcgggaagatcccacccagaaccgacttcgagaatctttggatttgttcaagagtatttggaacaacagatggcttcgcacgatttctattatactatttttaaataagcaagatttgttagcagagaaaattaaggctggaaaaagtaaattgtcggaatatttctccgagtttaacaaataccaaacgccaatcgacacaggtgacgcaataatggaatccaatgatgacccagaagtaatacgagcaaaatatttcatacgagacgagtttctgcgtatatctaccgctagcggagacggaaaacactactgctatccacatttcacatgcgccgttgacacagaaaacattaaacgtgtgtttaatgattgcagagacattattcaaaggatgcaccttcgtcaatatgaattgttataggttatccccatcgccgtaatgcaagtaaataaaaatattaatgacttactgttttaaatataattatcaaatgtaatttgtatttaaatagtcccttgattaaaacaaaaaattcgctgcatttagatctggtatgacctttcacaaaactcaacattaaagaataataaataaacatgttaataacagaca

SEQ ID NO: 26661 - protein, 385 aa, DROSOPHILA; identical to SEQ ID NO: 5169

SEQ ID NO: 26662 - DNA, 7149 bp, DROSOPHILA
acgaataggtcgtcggccaaggaggattcaggtgtaccaacgggtcacgtgcatcgtgcaagcaaacgtaacttagaaataggaatagaaacggggagcagcgaacataagcgttggcaacttgggcctcgtggatcccagtcgtccggtttcgtagagccagcacgttttagttctgcataatttatttctttaatgttaggtgtaggtaattttttgtttaatcaattcacagcgtctctaattgtataacagagtaaattatgtataatgttaatttaagtaggtattctatagaatgatagaaggattacttaactccttacaactgagacttgagactgacataagataagttacacatgttctttcatcaaaaggtccccaatattttctattttctatacggctaggctaggctaggctattcggctgcatgccttatccattatgtacgatcgccatttatgtacccgatcctaatcatttgctcatacatgtacatacaatacaatacgaatggagacggaaatggacaccgagacgctgttgcggcgccacgcccagatctggggagtcattatctacttaatatcttgtgctcaataaaattcttacagtaatggaatgaacgaaccaatatttgcattcggtaaatactcgtgggggattcaatggattcaattacgttaaacaagcccagggataggacgatactcttgaaacattaggacgctcgcttggtggaatcgtttaaacatcaacgcacagattcgacttggaaaggttatgggtattgtgggttctacttaatgggattaaacaaaaattttgttcttctgcatagttaagcctacactttagtattccagttactaaacacagaaacgaaatggttaagttacaaaagtttggttcaatacaaacagacatctcatttccagagacttggatttccctacacggttcttttggcaacccggtgaaattaaatgacgaaaactaactaatgcattcgaatgtgccggtgtggaactttcttatgtatatagagcattgtatgtacaaaaagcaatcctgctaaatttaatatagtaatatacaaacacagatatctatagggtagggtatacgcgtgttagataaatcgttagctcatagaaaatattgatcatttaacgctgtttgttcaaagccaaaagccaggagcgagtcagtcggcccatcttttggtgccaccagtcaattctgtgacaccgggtggaaatcagtagttgcagttgggaacaaacttcatggggttaaagtcgttacgttagatgtatataattgtgggttcttgtttctgtttatatttagtaacattttatactagaaattagaataatgaagttgggcttatggattataattatattcttaaagcatcatagcgtacagcaggccaaagaagacagcccacattaacacaatcccatgcatcttatatataggactctcaccatctgcgatttttctagcaacaaacttcaatgtctcatctaataaaactacaggaattgagaatttcatcacagttatccattcttctgcagacaacggtgtcacttggaagacggtctgtgggtaaaacgatactggcattagtttccgcggcgcagaagggcttatcattgccaaatacttacggagaggacatcgacgtaaagaataacaaagtgaagagtgaaggagagtgccattgatccaatcagccacaggttgcaccatgggggcatggtaatcagcgactggttctcggacaagctgtttaaacaaaggcgatcggttcgtatctatcgtgccgtccatcattcgttatctcactcacctgttcattgcgttcaacatttcgattgtcaccagcacggacagagccatggtcatcgcatgggggtcgctgaagatcttgcagtcaacgcccttgaactcgtcgccaccgcccaagcaggacagatggtgggtcagctgccagtaggacagtttgggtccctcatcagagaacacgaaccaccaggcggcggcaccgacggtggcagcgccgacatagaatccaatagccatgtaactaaaagttcgattgaggccaagttaataccgattaaaggatgtgtgctttttgagtaacccaccggaagaacaaccatccggaaatgagaccctcatcggccttcctggggggcttctccatgatatccagatcaggggggttgaagcccagagcggtggctgggagaccatcagtaacctgtgaccaagtacctattactaaccattttaagtagtaaataccccatcaagacgtaccaagttaacccagagcagctggacgggaatcagagcctcgggcaggccaagggcagcagtaaggaagatggagacgacctcaccaatgttcgaagagatgaggtagcggatgaactgtttcatgttgttgtagatagcgcgaccttcttcaacggcagacacgatggaggagaagttgtcgtcagccagcaccatttcggcggcagacttggcgacggcggtaccagagcccatggcaataccgatctcagccttcttcagggcgggggcgtcgttcacaccatcaccagtcatagcggagatttcgttcatgctctgcaggaactcaacaatcttggacttgtgctggggctccacgcgggagaagaggcgggagcgggcgacggcagccttttgttcggtgggggaaaggtcgtcgaattcacgacccgagtaggacttgccagtggtgtcctcatcctcggcgaatacaccgattctgcggcagatagcctcggcagtggccttgttgtcgccggtgatcacaataacacgaataccggcggcacggcagcggacaatggaatcgaaaacttccttacgggggggatccaacatgcccacaacaccgacgaaggtcaggttaacctcatactggtagaacttggtggagtcgcccagatccatctcgtcgggcttcatggggctatcggcaacggccagagccaggcagcgaagggtgtcgcgtccagtaccgtactggccggtcagggcgaggatcttggccttcagggccgaggtcagaggaaccttggtggtgccaacgcgggcgtgtgtgcaacgctctagaacaccctcgggggcgcccttcacgaacaacttggggccagtgcccaggcgggaagccttcaggggggtgcagtacgaggacatggatttacgatcgcgagagaactccagggtgaattccttcttccacttggtttcgatctcaccgcggcaggcgatggcagccgagcggcggtccaggccagacttgttcacgctgaagctgttcagtttctcagccagcacaatcagggcggtctcagtggcttcgccgaccttctcgaaggcctgcttgaactcattgtaatcaatggcggagtcgttgcacatgatgcagatggtggacagttcctgcagggtatcgtagtcagcagccttgatgcgctgaccgttgaggaagacctcgccgatgggctcgtaggtggagccggtcatctcgaattcgaggaagctgctgtcgttgccttcaaccttgtcgaagatgaacatgcgggaaacggacatttggttggtggtgagtgtgccggtcttatcagagcagatgacagatgtgcagcccagggtctccacggagggcagggagcggacgatggcattcttcttggccatgcggcgggtgcccagagccagacaggtggtgatgacggcgggcagaccctcggggatggcagccacagccagagcgacggcgatcttgaagtagtagatggcacccttgatccaggagcctccgtgagcggggtcgttgaagtggccgatgttgatggcccacacggcaacgcaaatgacggaaatgaccttggacagctgctcaccgaactcgtccagtttctgctgcaggggggtcttgatctcctcggtctcggacatctcagtacggatcttgccgatggcggtgctcaggccagtgccgatgacgacgccacgggccttgccggctgcgacgttggtgccggagaacaggatgttcttcttgtcctggttgacggcgcggggatcggggatggcatcggtgtgcttgatgacggagaccgactcaccggtgaggatggactgatcgatcctaagggtggtcgagtagatgtgggtgatacggatatcggcagggatcttgtcaccgacagacacctcaaccaggtcaccgggcacgatctctttcgcgcgcaccttctggatgccggacttgtcctggcgcaccaccttgcccatctcaggctcgtactccttgagggcctcaatggccgactcggcgttacgctcctgccatactcccaccacggcgttggctatcaggataagtaaaataactaggggctctacaaatgcagtgaacgtttcctcgtgttcctcaaacagggcgagaacctggggattgcagaggggaagagtgtggtcgtaactaagtttttgagggtgggtttctttgtgctgctgcacttacaaatgagatgatggctgccaacagcagaatcttcaccagcagatcgtcgaactgctccaagaccagctgccagatgctctttcctgtggaatacaatcgttattataatgtatgcatacagtgaagtgggggtggggggcaggggatctgctcgggttgtgttcgcaccttcctcagtcggcaactctgtaacgataagaaaacaaacacgtcagtcgattcggtctcggaatgtggaggggaattacgcgcgactctcaccattgggtccgtatttcttctggttagccttgatctggtcgagggttaagccgcgctcggggtccgttccgaagaagttgagggactgttcgacggttttcgagtgaccgtcttccatcttgattcgttatcctcttcgttcagtggcctgtgtccagattccggggcgattcaggtggggatttgaaagtagacacaaggcaaggggctcattttaattctctggcagggctatttagctattttgccgttttctgggctctattcaacgactgactggaatagcaagtgtgtatgcacgtatgtatgcacatacatctgtactggcatgtacgtttgcagttaaaactacctcattaggttctgaataagtggtcgtacatgtgcatgtgcacggcactcggctcacgggtactttccaacatacgcacatacacaggtgctacatgctaattccccgatttcaggcacttctgatcgggcccggactggccactaaagtcgcgcagttatcgcgccaacttaggatcggattgtgcggatcgggtcggagaatatgctggaatattgcattactatgatgggctgttaccctggccaaatcgctccgcttatgagattcacacacgtgtcacttcgcacaacagacgcagttttcgtttttctattctcagtttctgcgggggattgggggatctggtccgtaatacgggtgctctgctcctacgttaacctcgctaaacgacgcactgcgtgtgttaagtacttttttccactgactctctatataatataacccatggcgcttttttctgaatatgtgtgctgataactattgcactaagtaccaagccgcgatttactgcctatcgccgttctgcctcactatgacacgacattattcgcacaagacagggctgactgaaaacgtatatcgtccgagttacgttatttgtgcagagctgcctctttctccaacttttaagaattctcagtcctggcaattattagataattatcccaccttttagctcagcttctactgacgcgttcaatttgtgctactaaactgcgatagccggcgttatcgataactgagaatctcaactgcgatggctaactgttgagtttccgtgttcagtaataccgatagctgaggtgatataggaatttaaaactaatcaaagtttcgaaggaattcagctgtgctggaaagtttctttattggaaaatacctctaaccttataaatcaagttgttattgcgatcgaaaaccaaatgtttttactcccttctgtggtgtaaatcgaactgaaatccttatcacgaatgcttaaacttatttatacattgtcatattttcacttggcaagcgacagagacatccgcactattttggccacacaacaagcaacactattcttttcgcgcattttgtgctcaaattaatgagatcgagatcaagagcccgcaataaatagatctgggtgccaggtattcgccagcagcgacatttttaaattttaattttaatctttttcgcgaccagacactagaatcaggccatacggggaattttgaacggcagccaactcgcataatacttgaatattacgctggctacgtcacagaattacatacgtaacttctgataacgaggtttccaccagttgcccgcccacaaaaggcgttagttttcaaaaaactgtcaatcaatgcgctcgaatactacttatattttgagcacagagacgtgtgtttcgaaaacatcttcatgcatatagcctatatatacccctaaaatacacatgtgtgtgtgcattatggagcaaaaaatcgcctctgtccgagatgggctaaaaatagagtcctagcacccgaaaaatacagctcaattctgaacactcgtagatataaagatatgtactaggaccacataaataagtttgagtacatatacagagagacgatcgtagggagaaagattcctattctgcgcggttatatgtacgatttaacggcttatgatattgcgagcagagatatctccatgctaatggatgtcgacacttgtgcgatatgctgcttcccacgtccccgaatccgaatttctgattgacaagtccaccgatgggttgtataatagtgggtgggtgggttcaaaaataagtacaaatgattgggccatgatcctgggctgaatgtacttatagagctacacgtttctgtaaaactgtctgttggtttcagggatcttttgcaactgaaaggcagtcaaattcactaaccgatgt

SEQ ID NO: 26663 - DNA, 3564 bp, DROSOPHILA
aagggagtaaaaacatttggttttcgatcgcaataacaacttgatttataaggccactgaacgaagaggataacgaatcaagatggaagacggtcactcgaaaaccgtcgaacagtccctcaacttcttcggaacggaccccgagcgcggcttaaccctcgaccagatcaaggctaaccagaagaaatacggacccaatgagttgccgactgaggaaggaaagagcatctggcagctggtcttggagcagttcgacgatctgctggtgaagattctgctgttggcagccatcatctcatttgttctcgccctgtttgaggaacacgaggaaacgttcactgcatttgtagagcccctagttattttacttatcctgatagccaacgccgtggtgggagtatggcaggagcgtaacgccgagtcggccattgaggccctcaaggagtacgagcctgagatgggcaaggtggtgcgccaggacaagtccggcatccagaaggtgcgcgcgaaagagatcgtgcccggtgacctggttgaggtgtctgtcggtgacaagatccctgccgatatccgtatcacccacatctactcgaccacccttaggatcgatcagtccatcctcaccggtgagtcggtctccgtcatcaagcacaccgatgccatccccgatccccgcgccgtcaaccaggacaagaagaacatcctgttctccggcaccaacgtcgcagccggcaaggcccgtggcgtcgtcatcggcactggcctgagcaccgccatcggcaagatccgtactgagatgtccgagaccgaggagatcaagacccccctgcagcagaaactggacgagttcggtgagcagctgtccaaggtcatttccgtcatttgcgttgccgtgtgggccatcaacatcggccacttcaacgaccccgctcacggaggctcctggatcaagggtgccatctactacttcaagatcgccgtcgctctggctgtggctgccatccccgagggtctgcccgccgtcatcaccacctgtctggctctgggcacccgccgcatggccaagaagaatgccatcgtccgctccctgccctccgtggagaccctgggctgcacatctgtcatctgctctgataagaccggcacactcaccaccaaccaaatgtccgtttcccgcatgttcatcttcgacaaggttgaaggcaacgacagcagcttcctcgaattcgagatgaccggctccacctacgagcccatcggcgaggtcttcctcaacggtcagcgcatcaaggctgctgactacgataccctgcaggaactgtccaccatctgcatcatgtgcaacgactccgccattgattacaatgagttcaagcaggccttcgagaaggtcggcgaagccactgagaccgccctgattgtgctggctgagaaactgaacagcttcagcgtgaacaagtctggcctggaccgccgctcggctgccatcgcctgccgcggtgagatcgaaaccaagtggaagaaggaattcaccctggagttctctcgcgatcgtaaatccatgtcctcgtactgcacccccctgaaggcttcccgcctgggcactggccccaagttgttcgtgaagggcgcccccgagggtgttctagagcgttgcacacacgcccgcgttggcaccaccaaggttcctctgacctcggccctgaaggccaagatcctcgccctgaccggccagtacggtactggacgcgacacccttcgctgcctggctctggccgttgccgatagccccatgaagcccgacgagatggatctgggcgactccaccaagttctaccagtatgaggttaacctgaccttcgtcggtgttgtgggcatgttggatcccccccgtaaggaagttttcgattccattgtccgctgccgtgccgccggtattcgtgttattgtgatcaccggcgacaacaaggccactgccgaggctatctgccgcagaatcggtgtattcgccgaggatgaggacaccactggcaagtcctactcgggtcgtgaattcgacgacctttcccccaccgaacaaaaggctgccgtcgcccgctcccgcctcttctcccgcgtggagccccagcacaagtccaagattgttgagttcctgcagagcatgaacgaaatctccgctatgactggtgatggtgtgaacgacgcccccgccctgaagaaggctgagatcggtattgccatgggctctggtaccgccgtcgccaagtctgccgccgaaatggtgctggctgacgacaacttctcctccatcgtgtctgccgttgaagaaggtcgcgctatctacaacaacatgaaacagttcatccgctacctcatctcttcgaacattggtgaggtcgtctccatcttccttactgctgcccttggcctgcccgaggctctgattcccgtccagctgctctgggttaacttggttactgatggtctcccagccaccgctctgggcttcaacccccctgatctggatatcatggagaagccccccaggaaggccgatgagggtctcatttccggatggttgttcttccgttacatggctattggattctatgtcggcgctgccaccgtcggtgccgccgcctggtggttcgtgttctctgatgagggacccaaactgtcctactggcagctgacccaccatctgtcctgcttgggcggtggcgacgagttcaagggcgttgactgcaagatcttcagcgacccccatgcgatgaccatggctctgtccgtgctggtgacaatcgaaatgttgaacgcaatgaacagcttgtccgagaaccagtcgctgattaccatgcccccatggtgcaacctgtggctgattggatcaatggcactctccttcactcttcactttgttattctttacgtcgatgtcctctccaccgtcttccaagtgacaccgttgtctgcagaagaatggataactgtgatgaaattctcaattcctgtagttttattagatgagacattgaagtttgttgctagaaaaatcgcagatggtgagagtcctatatataagatgcatgggattgtgttaatgtgggctgtcttctttggcctgctgtacgctatgatgctttaagaatataattataatccataagcccaacttcattattctaatttctagtataaaatgttactaaatataaacagaaacaagaacccacaattatatacatctaacgtaacgactttaaccccatgaagtttgttcccaactgcaactactgatttccacccggtgtcacagaattgactggtggcaccaaaagatgggccgactgactcgctcctggcttttggctttgaacaaacagcgttaaatgatcaatattttctatgagctaacgatttatctaacacgcgtataccctaccctatagatatctgtgtttgtatattactatattaaatttagcaggattgctttttgtacatacaatgctctatatacataagaaagttccacaccggcacattcgaatgcattagttagtt

SEQ ID NO: 26664 - protein, 1020 aa, DROSOPHILA
MEDGHSKTVEQSLNFFGTDPERGLTLDQIKANQKKYGPNELPTEEGKSIWQLVLEQFDDLLVKILLLAAIISFVLALFEEHEETFTAFVEPLVILLILIANAVVGVWQERNAESAIEALKEYEPEMGKVVRQDKSGIQKVRAKEIVPGDLVEVSVGDKIPADIRITHIYSTTLRIDQSILTGESVSVIKHTDAIPDPRAVNQDKKNILFSGTNVAAGKARGVVIGTGLSTAIGKIRTEMSETEEIKTPLQQKLDEFGEQLSKVISVICVAVWAINIGHFNDPAHGGSWIKGAIYYFKIAVALAVAAIPEGLPAVITTCLALGTRRMAKKNAIVRSLPSVETLGCTSVICSDKTGTLTTNQMSVSRMFIFDKVEGNDSSFLEFEMTGSTYEPIGEVFLNGQRIKAADYDTLQELSTICIMCNDSAIDYNEFKQAFEKVGEATETALIVLAEKLNSFSVNKSGLDRRSAAIACRGEIETKWKKEFTLEFSRDRKSMSSYCTPLKASRLGTGPKLFVKGAPEGVLERCTHARVGTTKVPLTSALKAKILALTGQYGTGRDTLRCLALAVADSPMKPDEMDLGDSTKFYQYEVNLTFVGVVGMLDPPRKEVFDSIVRCRAAGIRVIVITGDNKATAEAICRRIGVFAEDEDTTGKSYSGREFDDLSPTEQKAAVARSRLFSRVEPQHKSKIVEFLQSMNEISAMTGDGVNDAPALKKAEIGIAMGSGTAVAKSAAEMVLADDNFSSIVSAVEEGRAIYNNMKQFIRYLISSNIGEVVSIFLTAALGLPEALIPVQLLWVNLVTDGLPATALGFNPPDLDIMEKPPRKADEGLISGWLFFRYMAIGFYVGAATVGAAAWWFVFSDEGPKLSYWQLTHHLSCLGGGDEFKGVDCKIFSDPHAMTMALSVLVTIEMLNAMNSLSENQSLITMPPWCNLWLIGSMALSFTLHFVILYVDVLSTVFQVTPLSAEEWITVMKFSIPVVLLDETLKFVARKIADGESPIYKMHGIVLMWAVFFGLLYAMML

SEQ ID NO: 26665 - DNA, 6916 bp, DROSOPHILA
acgaataggtcgtcggccaaggaggattcaggtgtaccaacgggtcacgtgcatcgtgcaagcaaacgtaacttagaaataggaatagaaacggggagcagcgaacataagcgttggcaacttgggcctcgtggatcccagtcgtccggtttcgtagagccagcacgttttagttctgcataatttatttctttaatgttaggtgtaggtaattttttgtttaatcaattcacagcgtctctaattgtataacagagtaaattatgtataatgttaatttaagtaggtattctatagaatgatagaaggattacttaactccttacaactgagacttgagactgacataagataagttacacatgttctttcatcaaaaggtccccaatattttctattttctatacggctaggctaggctaggctattcggctgcatgccttatccattatgtacgatcgccatttatgtacccgatcctaatcatttgctcatacatgtacatacaatacaatacgaatggagacggaaatggacaccgagacgctgttgcggcgccacgcccagatctggggagtcattatctacttaatatcttgtgctcaataaaattcttacagtaatggaatgaacgaaccaatatttgcattcggtaaatactcgtgggggattcaatggattcaattacgttaaacaagcccagggataggacgatactcttgaaacattaggacgctcgcttggtggaatcgtttaaacatcaacgcacagattcgacttggaaaggttatgggtattgtgggttctacttaatgggattaaacaaaaattttgttcttctgcatagttaagcctacactttagtattccagttactaaacacagaaacgaaatggttaagttacaaaagtttggttcaatacaaacagacatctcatttccagagacttggatttccctacacggttcttttggcaacccggtgaaattaaatgacgaaaactaactaatgcattcgaatgtgccggtgtggaactttcttatgtatatagagcattgtatgtacaaaaagcaatcctgctaaatttaatatagtaatatacaaacacagatatctatagggtagggtatacgcgtgttagataaatcgttagctcatagaaaatattgatcatttaacgctgtttgttcaaagccaaaagccaggagcgagtcagtcggcccatcttttggtgccaccagtcaattctgtgacaccgggtggaaatcagtagttgcagttgggaacaaacttcatggggttaaagtcgttacgttagatgtatataattgtgggttcttgtttctgtttatatttagtaacattttatactagaaattagaataatgaagttgggcttatggattataattatattcttaaagcatcatagcgtacagcaggccaaagaagacagcccacattaacacaatcccatgcatcttatatataggactctcaccatctgcgatttttctagcaacaaacttcaatgtctcatctaataaaactacaggaattgagaatttcatcacagttatccattcttctgcagacaacggtgtcacttggaagacggtctgtgggtaaaacgatactggcattagtttccgcggcgcagaagggcttatcattgccaaatacttacggagaggacatcgacgtaaagaataacaaagtgaagagtgaaggagagtgccattgatccaatcagccacaggttgcaccatgggggcatggtaatcagcgactggttctcggacaagctgtttaaacaaaggcgatcggttcgtatctatcgtgccgtccatcattcgttatctcactcacctgttcattgcgttcaacatttcgattgtcaccagcacggacagagccatggtcatcgcatgggggtcgctgaagatcttgcagtcaacgcccttgaactcgtcgccaccgcccaagcaggacagatggtgggtcagctgccagtaggacagtttgggtccctcatcagagaacacgaaccaccaggcggcggcaccgacggtggcagcgccgacatagaatccaatagccatgtaactaaaagttcgattgaggccaagttaataccgattaaaggatgtgtgctttttgagtaacccaccggaagaacaaccatccggaaatgagaccctcatcggccttcctggggggcttctccatgatatccagatcaggggggttgaagcccagagcggtggctgggagaccatcagtaacctgtgaccaagtacctattactaaccattttaagtagtaaataccccatcaagacgtaccaagttaacccagagcagctggacgggaatcagagcctcgggcaggccaagggcagcagtaaggaagatggagacgacctcaccaatgttcgaagagatgaggtagcggatgaactgtttcatgttgttgtagatagcgcgaccttcttcaacggcagacacgatggaggagaagttgtcgtcagccagcaccatttcggcggcagacttggcgacggcggtaccagagcccatggcaataccgatctcagccttcttcagggcgggggcgtcgttcacaccatcaccagtcatagcggagatttcgttcatgctctgcaggaactcaacaatcttggacttgtgctggggctccacgcgggagaagaggcgggagcgggcgacggcagccttttgttcggtgggggaaaggtcgtcgaattcacgacccgagtaggacttgccagtggtgtcctcatcctcggcgaatacaccgattctgcggcagatagcctcggcagtggccttgttgtcgccggtgatcacaataacacgaataccggcggcacggcagcggacaatggaatcgaaaacttccttacgggggggatccaacatgcccacaacaccgacgaaggtcaggttaacctcatactggtagaacttggtggagtcgcccagatccatctcgtcgggcttcatggggctatcggcaacggccagagccaggcagcgaagggtgtcgcgtccagtaccgtactggccggtcagggcgaggatcttggccttcagggccgaggtcagaggaaccttggtggtgccaacgcgggcgtgtgtgcaacgctctagaacaccctcgggggcgcccttcacgaacaacttggggccagtgcccaggcgggaagccttcaggggggtgcagtacgaggacatggatttacgatcgcgagagaactccagggtgaattccttcttccacttggtttcgatctcaccgcggcaggcgatggcagccgagcggcggtccaggccagacttgttcacgctgaagctgttcagtttctcagccagcacaatcagggcggtctcagtggcttcgccgaccttctcgaaggcctgcttgaactcattgtaatcaatggcggagtcgttgcacatgatgcagatggtggacagttcctgcagggtatcgtagtcagcagccttgatgcgctgaccgttgaggaagacctcgccgatgggctcgtaggtggagccggtcatctcgaattcgaggaagctgctgtcgttgccttcaaccttgtcgaagatgaacatgcgggaaacggacatttggttggtggtgagtgtgccggtcttatcagagcagatgacagatgtgcagcccagggtctccacggagggcagggagcggacgatggcattcttcttggccatgcggcgggtgcccagagccagacaggtggtgatgacggcgggcagaccctcggggatggcagccacagccagagcgacggcgatcttgaagtagtagatggcacccttgatccaggagcctccgtgagcggggtcgttgaagtggccgatgttgatggcccacacggcaacgcaaatgacggaaatgaccttggacagctgctcaccgaactcgtccagtttctgctgcaggggggtcttgatctcctcggtctcggacatctcagtacggatcttgccgatggcggtgctcaggccagtgccgatgacgacgccacgggccttgccggctgcgacgttggtgccggagaacaggatgttcttcttgtcctggttgacggcgcggggatcggggatggcatcggtgtgcttgatgacggagaccgactcaccggtgaggatggactgatcgatcctaagggtggtcgagtagatgtgggtgatacggatatcggcagggatcttgtcaccgacagacacctcaaccaggtcaccgggcacgatctctttcgcgcgcaccttctggatgccggacttgtcctggcgcaccaccttgcccatctcaggctcgtactccttgagggcctcaatggccgactcggcgttacgctcctgccatactcccaccacggcgttggctatcaggataagtaaaataactaggggctctacaaatgcagtgaacgtttcctcgtgttcctcaaacagggcgagaacctggggattgcagaggggaagagtgtggtcgtaactaagtttttgagggtgggtttctttgtgctgctgcacttacaaatgagatgatggctgccaacagcagaatcttcaccagcagatcgtcgaactgctccaagaccagctgccagatgctctttcctgtggaatacaatcgttattataatgtatgcatacagtgaagtgggggtggggggcaggggatctgctcgggttgtgttcgcaccttcctcagtcggcaactctgtaacgataagaaaacaaacacgtcagtcgattcggtctcggaatgtggaggggaattacgcgcgactctcaccattgggtccgtatttcttctggttagccttgatctggtcgagggttaagccgcgctcggggtccgttccgaagaagttgagggactgttcgacggttttcgagtgaccgtcttccatcttgattcgttatcctcttcgttcagtggcctgtgtccagattccggggcgattcaggtggggatttgaaagtagacacaaggcaaggggctcattttaattctctggcagggctatttagctattttgccgttttctgggctctattcaacgactgactggaatagcaagtgtgtatgcacgtatgtatgcacatacatctgtactggcatgtacgtttgcagttaaaactacctcattaggttctgaataagtggtcgtacatgtgcatgtgcacggcactcggctcacgggtactttccaacatacgcacatacacaggtgctacatgctaattccccgatttcaggcacttctgatcgggcccggactggccactaaagtcgcgcagttatcgcgccaacttaggatcggattgtgcggatcgggtcggagaatatgctggaatattgcattactatgatgggctgttaccctggccaaatcgctccgcttatgagattcacacacgtgtcacttcgcacaacagacgcagttttcgtttttctattctcagtttctgcgggggattgggggatctggtccgtaatacgggtgctctgctcctacgttaacctcgctaaacgacgcactgcgtgtgttaagtacttttttccactgactctctatataatataacccatggcgcttttttctgaatatgtgtgctgataactattgcactaagtaccaagccgcgatttactgcctatcgccgttctgcctcactatgacacgacattattcgcacaagacagggctgactgaaaacgtatatcgtccgagttacgttatttgtgcagagctgcctctttctccaacttttaagaattctcagtcctggcaattattagataattatcccaccttttagctcagcttctactgacgcgttcaatttgtgctactaaactgcgatagccggcgttatcgataactgagaatctcaactgcgatggctaactgttgagtttccgtgttcagtaataccgatagctgaggtgatataggaatttaaaactaatcaaagtttcgaaggaattcagctgtgctggaaagtttctttattggaaaatacctctaaccttataaatcaagttgttattgcgatcgaaaaccaaatgtttttactcccttctgtggtgtaaatcgaactgaaatccttatcacgaatgcttaaacttatttatacattgtcatattttcacttggcaagcgacagagacatccgcactattttggccacacaacaagcaacactattcttttcgcgcattttgtgctcaaattaatgagatcgagatcaagagcccgcaataaatagatctgggtgccaggtattcgccagcagcgacatttttaaattttaattttaatctttttcgcgaccagacactagaatcaggccatacggggaattttgaacggcagccaactcgcataatacttgaatattacgctggctacgtcacagaattacatacgtaacttctgataacgaggtttccaccagttgcccgcccacaaaaggcgttagttttcaaaaaactgtcaatcaatgcgctcgaatactacttatattttgagcacagagacgtgtgtttcgaaaacatcttcatgcatatagcctatatatacccctaaaatacacatgtgtgtgtgcattatggagcaaaaaatcgcctctgtccgagatgggctaaaaatagagtcctagcacccgaaaaatacagctcaattctgaacactcgtagatataaagatatgtactaggaccacataaataagtttgagtacatatacagagagacgatcgtagggagaaagattcctattctgcgcggttatatgtacgatttaacggcttatgatattgcgagcagagatatctccatgctaatgga

SEQ ID NO: 26666 - DNA, 3549 bp, DROSOPHILA
cacaaattgaacgcgtcagtagaagctgagctaaaaggccactgaacgaagaggataacgaatcaagatggaagacggtcactcgaaaaccgtcgaacagtccctcaacttcttcggaacggaccccgagcgcggcttaaccctcgaccagatcaaggctaaccagaagaaatacggacccaatgagttgccgactgaggaaggaaagagcatctggcagctggtcttggagcagttcgacgatctgctggtgaagattctgctgttggcagccatcatctcatttgttctcgccctgtttgaggaacacgaggaaacgttcactgcatttgtagagcccctagttattttacttatcctgatagccaacgccgtggtgggagtatggcaggagcgtaacgccgagtcggccattgaggccctcaaggagtacgagcctgagatgggcaaggtggtgcgccaggacaagtccggcatccagaaggtgcgcgcgaaagagatcgtgcccggtgacctggttgaggtgtctgtcggtgacaagatccctgccgatatccgtatcacccacatctactcgaccacccttaggatcgatcagtccatcctcaccggtgagtcggtctccgtcatcaagcacaccgatgccatccccgatccccgcgccgtcaaccaggacaagaagaacatcctgttctccggcaccaacgtcgcagccggcaaggcccgtggcgtcgtcatcggcactggcctgagcaccgccatcggcaagatccgtactgagatgtccgagaccgaggagatcaagacccccctgcagcagaaactggacgagttcggtgagcagctgtccaaggtcatttccgtcatttgcgttgccgtgtgggccatcaacatcggccacttcaacgaccccgctcacggaggctcctggatcaagggtgccatctactacttcaagatcgccgtcgctctggctgtggctgccatccccgagggtctgcccgccgtcatcaccacctgtctggctctgggcacccgccgcatggccaagaagaatgccatcgtccgctccctgccctccgtggagaccctgggctgcacatctgtcatctgctctgataagaccggcacactcaccaccaaccaaatgtccgtttcccgcatgttcatcttcgacaaggttgaaggcaacgacagcagcttcctcgaattcgagatgaccggctccacctacgagcccatcggcgaggtcttcctcaacggtcagcgcatcaaggctgctgactacgataccctgcaggaactgtccaccatctgcatcatgtgcaacgactccgccattgattacaatgagttcaagcaggccttcgagaaggtcggcgaagccactgagaccgccctgattgtgctggctgagaaactgaacagcttcagcgtgaacaagtctggcctggaccgccgctcggctgccatcgcctgccgcggtgagatcgaaaccaagtggaagaaggaattcaccctggagttctctcgcgatcgtaaatccatgtcctcgtactgcacccccctgaaggcttcccgcctgggcactggccccaagttgttcgtgaagggcgcccccgagggtgttctagagcgttgcacacacgcccgcgttggcaccaccaaggttcctctgacctcggccctgaaggccaagatcctcgccctgaccggccagtacggtactggacgcgacacccttcgctgcctggctctggccgttgccgatagccccatgaagcccgacgagatggatctgggcgactccaccaagttctaccagtatgaggttaacctgaccttcgtcggtgttgtgggcatgttggatcccccccgtaaggaagttttcgattccattgtccgctgccgtgccgccggtattcgtgttattgtgatcaccggcgacaacaaggccactgccgaggctatctgccgcagaatcggtgtattcgccgaggatgaggacaccactggcaagtcctactcgggtcgtgaattcgacgacctttcccccaccgaacaaaaggctgccgtcgcccgctcccgcctcttctcccgcgtggagccccagcacaagtccaagattgttgagttcctgcagagcatgaacgaaatctccgctatgactggtgatggtgtgaacgacgcccccgccctgaagaaggctgagatcggtattgccatgggctctggtaccgccgtcgccaagtctgccgccgaaatggtgctggctgacgacaacttctcctccatcgtgtctgccgttgaagaaggtcgcgctatctacaacaacatgaaacagttcatccgctacctcatctcttcgaacattggtgaggtcgtctccatcttccttactgctgcccttggcctgcccgaggctctgattcccgtccagctgctctgggttaacttggttactgatggtctcccagccaccgctctgggcttcaacccccctgatctggatatcatggagaagccccccaggaaggccgatgagggtctcatttccggatggttgttcttccgttacatggctattggattctatgtcggcgctgccaccgtcggtgccgccgcctggtggttcgtgttctctgatgagggacccaaactgtcctactggcagctgacccaccatctgtcctgcttgggcggtggcgacgagttcaagggcgttgactgcaagatcttcagcgacccccatgcgatgaccatggctctgtccgtgctggtgacaatcgaaatgttgaacgcaatgaacagcttgtccgagaaccagtcgctgattaccatgcccccatggtgcaacctgtggctgattggatcaatggcactctccttcactcttcactttgttattctttacgtcgatgtcctctccaccgtcttccaagtgacaccgttgtctgcagaagaatggataactgtgatgaaattctcaattcctgtagttttattagatgagacattgaagtttgttgctagaaaaatcgcagatggtgagagtcctatatataagatgcatgggattgtgttaatgtgggctgtcttctttggcctgctgtacgctatgatgctttaagaatataattataatccataagcccaacttcattattctaatttctagtataaaatgttactaaatataaacagaaacaagaacccacaattatatacatctaacgtaacgactttaaccccatgaagtttgttcccaactgcaactactgatttccacccggtgtcacagaattgactggtggcaccaaaagatgggccgactgactcgctcctggcttttggctttgaacaaacagcgttaaatgatcaatattttctatgagctaacgatttatctaacacgcgtataccctaccctatagatatctgtgtttgtatattactatattaaatttagcaggattgctttttgtacatacaatgctctatatacataagaaagttccacaccggcacattcgaatgcattagttagtt

SEQ ID NO: 26667 - protein, 1020 aa, DROSOPHILA; identical to SEQ ID NO: 26664

SEQ ID NO: 26668 - DNA, 6689 bp, DROSOPHILA
acgaataggtcgtcggccaaggaggattcaggtgtaccaacgggtcacgtgcatcgtgcaagcaaacgtaacttagaaataggaatagaaacggggagcagcgaacataagcgttggcaacttgggcctcgtggatcccagtcgtccggtttcgtagagccagcacgttttagttctgcataatttatttctttaatgttaggtgtaggtaattttttgtttaatcaattcacagcgtctctaattgtataacagagtaaattatgtataatgttaatttaagtaggtattctatagaatgatagaaggattacttaactccttacaactgagacttgagactgacataagataagttacacatgttctttcatcaaaaggtccccaatattttctattttctatacggctaggctaggctaggctattcggctgcatgccttatccattatgtacgatcgccatttatgtacccgatcctaatcatttgctcatacatgtacatacaatacaatacgaatggagacggaaatggacaccgagacgctgttgcggcgccacgcccagatctggggagtcattatctacttaatatcttgtgctcaataaaattcttacagtaatggaatgaacgaaccaatatttgcattcggtaaatactcgtgggggattcaatggattcaattacgttaaacaagcccagggataggacgatactcttgaaacattaggacgctcgcttggtggaatcgtttaaacatcaacgcacagattcgacttggaaaggttatgggtattgtgggttctacttaatgggattaaacaaaaattttgttcttctgcatagttaagcctacactttagtattccagttactaaacacagaaacgaaatggttaagttacaaaagtttggttcaatacaaacagacatctcatttccagagacttggatttccctacacggttcttttggcaacccggtgaaattaaatgacgaaaactaactaatgcattcgaatgtgccggtgtggaactttcttatgtatatagagcattgtatgtacaaaaagcaatcctgctaaatttaatatagtaatatacaaacacagatatctatagggtagggtatacgcgtgttagataaatcgttagctcatagaaaatattgatcatttaacgctgtttgttcaaagccaaaagccaggagcgagtcagtcggcccatcttttggtgccaccagtcaattctgtgacaccgggtggaaatcagtagttgcagttgggaacaaacttcatggggttaaagtcgttacgttagatgtatataattgtgggttcttgtttctgtttatatttagtaacattttatactagaaattagaataatgaagttgggcttatggattataattatattcttaaagcatcatagcgtacagcaggccaaagaagacagcccacattaacacaatcccatgcatcttatatataggactctcaccatctgcgatttttctagcaacaaacttcaatgtctcatctaataaaactacaggaattgagaatttcatcacagttatccattcttctgcagacaacggtgtcacttggaagacggtctgtgggtaaaacgatactggcattagtttccgcggcgcagaagggcttatcattgccaaatacttacggagaggacatcgacgtaaagaataacaaagtgaagagtgaaggagagtgccattgatccaatcagccacaggttgcaccatgggggcatggtaatcagcgactggttctcggacaagctgtttaaacaaaggcgatcggttcgtatctatcgtgccgtccatcattcgttatctcactcacctgttcattgcgttcaacatttcgattgtcaccagcacggacagagccatggtcatcgcatgggggtcgctgaagatcttgcagtcaacgcccttgaactcgtcgccaccgcccaagcaggacagatggtgggtcagctgccagtaggacagtttgggtccctcatcagagaacacgaaccaccaggcggcggcaccgacggtggcagcgccgacatagaatccaatagccatgtaactaaaagttcgattgaggccaagttaataccgattaaaggatgtgtgctttttgagtaacccaccggaagaacaaccatccggaaatgagaccctcatcggccttcctggggggcttctccatgatatccagatcaggggggttgaagcccagagcggtggctgggagaccatcagtaacctgtgaccaagtacctattactaaccattttaagtagtaaataccccatcaagacgtaccaagttaacccagagcagctggacgggaatcagagcctcgggcaggccaagggcagcagtaaggaagatggagacgacctcaccaatgttcgaagagatgaggtagcggatgaactgtttcatgttgttgtagatagcgcgaccttcttcaacggcagacacgatggaggagaagttgtcgtcagccagcaccatttcggcggcagacttggcgacggcggtaccagagcccatggcaataccgatctcagccttcttcagggcgggggcgtcgttcacaccatcaccagtcatagcggagatttcgttcatgctctgcaggaactcaacaatcttggacttgtgctggggctccacgcgggagaagaggcgggagcgggcgacggcagccttttgttcggtgggggaaaggtcgtcgaattcacgacccgagtaggacttgccagtggtgtcctcatcctcggcgaatacaccgattctgcggcagatagcctcggcagtggccttgttgtcgccggtgatcacaataacacgaataccggcggcacggcagcggacaatggaatcgaaaacttccttacgggggggatccaacatgcccacaacaccgacgaaggtcaggttaacctcatactggtagaacttggtggagtcgcccagatccatctcgtcgggcttcatggggctatcggcaacggccagagccaggcagcgaagggtgtcgcgtccagtaccgtactggccggtcagggcgaggatcttggccttcagggccgaggtcagaggaaccttggtggtgccaacgcgggcgtgtgtgcaacgctctagaacaccctcgggggcgcccttcacgaacaacttggggccagtgcccaggcgggaagccttcaggggggtgcagtacgaggacatggatttacgatcgcgagagaactccagggtgaattccttcttccacttggtttcgatctcaccgcggcaggcgatggcagccgagcggcggtccaggccagacttgttcacgctgaagctgttcagtttctcagccagcacaatcagggcggtctcagtggcttcgccgaccttctcgaaggcctgcttgaactcattgtaatcaatggcggagtcgttgcacatgatgcagatggtggacagttcctgcagggtatcgtagtcagcagccttgatgcgctgaccgttgaggaagacctcgccgatgggctcgtaggtggagccggtcatctcgaattcgaggaagctgctgtcgttgccttcaaccttgtcgaagatgaacatgcgggaaacggacatttggttggtggtgagtgtgccggtcttatcagagcagatgacagatgtgcagcccagggtctccacggagggcagggagcggacgatggcattcttcttggccatgcggcgggtgcccagagccagacaggtggtgatgacggcgggcagaccctcggggatggcagccacagccagagcgacggcgatcttgaagtagtagatggcacccttgatccaggagcctccgtgagcggggtcgttgaagtggccgatgttgatggcccacacggcaacgcaaatgacggaaatgaccttggacagctgctcaccgaactcgtccagtttctgctgcaggggggtcttgatctcctcggtctcggacatctcagtacggatcttgccgatggcggtgctcaggccagtgccgatgacgacgccacgggccttgccggctgcgacgttggtgccggagaacaggatgttcttcttgtcctggttgacggcgcggggatcggggatggcatcggtgtgcttgatgacggagaccgactcaccggtgaggatggactgatcgatcctaagggtggtcgagtagatgtgggtgatacggatatcggcagggatcttgtcaccgacagacacctcaaccaggtcaccgggcacgatctctttcgcgcgcaccttctggatgccggacttgtcctggcgcaccaccttgcccatctcaggctcgtactccttgagggcctcaatggccgactcggcgttacgctcctgccatactcccaccacggcgttggctatcaggataagtaaaataactaggggctctacaaatgcagtgaacgtttcctcgtgttcctcaaacagggcgagaacctggggattgcagaggggaagagtgtggtcgtaactaagtttttgagggtgggtttctttgtgctgctgcacttacaaatgagatgatggctgccaacagcagaatcttcaccagcagatcgtcgaactgctccaagaccagctgccagatgctctttcctgtggaatacaatcgttattataatgtatgcatacagtgaagtgggggtggggggcaggggatctgctcgggttgtgttcgcaccttcctcagtcggcaactctgtaacgataagaaaacaaacacgtcagtcgattcggtctcggaatgtggaggggaattacgcgcgactctcaccattgggtccgtatttcttctggttagccttgatctggtcgagggttaagccgcgctcggggtccgttccgaagaagttgagggactgttcgacggttttcgagtgaccgtcttccatcttgattcgttatcctcttcgttcagtggcctgtgtccagattccggggcgattcaggtggggatttgaaagtagacacaaggcaaggggctcattttaattctctggcagggctatttagctattttgccgttttctgggctctattcaacgactgactggaatagcaagtgtgtatgcacgtatgtatgcacatacatctgtactggcatgtacgtttgcagttaaaactacctcattaggttctgaataagtggtcgtacatgtgcatgtgcacggcactcggctcacgggtactttccaacatacgcacatacacaggtgctacatgctaattccccgatttcaggcacttctgatcgggcccggactggccactaaagtcgcgcagttatcgcgccaacttaggatcggattgtgcggatcgggtcggagaatatgctggaatattgcattactatgatgggctgttaccctggccaaatcgctccgcttatgagattcacacacgtgtcacttcgcacaacagacgcagttttcgtttttctattctcagtttctgcgggggattgggggatctggtccgtaatacgggtgctctgctcctacgttaacctcgctaaacgacgcactgcgtgtgttaagtacttttttccactgactctctatataatataacccatggcgcttttttctgaatatgtgtgctgataactattgcactaagtaccaagccgcgatttactgcctatcgccgttctgcctcactatgacacgacattattcgcacaagacagggctgactgaaaacgtatatcgtccgagttacgttatttgtgcagagctgcctctttctccaacttttaagaattctcagtcctggcaattattagataattatcccaccttttagctcagcttctactgacgcgttcaatttgtgctactaaactgcgatagccggcgttatcgataactgagaatctcaactgcgatggctaactgttgagtttccgtgttcagtaataccgatagctgaggtgatataggaatttaaaactaatcaaagtttcgaaggaattcagctgtgctggaaagtttctttattggaaaatacctctaaccttataaatcaagttgttattgcgatcgaaaaccaaatgtttttactcccttctgtggtgtaaatcgaactgaaatccttatcacgaatgcttaaacttatttatacattgtcatattttcacttggcaagcgacagagacatccgcactattttggccacacaacaagcaacactattcttttcgcgcattttgtgctcaaattaatgagatcgagatcaagagcccgcaataaatagatctgggtgccaggtattcgccagcagcgacatttttaaattttaattttaatctttttcgcgaccagacactagaatcaggccatacggggaattttgaacggcagccaactcgcataatacttgaatattacgctggctacgtcacagaattacatacgtaacttctgataacgaggtttccaccagttgcccgcccacaaaaggcgttagttttcaaaaaactgtcaatcaatgcgctcgaatactacttatattttgagcacagagacgtgtgtttcgaaaacatcttcatgcatatagcctatatatacccctaaaatacacatgtgtgtgtgcattatggagcaaaa

SEQ ID NO: 26669 - DNA, 3754 bp, DROSOPHILA
agttatcagcacacatattcagaaaaaagcgccatgggttatattatatagagagtcagtggaaaaaagtacttaacacacgcagtgcgtcgtttagcgaggttaacgtaggagcagagcacccgtattacggaccagatcccccaatcccccgcagaaactgagaatagaaaaacgaaaactgcgtctgttgtgcgaagtgacacgtgtgtgaatctcataagcggagcgatttggccagggccactgaacgaagaggataacgaatcaagatggaagacggtcactcgaaaaccgtcgaacagtccctcaacttcttcggaacggaccccgagcgcggcttaaccctcgaccagatcaaggctaaccagaagaaatacggacccaatgagttgccgactgaggaaggaaagagcatctggcagctggtcttggagcagttcgacgatctgctggtgaagattctgctgttggcagccatcatctcatttgttctcgccctgtttgaggaacacgaggaaacgttcactgcatttgtagagcccctagttattttacttatcctgatagccaacgccgtggtgggagtatggcaggagcgtaacgccgagtcggccattgaggccctcaaggagtacgagcctgagatgggcaaggtggtgcgccaggacaagtccggcatccagaaggtgcgcgcgaaagagatcgtgcccggtgacctggttgaggtgtctgtcggtgacaagatccctgccgatatccgtatcacccacatctactcgaccacccttaggatcgatcagtccatcctcaccggtgagtcggtctccgtcatcaagcacaccgatgccatccccgatccccgcgccgtcaaccaggacaagaagaacatcctgttctccggcaccaacgtcgcagccggcaaggcccgtggcgtcgtcatcggcactggcctgagcaccgccatcggcaagatccgtactgagatgtccgagaccgaggagatcaagacccccctgcagcagaaactggacgagttcggtgagcagctgtccaaggtcatttccgtcatttgcgttgccgtgtgggccatcaacatcggccacttcaacgaccccgctcacggaggctcctggatcaagggtgccatctactacttcaagatcgccgtcgctctggctgtggctgccatccccgagggtctgcccgccgtcatcaccacctgtctggctctgggcacccgccgcatggccaagaagaatgccatcgtccgctccctgccctccgtggagaccctgggctgcacatctgtcatctgctctgataagaccggcacactcaccaccaaccaaatgtccgtttcccgcatgttcatcttcgacaaggttgaaggcaacgacagcagcttcctcgaattcgagatgaccggctccacctacgagcccatcggcgaggtcttcctcaacggtcagcgcatcaaggctgctgactacgataccctgcaggaactgtccaccatctgcatcatgtgcaacgactccgccattgattacaatgagttcaagcaggccttcgagaaggtcggcgaagccactgagaccgccctgattgtgctggctgagaaactgaacagcttcagcgtgaacaagtctggcctggaccgccgctcggctgccatcgcctgccgcggtgagatcgaaaccaagtggaagaaggaattcaccctggagttctctcgcgatcgtaaatccatgtcctcgtactgcacccccctgaaggcttcccgcctgggcactggccccaagttgttcgtgaagggcgcccccgagggtgttctagagcgttgcacacacgcccgcgttggcaccaccaaggttcctctgacctcggccctgaaggccaagatcctcgccctgaccggccagtacggtactggacgcgacacccttcgctgcctggctctggccgttgccgatagccccatgaagcccgacgagatggatctgggcgactccaccaagttctaccagtatgaggttaacctgaccttcgtcggtgttgtgggcatgttggatcccccccgtaaggaagttttcgattccattgtccgctgccgtgccgccggtattcgtgttattgtgatcaccggcgacaacaaggccactgccgaggctatctgccgcagaatcggtgtattcgccgaggatgaggacaccactggcaagtcctactcgggtcgtgaattcgacgacctttcccccaccgaacaaaaggctgccgtcgcccgctcccgcctcttctcccgcgtggagccccagcacaagtccaagattgttgagttcctgcagagcatgaacgaaatctccgctatgactggtgatggtgtgaacgacgcccccgccctgaagaaggctgagatcggtattgccatgggctctggtaccgccgtcgccaagtctgccgccgaaatggtgctggctgacgacaacttctcctccatcgtgtctgccgttgaagaaggtcgcgctatctacaacaacatgaaacagttcatccgctacctcatctcttcgaacattggtgaggtcgtctccatcttccttactgctgcccttggcctgcccgaggctctgattcccgtccagctgctctgggttaacttggttactgatggtctcccagccaccgctctgggcttcaacccccctgatctggatatcatggagaagccccccaggaaggccgatgagggtctcatttccggatggttgttcttccgttacatggctattggattctatgtcggcgctgccaccgtcggtgccgccgcctggtggttcgtgttctctgatgagggacccaaactgtcctactggcagctgacccaccatctgtcctgcttgggcggtggcgacgagttcaagggcgttgactgcaagatcttcagcgacccccatgcgatgaccatggctctgtccgtgctggtgacaatcgaaatgttgaacgcaatgaacagcttgtccgagaaccagtcgctgattaccatgcccccatggtgcaacctgtggctgattggatcaatggcactctccttcactcttcactttgttattctttacgtcgatgtcctctccaccgtcttccaagtgacaccgttgtctgcagaagaatggataactgtgatgaaattctcaattcctgtagttttattagatgagacattgaagtttgttgctagaaaaatcgcagatggtgagagtcctatatataagatgcatgggattgtgttaatgtgggctgtcttctttggcctgctgtacgctatgatgctttaagaatataattataatccataagcccaacttcattattctaatttctagtataaaatgttactaaatataaacagaaacaagaacccacaattatatacatctaacgtaacgactttaaccccatgaagtttgttcccaactgcaactactgatttccacccggtgtcacagaattgactggtggcaccaaaagatgggccgactgactcgctcctggcttttggctttgaacaaacagcgttaaatgatcaatattttctatgagctaacgatttatctaacacgcgtataccctaccctatagatatctgtgtttgtatattactatattaaatttagcaggattgctttttgtacatacaatgctctatatacataagaaagttccacaccggcacattcgaatgcattagttagtt

SEQ ID NO: 26670 - protein, 1020 aa, DROSOPHILA; identical to SEQ ID NO: 26664

SEQ ID NO: 26671 - DNA, 5954 bp, DROSOPHILA
aagttagataagaacacaaattaaatagaattatacatttaatagtagttcaacacattttcttgtacaatttaggtaacattaataactaagtaataattaaagacaatgcaacaagtggcattaaaattcatgaattaaatgacttggtggtaaaccaccccacagacccaaaataaatttaaaccatttttttggtgctgtatattagatttttggctcagataagaatacctgtctggcactggttgtttcttattgccttaggttttttttttatagcgggactaaatactaataaatatgtctaagctggacgtactataggacagctcatgatttactactgtgaacattacaggctaaacgaaaattttggtcacacgtttattaaatttgtgtttacctcaatgataatcattcggaaatgttcaactattcatgctgataagcattcggacatattaaattatcaaatcctaatctggcaatctaaaatcagtctgcatcacactttccgtgaatggacattatgaaaaatactctatttttttgggggcgatgtgcgatttcgccatttatatttttgcgtgggacacaagttggctaaactctggaccataaattctaaatctatggccgattatttcccgacgaggccataaaattcgagttaataccaattttggacattcattttacggacaccgaaagtacatacactcttcttggtagaacagtcctcatttctacattcatatcatgtagaaaatacattctacgtttaggaattatgtaactttcaattggcgatatacaatcgcaacactttgatatcggccgcatagcttaggggattagttattattaattattgataaatgaacagcccaatataactgacgcttatcaatgattatggtttttcatatctcaagaacaaagttcttacgatatttattttacgaaggtacaaaaatgtatacattagatagcttctctagaagatccggctctcgaatgaagctggccagggtgtggcatccacataatgggggaaactgtcgaggaacttcttaaagtcaggcgttattagttccttgtgatggttccaatggcctccgagcccaagttccagagtagaagagttccaatttccgttgggtttctggtcgatgtggaaaatatatgtatagacaaattacttttgcgagttttccataacctacctctagttctagccagaatttaagtggatctccattgacaccccacgagaagtagatgaagtaaggtggctcaaagctcagacgtaagggtgcctgtagttgttgagatattaacattgaattcagacttatgtgactttaataattacctgatggaaggaccagtccatcatctttgctccgttcaagggctgtataaagagggccatgtgattgggtccacttagctgcatttcatagcgaattttggtgggcgacactgtattcttggagagcaataaaacggttggcacattctcgccaagaacaggttccgatgcgggtatccataaactgttctttctataaggactcaaatgtattagtttactaattcatactaactttttgagttggaaactaacctggtcttgtgccaacgctgattatataggggcaatccgcaattaatttccttatcgcaatcggatccaattctttgggccagtgtcatgttgataacagcatcttaaaaggccaaaaaaaattccatgaattaacctttcaatataattagtccaccttacttttcacggtgtaagtgcgtctgtcctggggcataatgaagtaaccagattcctgacggcgcactttgttttgagcgtcgtggaaggtacgcttggtgtgctaaaaaaaggaaatcctttttacttatcaatacaatataactttgtagtttcttaccaggacagcgaaacgctggacattcgtttctgggcgataggggaatccaattggtgtcattgcaataatgaagcacaataacgtgatgcccatcaggccgcagatgatggtcttcgatttgttgaacaactgcagaacagggataatgaaaccgcagcagaggaagcccacagcgacactgaaaacagccaccgccaaatccggattaaggttctctccaaaacgaccaaacattggaatgaacgtggtgaagaatccgtgcgagaaatatgcaaagaatacaaatggtggcacagtgcaaacaatgtgcggaatgacccatgcgacatctattgggaataaaaagacatattaaaaatcaaactaagcatactcttataaatacaactcacctttggtgtgcagtttggtggcaatattaatgatcaagcccactgtatagaacaagcaactgagcatcaaaacaaaaacagagcgaattccacagatggtgaagatcagggtgagaacagataaaagtaggcagtggcagtgcagcaaaagctgaacccgctgaccaatgggaagcttatcctgaaaaaagatttagctttagtcaaccaataaatcataccaaactatacatacacgcttggtccagtggaagtacaaggcaggcactatggccaaaccgaagaagaaagtggtgaagtagagacccaggatgagccaggagttcgagaaccacgacagaggcaaatgcaccgcatccatgaacagaccgagcaaaactggcaggatggctcccacaacaacagatagaatctgtacgaggagtgtgtgccccaccttcttgaggatcttttcgagctttatgcccgagttgaccgacatcagcttaaaagcgtagccacaaatcccgatggataccaaggagacgatgacgttcaagataacgccttcggtttcggtgtagaaaaccagaaaccaacccataacatcgaaatagatggtgtgacctttggcgtatttctgaaaaaagaaaaaggcaattagtaatttatcattaagatctgtatcagccatgttaccgctgaattctcaatctccggagagtttgcaatctgtcggaccaaagcaagcagattatcgccagtatgctggaaactacccctgggaaagatctctgccttgtcgtgtcgcgtgtggtagacaaatccgttgtaggtgtaggccatatccaagccgggaaccgatccatggtcacggaaaatgcggaagtccgtgtcagagggaatgaaattgtgctggaacagctcctcgcccattgtagaagcatacgggtgcttgatggcacgtcggtagttcttcattagccagggatgattgggtcccgattggaagaggatctctcgaccgccatttccgcaggaatcgagattgataagggctctgtaaaggataaatgaaagtataagataaattcgacaaaatttaaagcactcatttgacctacttgcaatatttggcccacttgtgctgggtgatgaaggcatgcgaggcctgaaggggattttcctcggcaccattgaacaggaataccacagggttctttagtggcttatcggacttggccagcacacggagtacctccatcatagtggccaccatggaaccatcatcaccagcaccaggtcccgccggcacggaatcatagtgactgtttaccagaagataagtagtgctgttcgtgttcttgggactgatcttaacgacaatattctgaatgctctggtacatattgaccatggaccagtgaacatagctaccggatgccacctgaacatccacttcaatatcgttggcagtgccggatcgaattttttgcatcttctgggagagcatcttcaaagcggccatctcattctgtcgactgcccaccactcggggtcccaggctcactagctcccgtagatttttctctgcgcgctcggcgatgaactggtcgggatgcgtttcctcatcctgaatggtcagtgggcggggaaggcggtggcaggcgggtatcgagatggtcacatagagcagcagccagaatccaaagaaggcgggtgcccagaaccacttaatcttgtttccctggacgaatgctcgctcacagccattgggctgagcctgaaatgaagcggataaagattaattcaattaaattcaaacaacttaatatgcctgcaatgtcagtattggctttaggtcacttatcttatacgggacttccgaaaactaggcatgtacatacatattgtatatcttttaatcttgccaatgccccctaaagatatctaattttcggcacggttttattcacaccgaatggatattacccaaaacttcgtagttagatacacctacgtctggccgcagacatgagtcaatttcgaaattggaatcgactataggtatcaagtcgaaagttagatttaatccatcaacggttatcttatcgctggtcagcccgccagttgcaaaacctgttgccaccgaaaatcgaattggtcacaggtggatagtataacttcttgtgttgggaactgctccactaaactaaggccagacagatagataaaccgagggtgcaactagggcgaaatggtgcgctgctatctcaagggtatccactgttcgttagttatcggcttttccctgataagtacatgccgccaaaaaaaagtcgattcccttggaactcaaccatgggtaatgctcatgttgctgtttggctgtttggatcggcggtgattagcacataccacacccaattgaagagcaatctaatcaaggacccaaagtgggtgcttacctcatactgctgggaaccgcggggtcgtagcaatggatccacattcgtaggatcgttggtcggcgtaatgacgcgacgccgtacattcttctcactgccactcatgtttccggataacgatgcccggtattttggtcaagatctcccaatgaaccgatcgcgtcggcgtccaacgctctactgaacgttccactgcattgattatcctaacgtaccggtctcaaattccctcacagagacaaataacttttttattctctcgcccacgatacaatgtttcttatctatcggttcgtcgtacgaaccgtatacaatagttcgaaatatgtttatggctactcagggtacagggggttgtggggggctggattttcattaacagtggactgcgagaaatgcctacataacttccgcttggattcataattcataattctgaatttgaccaagtcgatatatatcaattaattagagcagcagcattatgagtgcaagcccacatcttatctttttttacacattgaaaaaataggtatatcaatctgtatttatcatagtaataatggctgaatggttttttacttgcaacgattttatgaattcactgacatctgcattatatttttctaagtgcactttgcattctaaatctgcatccgtaccttcgatcttttctcctccgtttcgctgctcattccgaggcgctcttcttcttcccgtatctatattgtagcgaaaccggccttgttgtttttgccgctccgagttttagccgccgaatggtgggatcaaagtttccgaagcgcggttttaataccgctcgagcgcaaagcgctgcggcactaactgaattattcaaaataatggtcagcgttttgttgacagttcttagttgctaatatttacacttttcacacagcgcattattttcgtatttacttgggcaaatgtgtgtgtgtgtggtaaacaaaataattgtgtgcgacattcgataaagatagcaatcgtttcgattgtctatcgcacccaagcggttcttatctgattcgtaattgcatactttcgggcggcaatttggaaacaatttcacactggccagcaaaacgaccgaacagccgaacaaaaagatagggcacaactaaaagcggtaaatttgctcattt

SEQ ID NO: 26672 - DNA, 2734 bp, DROSOPHILA
acgcgatcggttcattgggagatcttgaccaaaataccgggcatcgttatccggaaacatgagtggcagtgagaagaatgtacggcgtcgcgtcattacgccgaccaacgatcctacgaatgtggatccattgctacgaccccgcggttcccagcagtatgaggctcagcccaatggctgtgagcgagcattcgtccagggaaacaagattaagtggttctgggcacccgccttctttggattctggctgctgctctatgtgaccatctcgatacccgcctgccaccgccttccccgcccactgaccattcaggatgaggaaacgcatcccgaccagttcatcgccgagcgcgcagagaaaaatctacgggagctagtgagcctgggaccccgagtggtgggcagtcgacagaatgagatggccgctttgaagatgctctcccagaagatgcaaaaaattcgatccggcactgccaacgatattgaagtggatgttcaggtggcatccggtagctatgttcactggtccatggtcaatatgtaccagagcattcagaatattgtcgttaagatcagtcccaagaacacgaacagcactacttatcttctggtaaacagtcactatgattccgtgccggcgggacctggtgctggtgatgatggttccatggtggccactatgatggaggtactccgtgtgctggccaagtccgataagccactaaagaaccctgtggtattcctgttcaatggtgccgaggaaaatccccttcaggcctcgcatgccttcatcacccagcacaagtgggccaaatattgcaaagcccttatcaatctcgattcctgcggaaatggcggtcgagagatcctcttccaatcgggacccaatcatccctggctaatgaagaactaccgacgtgccatcaagcacccgtatgcttctacaatgggcgaggagctgttccagcacaatttcattccctctgacacggacttccgcattttccgtgaccatggatcggttcccggcttggatatggcctacacctacaacggatttgtctaccacacgcgacacgacaaggcagagatctttcccaggggtagtttccagcatactggcgataatctgcttgctttggtccgacagattgcaaactctccggagattgagaattcagcgaaatacgccaaaggtcacaccatctatttcgatgttatgggttggtttctggttttctacaccgaaaccgaaggcgttatcttgaacgtcatcgtctccttggtatccatcgggatttgtggctacgcttttaagctgatgtcggtcaactcgggcataaagctcgaaaagatcctcaagaaggtggggcacacactcctcgtacagattctatctgttgttgtgggagccatcctgccagttttgctcggtctgttcatggatgcggtgcatttgcctctgtcgtggttctcgaactcctggctcatcctgggtctctacttcaccactttcttcttcggtttggccatagtgcctgccttgtacttccactggaccaagcgtgataagcttcccattggtcagcgggttcagcttttgctgcactgccactgcctacttttatctgttctcaccctgatcttcaccatctgtggaattcgctctgtttttgttttgatgctcagttgcttgttctatacagtgggcttgatcattaatattgccaccaaactgcacaccaaagatgtcgcatgggtcattccgcacattgtttgcactgtgccaccatttgtattctttgcatatttctcgcacggattcttcaccacgttcattccaatgtttggtcgttttggagagaaccttaatccggatttggcggtggctgttttcagtgtcgctgtgggcttcctctgctgcggtttcattatccctgttctgcagttgttcaacaaatcgaagaccatcatctgcggcctgatgggcatcacgttattgtgcttcattattgcaatgacaccaattggattcccctatcgcccagaaacgaatgtccagcgtttcgctgtcctgcacaccaagcgtaccttccacgacgctcaaaacaaagtgcgccgtcaggaatctggttacttcattatgccccaggacagacgcacttacaccgtgaaaaatgctgttatcaacatgacactggcccaaagaattggatccgattgcgataaggaaattaattgcggattgcccctatataatcagcgttggcacaagaccagaaagaacagtttatggatacccgcatcggaacctgttcttggcgagaatgtgccaaccgttttattgctctccaagaatacagtgtcgcccaccaaaattcgctatgaaatgcagctaagtggacccaatcacatggccctctttatacagcccttgaacggagcaaagatgatggactggtccttccatcaggcacccttacgtctgagctttgagccaccttacttcatctacttctcgtggggtgtcaatggagatccacttaaattctggctagaactagagaaacccaacggaaattggaactcttctactctggaacttgggctcggaggccattggaaccatcacaaggaactaataacgcctgactttaagaagttcctcgacagtttcccccattatgtggatgccacaccctggccagcttcattcgagagccggatcttctag

SEQ ID NO: 26673 - protein, 891 aa, DROSOPHILA
MSGSEKNVRRRVITPTNDPTNVDPLLRPRGSQQYEAQPNGCERAFVQGNKIKWFWAPAFFGFWLLLYVTISIPACHRLPRPLTIQDEETHPDQFIAERAEKNLRELVSLGPRVVGSRQNEMAALKMLSQKMQKIRSGTANDIEVDVQVASGSYVHWSMVNMYQSIQNIVVKISPKNTNSTTYLLVNSHYDSVPAGPGAGDDGSMVATMMEVLRVLAKSDKPLKNPVVFLFNGAEENPLQASHAFITQHKWAKYCKALINLDSCGNGGREILFQSGPNHPWLMKNYRRAIKHPYASTMGEELFQHNFIPSDTDFRIFRDHGSVPGLDMAYTYNGFVYHTRHDKAEIFPRGSFQHTGDNLLALVRQIANSPEIENSAKYAKGHTIYFDVMGWFLVFYTETEGVILNVIVSLVSIGICGYAFKLMSVNSGIKLEKILKKVGHTLLVQILSVVVGAILPVLLGLFMDAVHLPLSWFSNSWLILGLYFTTFFFGLAIVPALYFHWTKRDKLPIGQRVQLLLHCHCLLLSVLTLIFTICGIRSVFVLMLSCLFYTVGLIINIATKLHTKDVAWVIPHIVCTVPPFVFFAYFSHGFFTTFIPMFGRFGENLNPDLAVAVFSVAVGFLCCGFIIPVLQLFNKSKTIICGLMGITLLCFIIAMTPIGFPYRPETNVQRFAVLHTKRTFHDAQNKVRRQESGYFIMPQDRRTYTVKNAVINMTLAQRIGSDCDKEINCGLPLYNQRWHKTRKNSLWIPASEPVLGENVPTVLLLSKNTVSPTKIRYEMQLSGPNHMALFIQPLNGAKMMDWSFHQAPLRLSFEPPYFIYFSWGVNGDPLKFWLELEKPNGNWNSSTLELGLGGHWNHHKELITPDFKKFLDSFPHYVDATPWPASFESRIF

SEQ ID NO: 26674 - DNA, 6192 bp, DROSOPHILA
atggacggatcaggttcttgtggttgaaagtgttcatcatctccagttcgttcagcatgaatggccgcagctcgggtcttccgtacatgatcttggccgcgtagttgtcgccggaggatcgctccacggcgtggtaggttatgccctgcgttccacggcccagttcatccccgatgtcgtatttgtcctggtagcgcagctgcttggagcgcacgtaaggatgtctgccgtaggtcttgtagatgtactgatcctcgttctcctcgatgtgaacggttaccgaagtgctaatggatccggcgatattcctggcactgatggagtacaagccgccgtccttgatgatcgagtcgtgaatcgagagcacgtagatatccgggtcatatgagctaatctgtaagtaggattccaagttgaattactatacattctgcgactagctatagcgttcttcttcgttgttttaccttaatgcgggatgagtcgacaatcggcttccagtccttgaaccagtgaacctccggcagaggaatgcccaccaacttggcctcgatccttccattcttgcgggccatgatgaaggtctcatctggacgcttgaggaacctgggatgctcggcaatctccagtctgacgcgctgtctagcttctccgtgttcgtttgtggccacagcttcgtaccagccaacatcacgatccagcatcctggagaaatatgagaatcagatgttactttacccaaaagtaatcctttacaacccacttgttaatgaagagcgtggcctgtccgttgcgagtgtagctctggtcgaatctgccacccgattctatgagcatgtcatcgaagtagtaggtcatcttgggcttgggatagccgtagacgaaccacatcagctcggtgttgtgatccttgacgccgtagctaatgtcctgttcgcggagcaggaatctaaattgaagaaagctataggtaccacaaaacatagatatacaccaatactcactgaggagcctgtgccaggccgtcatgtggaggcctctcgatgtcaaagtccttggggaagtatggcgaggtttctggcctgaagtccgtgcctggaggcaggtaggtgtaggtctttggaggatctggcaccagtttttgcctgcaaagaaggacatttggtattgtgaacttaaataacattatgctcacccacctgtaggtttgggtatatggactgggatcgctcacaccgaacttgttctccactcgcaccctaaagcgataatccctgaatggttccaaattacggatatcacaggcacagctgcgaactcccgtccttagagtacgccaatccccctcaggcagatccatcatttcgatctggagttcgtcaatgaaagataagtcttgttcgtttgggttagatgagtcagcaacttacctggtatgtgatgggatagcgcggagtcagaggcaccgaaggattccacgatagaagcagaccacgatcggtcatccgtgaaataattggaccctccgacaacggcggaggagcaccagacttcttgtacttcttgaaatcggtgtactggtcctccaagggcttctgctgactatccagagctgcaacgtgaggctggttaatcatagctcggagatgatttattataacctacagtcgtagaacagctcagcatggcagatatcgtcgccgtatggattgaaaatgcggcatgagtagcgacccacgtcgtactcggtcacattcttgatggtcagcctcaggaggccgttgggctcgatatcgatcaaaaagcggtccgaagggaagagtttctggtcgttcttgaaccactcgacctccggctccgggtatccggtggcacaggccgtgaacttggccaccattccctcgtagatgtcgcagtcgccaattttcttgaggaacactggtggctccgatcgggagtgctttttactgcaaagtagatagggatagttaccagggatacttcagaggcacaaaggattacttacatttcgttgacgatgtcgaggcgtccttgggtgatgtccttgccctccctgttgctggcgatgcacttgtacacgccctggtcgcccttctcgcagttgttcacaatcagcatgtggtggtcgccatcgttcttgatactatacttctccgacttggggatgggcttgtcctggaagtaccactccagatccggataggggactccggaaacagtcacgggaatcttggcgttgttgccgaacacctgctgctggtcggatatcttctgagtgaacaccggcggcttgtagaccttcctgacattggcgttacaggcggaggagtcctcgcccagcggattggccagcaggcaggtgtagttgccggagtcagcggcttcggctggcttgatggtcagcccaatgtgcttgccgtcacaggtcatcaggaggcgctcgttgggagttagggttacgccatcctttgaccaaatcacctcgggcatggggttcgaaataaacggagcggagagcactagctcctgaccctcatccgcgttcacatcgcgcagagcggacacaaattgtggcgcctcctccgtagccgtttcatcggccttgggagccacgtaaagcttggccttggaggcggtcgatccctcgggattctgagcaatcacctcgtacaatccagagtcaccgggcgccgtcttctcgatgatgaggcttgaactattgtccggattctccacaatggcaatgtggctggcatcgggcttgatttcgtggccgttgtggaaccactgaagtttcggcttcggatttccaaccaccttgatgtccatcttcacagggaagccctcaatgctggacgcatcctgcagctcggccacaaacacgggcttcgactccttgggcacaatctccactttggacacgccctcgatctcgccgcccttgttggcaatcagacacttgtagactcccgcgtccaatggctgtgcagcatcgatgctgcattaggaatgacactggatgagtaccactctctgttcatattgcttgtactcacatcaagccaatttggccattggggctgttgatgaagttaatctccggacttgggcgcagcagcatgccatccttgtaccacttgacctccggtgctgggaatccagtgacctgggcttccagcttcaggggctcgccgacgacaacggtttggctggtgatgggcttcaggaactttggctgcatctcctcagctaatggtgttaaaaatgagtgtatatcctttttgaagtaattttccttcggatcttacgtttaactgccaccgcgcatagagccaccttctcgccatgaggattggatataatcagcttgtaggctcccgaatcgttgggctggcagctgttgatctccagcttcaccaggccatccggattggtagaaatcttaatactaaattggaggtttagcaggattccgaaaataaagaggaaattaactacctttcgcttggcttgacttcatcgccgtccttgagccactggacagttggcagggggcttccgtccacgcagcattccaggacaagaggttcaccctgcagcacgtccagagcattgtccagctttttcacaaagctgggtgcgagggacagcatagccaacttgaagggcgccttggtgactccgatttcattggtggccacacaagtgtactgggaagtgaaatccattagctcatccattagctcagtaggtcaccaatcgagtgaggacttaccgctcccacatcgttttccctgaaggatttgatgtccagcacactttcgatttggtcggtgcccttcttggtgtcctccttggcgtacagcttatccttgccgggcttgttgatggcttcatagttgatgggcttgtcgtccttgaaccactcaattgtgggcagtggaacaccgtgcaccagaaccttcgtggaaacgggtctgtagtcatggatgctctggctctcgggctgcactatgaaagtgggtttctccactgcgaaagaatagaatatgaatcaagcgactaaaagattccaatccagggatgagtccatacccagcactgccaagttaaagtccacggcggcccttccctcgctgttggtggccgtgatggtgtacttgccgtcctcgcagggtgagacagactggaacaccaggcggtacttatcggcatccacatccgcgatgacctcgcagttctcatggttgcagaggttctcgttgccgcgagtccaggaaacctttggcttcggattggcctggaccagagcttcgaagcaaatggtgtcgccgggcagacacttggtgtcgttcaggccagagatctccggcttggccagcacatcgatccaaccgctggtgaccagctcaccgtacttgttcttcaccttcagttcatagcgtccggagtccttgatctcagctgtaatttagtcagttatataaatcccttacgatagctttagttcagctattaccttctaggatgttcagagtgcaggtgtactgaaccaatccgttctctgcgtccttcttgtccaccttcagcttgacgttattggtctccacgacgggctgaccatccttgagcaggacgatttcaggggcgggatcagcggtgaacacaactggttcgcagaccttgtcgcccttgttcacctttatgtccttcagtccaggaccttgagtcagaatgggcttgcgatattcagcgatgcctacgaaacaggatgtgttagatttaaggagagatgggaaatagagctgggaacgtccgcttacccgacagagaaagttctccctggtgcgacttctcgccaaccttgttctgcacgaccaccttgtattctccggcatccaccagatccagggactgcacttccagcttgtagtggtcctaaacgattgcagtatatgaagtaaatcgcagctgaagaggtgaaatatgtggttagaaacaaaccccatcgacggtgatagcggtgtgcttgtccggcgtgatgggctttccatcgtgataccaaatcgcttccggcttgggaatgcccgtggcgatgacttcgtacttgaggggcacactttcgtagctgtgctgctggaagacatcgacgtggacgatttcgggaacggctataaggcaagatatgtatcaagatctgtgtgtatctcagaggagtgtactattagatttctgtacatgttgcatagatcattcgtaggattagtttcggcagtgcagcacttacaacatcctcaataactggtatcttacaggtcaaataggatcgcaataggacctactgactaccacctaattatcttatcgtagcttattatggatgtgagatatcttatcgcatgagcgagcatacagctgtcaagtgaaaaagttcaaagaagattgagaaacttaaggatcggtttttagtttcccaatcgtcgtgcaattattaaaatcaatccacttagatactaattcattcacgatgctcacatattcgcgtttcttacactttgttagaggctgtcgtttgatttatattctctgtacactttaagttaggtggttgtgttaaatgtgacatgaaatgcatccttttttttttttttttttttttttgatgatatgtacaatgggcgtgcatatgaaattatggcgacatctttttggttatttgtcatttcagggttaattcgtttaaatttagaattatttcgattcgttctcattcatggcattccccaagtatttttagtgatgcttatagtgatgcattggaaatgatttggtttacccccttcttcaggctcttcggtcgtcgcaatcaaagtctttgttacggtctgttccagagacaaagcctcgctggctgcatcagaatttcatattggagacaggagattaggtttaatggcaaaattcgggtgtcgggacatatacatatggttatcacttcttttcgcctatagcacttgatcccttccacttcttttaagaatcccatggattttcgaaaatgtatactcacttagaacggccaccttgcacgtcgatgtggtctcgccaataaagttggtggccttcatctcataggtgcccgcatcctcggtcctggccagattcaaggtg

SEQ ID NO: 26675 - DNA, 3369 bp, DROSOPHILA
ccgttcccgaaatcgtccacgtcgatgtcttccagcagcacagctacgaaagtgtgcccctcaagtacgaagtcatcgccacgggcattcccaagccggaagcgatttggtatcacgatggaaagcccatcacgccggacaagcacaccgctatcaccgtcgatggggaccactacaagctggaagtgcagtccctggatctggtggatgccggagaatacaaggtggtcgtgcagaacaaggttggcgagaagtcgcaccagggagaactttctctgtcgggacataaaggtgaacaagggcgacaaggtctgcgaaccagttgtgttcaccgctgatcccgcccctgaaatcgtcctgctcaaggatggtcagcccgtcgtggagaccaataacgtcaagctgaaggtggacaagaaggacgcagagaacggattggttcagtacacctgcactctgaacatcctagaagctgagatcaaggactccggacgctatgaactgaaggtgaagaacaagtacggtgagctggtcaccagcggttggatcgatgtgctggccaagccggagatctctggcctgaacgacaccaagtgtctgcccggcgacaccatttgcttcgaagctctggtccaggccaatccgaagccaaaggtttcctggactcgcggcaacgagaacctctgcaaccatgagaactgcgaggtcatcgcggatgtggatgccgataagtaccgcctggtgttccagtctgtctcaccctgcgaggacggcaagtacaccatcacggccaccaacagcgagggaagggccgccgtggactttaacttggcagtgctggtggagaaacccactttcatagtgcagcccgagagccagagcatccatgactacagacccgtttccacgaaggttctggtgcacggtgttccactgcccacaattgagtggttcaaggacgacaagcccatcaactatgaagccatcaacaagcccggcaaggataagctgtacgccaaggaggacaccaagaagggcaccgaccaaatcgaaagtgtgctggacatcaaatccttcagggaaaacgatgtgggagcgtacacttgtgtggccaccaatgaaatcggagtcaccaaggcgcccttcaagttggctatgctgtccctcgcacccagctttgtgaaaaagctggacaatgctctggacgtgctgcagggtgaacctcttgtcctggaatgctgcgtggacggaagccccctgccaactgtccagtggctcaaggacggcgatgaagtcaagccaagcgaaagtattaagatttctaccaatccggatggcctggtgaagctggagatcaacagctgccagcccaacgattcgggagcctacaagctgattatatccaatcctcatggcgagaaggtggctctatgcgcggtggcagttaaacctgaggagatgcagccaaagttcctgaagcccatcaccagccaaaccgttgtcgtcggcgagcccctgaagctggaagcccaggtcactggattcccagcaccggaggtcaagtggtacaaggatggcatgctgctgcgcccaagtccggagattaacttcatcaacagccccaatggccaaattggcttgatcatcgatgctgcacagccattggacgcgggagtctacaagtgtctgattgccaacaagggcggcgagatcgagggcgtgtccaaagtggagattgtgcccaaggagtcgaagcccgtgtttgtggccgagctgcaggatgcgtccagcattgagggcttccctgtgaagatggacatcaaggtgacggcgcccggtgactctggattgtacgaggtgattgctcagaatcccgagggatcgaccgcctccaaggccaagctttacgtggctcccaaggccgatgaaacggctacggaggaggcgccacaatttgtgtccgctctgcgcgatgtgaacgcggatgagggtcaggagctagtgctctccgctccgtttatttcgaaccccatgcccgaggtgatttggtcaaaggatggcgtaaccctaactcccaacgagcgcctcctgatgacctgtgacggcaagcacattgggctgaccatcaagccagccgaagccgctgactccggcaactacacctgcctgctggccaatccgctgggcgaggactcctccgcctgtaacgccaatgtcaggaaggtctacaagccgccggtgttcactcagaagatatccgaccagcagcaggtgttcggcaacaacgccaagattcccgtgactgtttccggagtcccctatccggatctggagtggtacttccaggacaagcccatccccaagtcggagaagtatagtatcaagaacgatggcgaccaccacatgctgattgtgaacaactgcgagaagggcgaccagggcgtgtacaagtgcatcgccagcaacagggagggcaaggacatcacccaaggacgcctcgacatcgtcaacgaaattaaaaagcactcccgatcggagccaccagtgttcctcaagaaaattggcgactgcgacatctacgagggaatggtggccaagttcacggcctgtgccaccggatacccggagccggaggtcgagtggttcaagaacgaccagaaactcttcccttcggaccgctttttgatcgatatcgagcccaacggcctcctgaggctgaccatcaagaatgtgaccgagtacgacgtgggtcgctactcatgccgcattttcaatccatacggcgacgatatctgccatgctgagctgttctacgactctctggatagtcagcagaagcccttggaggaccagtacaccgatttcaagaagtacaagaagtctggtgctcctccgccgttgtcggagggtccaattatttcacggatgaccgatcgtggtctgcttctatcgtggaatccttcggtgcctctgactccgcgctatcccatcacataccagatcgaaatgatggatctgcctgagggggattggcgtactctaaggacgggagttcgcagctgtgcctgtgatatccgtaatttggaaccattcagggattatcgctttagggtgcgagtggagaacaagttcggtgtgagcgatcccagtccatatacccaaacctacaggtgggtgagcataatgttatttaagttcacaataccaaatgtccttctttgcaggcaaaaactggtgccagatcctccaaagacctacacctacctgcctccaggcacggacttcaggccagaaacctcgccatacttccccaaggactttgacatcgagaggcctccacatgacggcctggcacaggctcctcagtga

SEQ ID NO: 26676 - protein, 1114 aa, DROSOPHILA
MSSSSTATKVCPSSTKSSPRAFPSRKRFGITMESPSRRTSTPLSPSMGTTTSWKCSPWIWWMPENTRWSCRTRLARSRTRENFLCRDIKVNKGDKVCEPVVFTADPAPEIVLLKDGQPVVETNNVKLKVDKKDAENGLVQYTCTLNILEAEIKDSGRYELKVKNKYGELVTSGWIDVLAKPEISGLNDTKCLPGDTICFEALVQANPKPKVSWTRGNENLCNHENCEVIADVDADKYRLVFQSVSPCEDGKYTITATNSEGRAAVDFNLAVLVEKPTFIVQPESQSIHDYRPVSTKVLVHGVPLPTIEWFKDDKPINYEAINKPGKDKLYAKEDTKKGTDQIESVLDIKSFRENDVGAYTCVATNEIGVTKAPFKLAMLSLAPSFVKKLDNALDVLQGEPLVLECCVDGSPLPTVQWLKDGDEVKPSESIKISTNPDGLVKLEINSCQPNDSGAYKLIISNPHGEKVALCAVAVKPEEMQPKFLKPITSQTVVVGEPLKLEAQVTGFPAPEVKWYKDGMLLRPSPEINFINSPNGQIGLIIDAAQPLDAGVYKCLIANKGGEIEGVSKVEIVPKESKPVFVAELQDASSIEGFPVKMDIKVTAPGDSGLYEVIAQNPEGSTASKAKLYVAPKADETATEEAPQFVSALRDVNADEGQELVLSAPFISNPMPEVIWSKDGVTLTPNERLLMTCDGKHIGLTIKPAEAADSGNYTCLLANPLGEDSSACNANVRKVYKPPVFTQKISDQQQVFGNNAKIPVTVSGVPYPDLEWYFQDKPIPKSEKYSIKNDGDHHMLIVNNCEKGDQGVYKCIASNREGKDITQGRLDIVNEIKKHSRSEPPVFLKKIGDCDIYEGMVAKFTACATGYPEPEVEWFKNDQKLFPSDRFLIDIEPNGLLRLTIKNVTEYDVGRYSCRIFNPYGDDICHAELFYDSLDSQQKPLEDQYTDFKKYKKSGAPPPLSEGPIISRMTDRGLLLSWNPSVPLTPRYPITYQIEMMDLPEGDWRTLRTGVRSCACDIRNLEPFRDYRFRVRVENKFGVSDPSPYTQTYRWVSIMLFKFTIPNVLLCRQKLVPDPPKTYTYLPPGTDFRPETSPYFPKDFDIERPPHDGLAQAPQ

SEQ ID NO: 26677 - DNA, 4057 bp, DROSOPHILA
cgggatgcccatctcgctccagccgatgcggttcttggaggccaagcggaactggtagttggtattgggctgcaagtcgtgcagcaagtagaactcgtggtcaatgttgtccgccaccgtggtccaggcatcgcagttgctcagcttgtactgcagactgtagcagaggacagtggagtgaccgtcgtcgcgaggctgcttccagcggagcaggatctcggtgccgctgttggcagaaatttcgggcgagtcgggcgcatcgggcagggtggccaccacaatgcggcaacgggccactgtttggcccaccttattccgggccaccaccttgtagactccaacgtcgaagtgaagtgccggctcgaagcgcaaaatggagcgtccgtcctcgtcgaccgatatcttgatcctcttgctctcggtcagcaccatgtcgttcttgaaccactgcacacacggtttgggatctcccacggcgaagcagtggatgtggctgggctggttctcggttatggcaatggtctggggcttctcacggaagaagggcgggtagccctcccgctgggtctcgatcatggcgtccgcctcggtgtactcatccagccggggtcccagctccgtgcgcagtcgtctgatggagtaggattcgttggccgcgtacatgctgatgcgactgcgtgtgcgttcgtcgtcgatttcttcgtccatgatgtcggtgaagcgacgtctttcgcggatcacgggcagctgctcggatacatgtccaattagacacattcacacatggatccattccccccattactcaccgaccaatccactgaatcgttcaaagcaaaggacggcgatcggcgatgggccaccttcatatactctcgcaatctcaccgggaagttgacatctcgcagttgcagtagataggtatccggtccgtattggtaactggataggaagcagagagcagttacgaaatgattcaaccagcaattcaaacctctacttactgactctccgattgaatgagacccagttcgtagtcgggatgcaagtacttggagaccacttcctcgcgcttggcacggatccttggctccggcaggggctctggagtgttctccggcgtgtagacatgacccgggggatagaccatcttggacggatgctggaagcagccgctgaggcggcgccggcggaagtagttcttgcaggaggcgttggcataccagtccctgaagtggtcgtagtagttgcgcagccggtcggttccgatctggtagtcgtgatcgtaaactggacggtcgagcatgaagaaccagggatgcttcagggcggtcttcacatccatgcgttcctcgggactgtaaagcagcaagcggctgatgaagtcgcgaccgtcgtccgaaatgtgcgtccaaatctcgtccttgaagtcccagcgaccctcgcgaatcttggtcagagtttccctgtcgtcgatgcctaggaatggattgtggcctccaaggagcacgtaggttatcaggccgacagtccacatgtcgtgggagaaattgactccctccttgttcaccacctcgggtgaaacaaactcgggcatgccgtagtccagtgtcgacagattgtgcctgttgatcttcctcgacagtccgaagtcagacaccttgatgatatcaccgccgaccacggagatcagcagatccttgatctgaagtatttaaaaaaaaaagaagatcgatgtggtttaactatggcactattcctgtgtatgtagcatctcttaccgtcagacccatgtggcccactcccatttcgtgcatgtgctccaggccccacagagtctgcctgatgtagtgggcgatgtctcgctccgtgtaatagtcgcgacgaaggaggttgtctctgaccagctccccgccggcggccagttccatgatgagggtcacactgcggtcggtgtcgtaggcatcgtatggacggatcaggttcttgtggttgaaagtgttcatcatctccagttcgttcagcatgaatggccgcagctcgggtcttccgtacatgatcttggccgcgtagttgtcgccggaggatcgctccacggcgtggtaggttatgccctgcgttccacggcccagttcatccccgatgtcgtatttgtcctggtagcgcagctgcttggagcgcacgtaaggatgtctgccgtaggtcttgtagatgtactgatcctcgttctcctcgatgtgaacggttaccgaagtgctaatggatccggcgatattcctggcactgatggagtacaagccgccgtccttgatgatcgagtcgtgaatcgagagcacgtagatatccgggtcatatgagctaatctgtaagtaggattccaagttgaattactatacattctgcgactagctatagcgttcttcttcgttgttttaccttaatgcgggatgagtcgacaatcggcttccagtccttgaaccagtgaacctccggcagaggaatgcccaccaacttggcctcgatccttccattcttgcgggccatgatgaaggtctcatctggacgcttgaggaacctgggatgctcggcaatctccagtctgacgcgctgtctagcttctccgtgttcgtttgtggccacagcttcgtaccagccaacatcacgatccagcatcctggagaaatatgagaatcagatgttactttacccaaaagtaatcctttacaacccacttgttaatgaagagcgtggcctgtccgttgcgagtgtagctctggtcgaatctgccacccgattctatgagcatgtcatcgaagtagtaggtcatcttgggcttgggatagccgtagacgaaccacatcagctcggtgttgtgatccttgacgccgtagctaatgtcctgttcgcggagcaggaatctaaattgaagaaagctataggtaccacaaaacatagatatacaccaatactcactgaggagcctgtgccaggccgtcatgtggaggcctctcgatgtcaaagtccttggggaagtatggcgaggtttctggcctgaagtccgtgcctggaggcaggtaggtgtaggtctttggaggatctggcaccagtttttgcctgcaaagaaggacatttggtattgtgaacttaaataacattatgctcacccacctgtaggtttgggtatatggactgggatcgctcacaccgaacttgttctccactcgcaccctaaagcgataatccctgaatggttccaaattacggatatcacaggcacagctgcgaactcccgtccttagagtacgccaatccccctcaggcagatccatcatttcgatctggagttcgtcaatgaaagataagtcttgttcgtttgggttagatgagtcagcaacttacctggtatgtgatgggatagcgcggagtcagaggcaccgaaggattccacgatagaagcagaccacgatcggtcatccgtgaaataattggaccctccgacaacggcggaggagcaccagacttcttgtacttcttgaaatcggtgtactggtcctccaagggcttctgctgactatccagagctgcaacgtgaggctggttaatcatagctcggagatgatttattataacctacagtcgtagaacagctcagcatggcagatatcgtcgccgtatggattgaaaatgcggcatgagtagcgacccacgtcgtactcggtcacattcttgatggtcagcctcaggaggccgttgggctcgatatcgatcaaaaagcggtccgaagggaagagtttctggtcgttcttgaaccactcgacctccggctccgggtatccggtggcacaggccgtgaacttggccaccattccctcgtagatgtcgcagtcgccaattttcttgaggaacactggtggctccgatcgggagtgctttttactgcaaagtagatagggatagttaccagggatacttcagaggcacaaaggattacttacatttcgttgacgatgtcgaggcgtccttgggtgatgtccttgccctccctgttgctggcgat

SEQ ID NO: 26678 - DNA, 1795 bp, DROSOPHILA
cttcaggccagaaacctcgccatacttccccaaggactttgacatcgagaggcctccacatgacggcctggcacaggctcctcaattcctgctccgcgaacaggacattagctacggcgtcaaggatcacaacaccgagctgatgtggttcgtctacggctatcccaagcccaagatgacctactacttcgatgacatgctcatagaatcgggtggcagattcgaccagagctacactcgcaacggacaggccacgctcttcattaacaagatgctggatcgtgatgttggctggtacgaagctgtggccacaaacgaacacggagaagctagacagcgcgtcagactggagattgccgagcatcccaggttcctcaagcgtccagatgagaccttcatcatggcccgcaagaatggaaggatcgaggccaagttggtgggcattcctctgccggaggttcactggttcaaggactggaagccgattgtcgactcatcccgcattaagattagctcatatgacccggatatctacgtgctctcgattcacgactcgatcatcaaggacggcggcttgtactccatcagtgccaggaatatcgccggatccattagcacttcggtaaccgttcacatcgaggagaacgaggatcagtacatctacaagacctacggcagacatccttacgtgcgctccaagcagctgcgctaccaggacaaatacgacatcggggatgaactgggccgtggaacgcagggcataacctaccacgccgtggagcgatcctccggcgacaactacgcggccaagatcatgtacggaagacccgagctgcggccattcatgctgaacgaactggagatgatgaacactttcaaccacaagaacctgatccgtccatacgatgcctacgacaccgaccgcagtgtgaccctcatcatggaactggccgccggcggggagctggtcagagacaacctccttcgtcgcgactattacacggagcgagacatcgcccactacatcaggcagactctgtggggcctggagcacatgcacgaaatgggagtgggccacatgggtctgacgatcaaggatctgctgatctccgtggtcggcggtgatatcatcaaggtgtctgacttcggactgtcgaggaagatcaacaggcacaatctgtcgacactggactacggcatgcccgagtttgtttcacccgaggtggtgaacaaggagggagtcaatttctcccacgacatgtggactgtcggcctgataacctacgtgctccttggaggccacaatccattcctaggcatcgacgacagggaaactctgaccaagattcgcgagggtcgctgggacttcaaggacgagatttggacgcacatttcggacgacggtcgcgacttcatcagccgcttgctgctttacagtcccgaggaacgcatggatgtgaagaccgccctgaagcatccctggttcttcatgctcgaccgtccagtttacgatcacgactaccagatcggaaccgaccggctgcgcaactactacgaccacttcagggactggtatgccaacgcctcctgcaagaactacttccgccggcgccgcctcagcggctgcttccagcatccgtccaagatggtctatcccccgggtcatgtctacacgccggagaacactccagagcccctgccggagccaaggatccgtgccaagcgcgaggaagtggtctccaagtacttgcatcccgactacgaactgggtctcattcaatcggagagtcagtaa

SEQ ID NO: 26679 - protein, 550 aa, DROSOPHILA
MWFVYGYPKPKMTYYFDDMLIESGGRFDQSYTRNGQATLFINKMLDRDVGWYEAVATNEHGEARQRVRLEIAEHPRFLKRPDETFIMARKNGRIEAKLVGIPLPEVHWFKDWKPIVDSSRIKISSYDPDIYVLSIHDSIIKDGGLYSISARNIAGSISTSVTVHIEENEDQYIYKTYGRHPYVRSKQLRYQDKYDIGDELGRGTQGITYHAVERSSGDNYAAKIMYGRPELRPFMLNELEMMNTFNHKNLIRPYDAYDTDRSVTLIMELAAGGELVRDNLLRRDYYTERDIAHYIRQTLWGLEHMHEMGVGHMGLTIKDLLISVVGGDIIKVSDFGLSRKINRHNLSTLDYGMPEFVSPEVVNKEGVNFSHDMWTVGLITYVLLGGHNPFLGIDDRETLTKIREGRWDFKDEIWTHISDDGRDFISRLLLYSPEERMDVKTALKHPWFFMLDRPVYDHDYQIGTDRLRNYYDHFRDWYANASCKNYFRRRRLSGCFQHPSKMVYPPGHVYTPENTPEPLPEPRIRAKREEVVSKYLHPDYELGLIQSESQ

SEQ ID NO: 26680 - DNA, 4012 bp, DROSOPHILA
cgcacggaaagacatgtgagtggaattgcgatgatgcgggccaacggtgggccagtccgaaatctagacaggattatactctgaaggtgagataagccgataattttggctgtgggagtgggtacccacacatgtgcaattcataccttttactcgttttctactttttcgatttcgattgattgtaatcttgtgaccagggctcgtcactcattgatttttctgctgcaaatgaaggctggacttgttagttgtgaatgtgagtgggctgagatctgctttgtttcgcctcacatcgtgccgaaactgagttcctattgagctaattgaggtgtttgcgtgttgtacctagcgcttactctaaaatataggctgtgcacgaaaatttaatcaatagtgataagaaagctttcgccagctttctgagagcgagctttcgcagggttgctttcgctgaatcgatttgtgattactctcgtcgactaacgggtctgtgtgggtgtttaacgttttggttgtacctgcctgtatatgaaaatacagtaagcactcaattgtgttaaactcaaattaataaataacgtttgcagaatatcgtctataaaaaatttgtagaatttcagaagctttggactttggggcttcccaacactgcaaaacgttacatatttatcgccattgcaaatatagagtctagtagtttagaaatatatcttttaaattatcatagaatatttttataaaagcagactgaatatgtttattacgccacttaaaaagttgtttttatcaacacccaaaaatatgctaaatgaagcaccgaaggccgttttcatttgattgattgaatggagcagagttaaatttgaatagtttcgctttaattaaccagataatatatttatatatatagaatttgcatgttgtacacttatatatattccatatatacaagaaataaaaacaacattcctcttaacactacttcgcagctaattgactaaaatgtggtgagcagctcctcctggatgctattcgatcgaagtagttgagtaggggtaggtccgccggcgaccgtgttcaggactttggaggacgtagccgaggcgttcttgaggtcgtgatactcgtcgcagaacgtctagtggtggatagtggagatagcattacgtcaaacatggattaccttcattgcttaccttgagacggctgcccaggaagatggcacgctcgcgcttcctgaccatgtagtccgacgacatgagccacctgtgctccaagcaatcctcggtgtatggccgctttctgaattttcaaaagaaaagtgtacagagtcattgagtcattgtacatagatgacagccatgagtactcacgtgggatgtcgcttgaagaggagcatgatgaagcgcgtggcctcgggcgtgacctctttgaaaagattctcgaacctgtagcgcacgaaggagatgttttgcttggtctcgtactcgtcggctccgcggaatggactgcaaccggacaggagcaagtaggtcagcgctcccagcgaccagatgtcgctctgcgggaatatgggctcgtcgttgatcatctcgggaggctggaagtccagggagccgcagggcgtgaccttcatgcccagcttgttgaccttcttggccgatccaaagtcgaccaatttcacctgaatagagcgcacggaggccatgaccacgttgtctggctggatgttcaggtggcaatagccacgccagtgcaaatactggagggcatccagcagctgggtcaccacagtggccaccatctgctcggagtactcgtgccggctgctgaagtaggtcaacacgtcggcgccctgcagcttctccatcacaaagatggcaatgggcacattcagcggcttgtatgcactgaatagcgccgggatccgttcgtggcggagcgttttgaagttatcgaactcggcgaccacattgtcctcattctcgtcggtcacctccaggatcttggccaccaccacggtgtcggtggacttctggatgccctttactatggtgctaaactcgccacgggcgatctccgagatgaagctgtacttgtcgctgacggaggagtctgtcacccagttagggggttcccgctcgcagtggtagtcggtgtggacgcgctcctcctcgggaaccacttgatgcccgttctcggtgagctgctgtaaatgcttcatggccttggtgatgtggattttgggggcatctccgcccaccgtcgaggcgctcaccgggatgcccatctcgctccagccgatgcggttcttggaggccaagcggaactggtagttggtattgggctgcaagtcgtgcagcaagtagaactcgtggtcaatgttgtccgccaccgtggtccaggcatcgcagttgctcagcttgtactgcagactgtagcagaggacagtggagtgaccgtcgtcgcgaggctgcttccagcggagcaggatctcggtgccgctgttggcagaaatttcgggcgagtcgggcgcatcgggcagggtggccaccacaatgcggcaacgggccactgtttggcccaccttattccgggccaccaccttgtagactccaacgtcgaagtgaagtgccggctcgaagcgcaaaatggagcgtccgtcctcgtcgaccgatatcttgatcctcttgctctcggtcagcaccatgtcgttcttgaaccactgcacacacggtttgggatctcccacggcgaagcagtggatgtggctgggctggttctcggttatggcaatggtctggggcttctcacggaagaagggcgggtagccctcccgctgggtctcgatcatggcgtccgcctcggtgtactcatccagccggggtcccagctccgtgcgcagtcgtctgatggagtaggattcgttggccgcgtacatgctgatgcgactgcgtgtgcgttcgtcgtcgatttcttcgtccatgatgtcggtgaagcgacgtctttcgcggatcacgggcagctgctcggatacatgtccaattagacacattcacacatggatccattccccccattactcaccgaccaatccactgaatcgttcaaagcaaaggacggcgatcggcgatgggccaccttcatatactctcgcaatctcaccgggaagttgacatctcgcagttgcagtagataggtatccggtccgtattggtaactggataggaagcagagagcagttacgaaatgattcaaccagcaattcaaacctctacttactgactctccgattgaatgagacccagttcgtagtcgggatgcaagtacttggagaccacttcctcgcgcttggcacggatccttggctccggcaggggctctggagtgttctccggcgtgtagacatgacccgggggatagaccatcttggacggatgctggaagcagccgctgaggcggcgccggcggaagtagttcttgcaggaggcgttggcataccagtccctgaagtggtcgtagtagttgcgcagccggtcggttccgatctggtagtcgtgatcgtaaactggacggtcgagcatgaagaaccagggatgcttcagggcggtcttcacatccatgcgttcctcgggactgtaaagcagcaagcggctgatgaagtcgcgaccgtcgtccgaaatgtgcgtccaaatctcgtccttgaagtcccagcgaccctcgcgaatcttggtcagagtttccctgtcgtcgatgcctaggaatggattgtggcctccaaggagcacgtaggttatcaggccgacagtccacatgtcgtgggagaaattgactccctccttgttcaccacctcgggtgaaacaaactcgggcatgccgtagtccagtgtcgacagattgtgcctgttgatcttcctcgacagtccgaagtcagacaccttgatgatatcaccgccgaccacggagatcagcagatccttgatctgaagtatttaaaaaaaaaagaaga

SEQ ID NO: 26681 - DNA, 1883 bp, DROSOPHILA
aaagacgtcgcttcaccgacatcatggacgaagaaatcgacgacgaacgcacacgcagtcgcatcagcatgtacgcggccaacgaatcctactccatcagacgactgcgcacggagctgggaccccggctggatgagtacaccgaggcggacgccatgatcgagacccagcgggagggctacccgcccttcttccgtgagaagccccagaccattgccataaccgagaaccagcccagccacatccactgcttcgccgtgggagatcccaaaccgtgtgtgcagtggttcaagaacgacatggtgctgaccgagagcaagaggatcaagatatcggtcgacgaggacggacgctccattttgcgcttcgagccggcacttcacttcgacgttggagtctacaaggtggtggcccggaataaggtgggccaaacagtggcccgttgccgcattgtggtggccaccctgcccgatgcgcccgactcgcccgaaatttctgccaacagcggcaccgagatcctgctccgctggaagcagcctcgcgacgacggtcactccactgtcctctgctacagtctgcagtacaagctgagcaactgcgatgcctggaccacggtggcggacaacattgaccacgagttctacttgctgcacgacttgcagcccaataccaactaccagttccgcttggcctccaagaaccgcatcggctggagcgagatgggcatcccggtgagcgcctcgacggtgggcggagatgcccccaaaatccacatcaccaaggccatgaagcatttacagcagctcaccgagaacgggcatcaagtggttcccgaggaggagcgcgtccacaccgactaccactgcgagcgggaaccccctaactgggtgacagactcctccgtcagcgacaagtacagcttcatctcggagatcgcccgtggcgagtttagcaccatagtaaagggcatccagaagtccaccgacaccgtggtggtggccaagatcctggaggtgaccgacgagaatgaggacaatgtggtcgccgagttcgataacttcaaaacgctccgccacgaacggatcccggcgctattcagtgcatacaagccgctgaatgtgcccattgccatctttgtgatggagaagctgcagggcgccgacgtgttgacctacttcagcagccggcacgagtactccgagcagatggtggccactgtggtgacccagctgctggatgccctccagtatttgcactggcgtggctattgccacctgaacatccagccagacaacgtggtcatggcctccgtgcgctctattcaggtgaaattggtcgactttggatcggccaagaaggtcaacaagctgggcatgaaggtcacgccctgcggctccctggacttccagcctcccgagatgatcaacgacgagcccatattcccgcagagcgacatctggtcgctgggagcgctgacctacttgctcctgtccggttgcagtccattccgcggagccgacgagtacgagaccaagcaaaacatctccttcgtgcgctacaggttcgagaatcttttcaaagaggtcacgcccgaggccacgcgcttcatcatgctcctcttcaagcgacatcccacaaagcggccatacaccgaggattgcttggagcacaggtggctcatgtcgtcggactacatggtcaggaagcgcgagcgtgccatcttcctgggcagccgtctcaagacgttctgcgacgagtatcacgacctcaagaacgcctcggctacgtcctccaaagtcctgaacacggtcgccggcggacctacccctactcaactacttcgatcgaatagcatccaggaggagctgctcaccacattttag

SEQ ID NO: 26682 - protein, 619 aa, DROSOPHILA
MDEEIDDERTRSRISMYAANESYSIRRLRTELGPRLDEYTEADAMIETQREGYPPFFREKPQTIAITENQPSHIHCFAVGDPKPCVQWFKNDMVLTESKRIKISVDEDGRSILRFEPALHFDVGVYKVVARNKVGQTVARCRIVVATLPDAPDSPEISANSGTEILLRWKQPRDDGHSTVLCYSLQYKLSNCDAWTTVADNIDHEFYLLHDLQPNTNYQFRLASKNRIGWSEMGIPVSASTVGGDAPKIHITKAMKHLQQLTENGHQVVPEEERVHTDYHCEREPPNWVTDSSVSDKYSFISEIARGEFSTIVKGIQKSTDTVVVAKILEVTDENEDNVVAEFDNFKTLRHERIPALFSAYKPLNVPIAIFVMEKLQGADVLTYFSSRHEYSEQMVATVVTQLLDALQYLHWRGYCHLNIQPDNVVMASVRSIQVKLVDFGSAKKVNKLGMKVTPCGSLDFQPPEMINDEPIFPQSDIWSLGALTYLLLSGCSPFRGADEYETKQNISFVRYRFENLFKEVTPEATRFIMLLFKRHPTKRPYTEDCLEHRWLMSSDYMVRKRERAIFLGSRLKTFCDEYHDLKNASATSSKVLNTVAGGPTPTQLLRSNSIQEELLTTF

SEQ ID NO: 26683 - DNA, 5221 bp, DROSOPHILA
tgccacggcatcctcggcatgacaacttcactctgttgctccatttgcaacatttatgcgatttcgtatgttgctgcctgtcggttgtatctggtgtatctgtgtgcgggaggtcattttattgtttccagacaaaatggtcaaatgggaatttagcttttttggtgctgtgtgtgtgggtagccgatagatttagattgaactgtcgaacatgtaactgggttctgtcgaattctgcccatatacaagcccaacaaaaaaaggaaaactttgggagatagccgaccagcttaaacaatgcaaatgattagaataatcgccgaaggtgtttgactcaaccggacttacttgccccataaacacaaatttcagtttgccgcaataaaagttttcattttggcccctttcgaccgtttttacgactctcgattgacttttgcgtcaggacagatcaaaataaattccatgggctcatttttaaatgaaatcaataagggatagtctttatatttaagcttttgaggaagcgtaagcaggagctttaaattaaattattcattgataaatttccaattatcagaagtcgccagctttctcgatacaaaagcagagaggtaactctaatttatgtcgttttttcgctgacaaagtgtgggaaatattcattcattttccccgtttacaatcgtctgtatttatgtcccactcccttttggaatgctaatttccacgggaaaattttcgacgcgcttgcaaattaggttctgtggctgtggctttggaaccagctatgctgatatgtccaaaaagtggaaatggtagatttgttttggttgcattaattttgcacggaacaatttgtgacaacctagccataccttggctcttttaaccctattatgaaaaggaaattagtaataaatttgtatatactttaaaattggtgaaataacgctttattagtagctttactttacatgatccaggctttaaacttgagctaattggatttgggaggaccaagaattttctcgatttcgcagagtctgtccattacctgctgatttctggccttttgatcctttagcttttctccaatggcatccagggtggctgcaatagccaatagcgaaacatcggtggtctgaagatctcttagcaaaggagttatctttgctacgggaacggaatctgagggtgacgatgattgttcggggatttccgaagtgggaacctcttcaactgctttctctgcaatggtgggaacaacttcagatattcccacactagtattgtctgggttgtccccggccgtaattggtacttcggcagctggagcttcagaaatcactggttctgcgtattttgaaacctccgggactggtgcctctattgggatggtgctctgttcaacaatgacctctgccggctttgtctctgtctctggaatttcagctactgcgatctcttgaggaaccggagggtcaatgagcggtatggcagtatcagatacttctgcagcagcagtaacgatttcaacagcgggtgtggtgatttcggtagctggagcaccgtcattaatgtttgcaacatctggttcctgagtagtgacaggagcttcagttatggcaggatccaggactttttcggctacaggatactcaaccgtagtttctggaatcgatgttgaagtttctgtcaccggcacctctacagcatccactgcttcctggattacgacaggtgcctccacaggtatgggttctgtaggggtcgctaggcttggttccggttcaggtatgggctctggagctgtaattggagcgacagccacttctggagaggcaactgcttcatttggcggcggtaatgaggtctctggtattggtgaagatgttgattctgcagcttcaacagctggcacggatgtagtttgttctaataaatccggaataggagctggtggttccacaggctcgattattaaatccgcagctgcctcaggtggagcaacgtctgcaactgcaacttctgttgtaacttcgacaggcggtgcaactggcgtttcaatggcagcttctgatagtacagaaacatcgataggttccgtaggcactgccgcaggtggtgccgtggtctcgggaacagaagccgtagttggtggagtagaaacgatgggagcagcggcagacggagcttcagcaggtgcatcagagggtgcggcgatcacaggagcaacttctggtatatctaaagctgctatggtcactggtgctgatgctggtgctggtgtctcaggagtttcttcagccactacagctggtacaggttcggcagccacaggagggagaacaggtggcgctaagtcgacaggagtttcagcaacagcactaggaacgggtgatggagcgatcaccggaggtaattcgggaacagcagatgcagtgacatccggatccgttactgctagtgttgcaggaactggtgtcgtggcaacgactggcgctggtattgattctgcggccacaggaggtacaacgggtggtgttgtctcagcaacagcaactgaagcaacttctggggtttctgcaacaacaggtggtgcaatggtttctggctctggggctggagtaggaggtgtagctacaacagtattcgcagcaacttgggactcggcaacgactggagcaagggctggcgtttctggtgcagttgttagagtcgcagcagctaccgggggctcagtcgaagcacttacaggagcgaccactgcggtctccacagctggtgcaaccgacacatggggggaagctgcagccggagcaacgactggggtttcagtagccggtggagcaacgaccactggctcagctgcagctagtggtttcgttgccacgacggaaacctcggggatgagaggtgcaacgcactccggtatggttgcaaccggaatctcagcaacaggtggtggagctggagtctcggcgacgacgggggcaactgcaggagcaacggcaggcgcaagaactggggcaacaacaggaacagcagctggtacagcagctacaggtgctgcaacgggaaccgtggtgttagcgggaaccacaggtggtgtggcgatcacaggcgaaacaacgggagtcacggcagccggagtgggggcagaggcagcaacaggtggtgtcgctatcacaggcgcagctacaggaattggggcaacaggagtgggtgttgcagcaacgggaggtgccactggtgctgaaacagcgaccggaatctgagcaacagcaacgggtggtgttgaaactggacttgctgccggcggagttggagctgcaacaactggaggcgccacagatgcgacaggagcgacggatgcggcagcaattggagctggagctggaatagtaactgttgccggttgcacacttgcaagggtgggcggtggagcaactggagtgactgcaatcggtgccgctggtgcgggagccactgccgcaggacttactacttggacaggggcagccactgctgatggcgtcacaggcgcagcaactggtgctgaaacaggcgatggaatggttcctggttccatgtctatcctttgcccactttcacataaaagttaatccgttttttccttttgggcggattgtgccttgtccaatgcttagttgcaaaaatgtttcatggccagcttttcatggtcagaagacaactgaaaacagaggaatgaaaacgagaaaaacatgagacatggcaaggctggatctgaccatgatttaggccattgtcttaaataaaattaaatcgatgagaaaccacgtaagaatgagaaaaataagaataaaagttctccggaaaatactgattcaaatatctatacaataaaattacattgattaaatgagattagaattgtcttcactacatgagaagtaaaagtaagagcaattgagttaactagtctcttgcttctgacgtctattcgaaatatatttttcttttacaaaactgtagttgctaaattatgtaagagaaaacaaggcacttgcacaatttcgttcaaaaattcgaaaataagcggtcagcaatgaaatggtcaactattaggaactgcctcttaggtaagtcaatccttttgaatattttcaatattattaaccaatttaatttgttgaatagttttaaacagcgaccgacttgccgatgagaaaaacggtgtttaactggcccgttgactcagttttcttggacatttttacctcttttcattggtttaccttcggtcagaagtccgacaactgcccattgagcgcagaaagtatacgcatagtttcaagtgctttttgcgtttttccaattcccagacactaaggtgcttatcagctgaccttagccacatattaaatttgttccggctcgcacgaggaaacatttggcgctgaaaagtgtgctacatgcgttggcgcccaccactgcgtatgagtgatattcgcatattattcgattatcgattccgttcgcatcttgccaaatgcatcgggtagataaatcggggaaacgctttcaagaatttattcgcgatccagtgcatatcgcttaccactcgctttgtcagctgcactcgcagacacataactggttatttacacaatactgattactttgccgtatttgcaatgtagttgtcaacaaaatgcgacaggttcccgcgctgccccgcactgccccgccctcacccgaccctccacaatccatttgctatcgtggcccattcaatgtctgatgcaatgacagttgacaaactgccactacgtagccgttggatcggaacacattagctcggtggaaatgtaatcgcaaagaactaagaaataaatctttcaatttttcgagtgaatgccgggtaggaagtgcagccaaatgtaaagcaatccacagaggcagccggcagttgcacatgccgtccgttggagcaagtgtaatgtgatctgcgtacaatttgcaggcgtcgttttaaaaagtccaacaccaacacgtccacctacaccttcgcctcacttgcccctctgctggccgggaaccgagcacacttgagacttttgcaaatagtttttccacatatgaacagaaagaatttttctcgcaggatggaaaataaaaagagttgcgaacgaaaagaaaagaaatacatacatatatataaatagacgagatg

SEQ ID NO: 26684 - DNA, 2708 bp, DROSOPHILA
cgtttttctcatcggcaagtcggtcgctgtttaaaactattcaacaaattaaattgttgtcttctgaccatgaaaagctggccatgaaacatttttgcaactaagcattggacaaggcacaatccgcccaaaaggaaaaaacggattaacttttatgtgaaagtgggcaaaggatagacatggaaccaggaaccattccatcgcctgtttcagcaccagttgctgcgcctgtgacgccatcagcagtggctgcccctgtccaagtagtaagtcctgcggcagtggctcccgcaccagcggcaccgattgcagtcactccagttgctccaccgcccacccttgcaagtgtgcaaccggcaacagttactattccagctccagctccaattgctgccgcatccgtcgctcctgtcgcatctgtggcgcctccagttgttgcagctccaactccgccggcagcaagtccagtttcaacaccacccgttgctgttgctcagattccggtcgctgtttcagcaccagtggcacctcccgttgctgcaacacccactcctgttgccccaattcctgtagctgcgcctgtgatagcgacaccacctgttgctgcctctgcccccactccggctgccgtgactcccgttgtttcgcctgtgatcgccacaccacctgtggttcccgctaacaccacggttcccgttgcagcacctgtagctgctgtaccagctgctgttcctgttgttgccccagttcttgcgcctgccgttgctcctgcagttgcccccgtcgtcgccgagactccagctccaccacctgttgctgagattccggttgcaaccataccggagtgcgttgcacctctcatccccgaggtttccgtcgtggcaacgaaaccactagctgcagctgagccagtggtcgttgctccaccggctactgaaaccccagtcgttgctccggctgcagcttccccccatgtgtcggttgcaccagctgtggagaccgcagtggtcgctcctgtaagtgcttcgactgagcccccggtagctgctgcgactctaacaactgcaccagaaacgccagcccttgctccagtcgttgccgagtcccaagttgctgcgaatactgttgtagctacacctcctactccagccccagagccagaaaccattgcaccacctgttgttgcagaaaccccagaagttgcttcagttgctgttgctgagacaacaccacccgttgtacctcctgtggccgcagaatcaataccagcgccagtcgttgccacgacaccagttcctgcaacactagcagtaacggatccggatgtcactgcatctgctgttcccgaattacctccggtgatcgctccatcacccgttcctagtgctgttgctgaaactcctgtcgacttagcgccacctgttctccctcctgtggctgccgaacctgtaccagctgtagtggctgaagaaactcctgagacaccagcaccagcatcagcaccagtgaccatagcagctttagatataccagaagttgctcctgtgatcgccgcaccctctgatgcacctgctgaagctccgtctgccgctgctcccatcgtttctactccaccaactacggcttctgttcccgagaccacggcaccacctgcggcagtgcctacggaacctatcgatgtttctgtactatcagaagctgccattgaaacgccagttgcaccgcctgtcgaagttacaacagaagttgcagttgcagacgttgctccacctgaggcagctgcggatttaataatcgagcctgtggaaccaccagctcctattccggatttattagaacaaactacatccgtgccagctgttgaagctgcagaatcaacatcttcaccaataccagagacctcattaccgccgccaaatgaagcagttgcctctccagaagtggctgtcgctccaattacagctccagagcccatacctgaaccggaaccaagcctagcgacccctacagaacccatacctgtggaggcacctgtcgtaatccaggaagcagtggatgctgtagaggtgccggtgacagaaacttcaacatcgattccagaaactacggaaccagatgttgcaaacattaatgacggtgctccagctaccgaaatcaccacacccgctgttgaaatcgttactgctgctgcagaagtatctgatactgccataccgctcattgaccctccggttcctcaagagatcgcagtagctgaaattccagagacagagacaaagccggcagaggtcattgttgaacagagcaccatcccaatagaggcaccagtcccggaggtttcaaaatacgcagaaccagtgatttctgaagctccagctgccgaagtaccaattacggccggggacaacccagacaatactagtgtgggaatatctgaagttgttcccaccattgcagagaaagcagttgaagaggttcccacttcggaaatccccgaacaatcatcgtcaccctcagattccgttcccgtagcaaagataactcctttgctaagagatcttcagaccaccgatgtttcgctattggctattgcagccaccctggatgccattggagaaaagctaaaggatcaaaaggccagaaatcagcaggtaatggacagactctgcgaaatcgagaaaattcttggtcctcccaaatccaattag

SEQ ID NO: 26685 - protein, 842 aa, DROSOPHILA
MEPGTIPSPVSAPVAAPVTPSAVAAPVQVVSPAAVAPAPAAPIAVTPVAPPPTLASVQPATVTIPAPAPIAAASVAPVASVAPPVVAAPTPPAASPVSTPPVAVAQIPVAVSAPVAPPVAATPTPVAPIPVAAPVIATPPVAASAPTPAAVTPVVSPVIATPPVVPANTTVPVAAPVAAVPAAVPVVAPVLAPAVAPAVAPVVAETPAPPPVAEIPVATIPECVAPLIPEVSVVATKPLAAAEPVVVAPPATETPVVAPAAASPHVSVAPAVETAVVAPVSASTEPPVAAATLTTAPETPALAPVVAESQVAANTVVATPPTPAPEPETIAPPVVAETPEVASVAVAETTPPVVPPVAAESIPAPVVATTPVPATLAVTDPDVTASAVPELPPVIAPSPVPSAVAETPVDLAPPVLPPVAAEPVPAVVAEETPETPAPASAPVTIAALDIPEVAPVIAAPSDAPAEAPSAAAPIVSTPPTTASVPETTAPPAAVPTEPIDVSVLSEAAIETPVAPPVEVTTEVAVADVAPPEAAADLIIEPVEPPAPIPDLLEQTTSVPAVEAAESTSSPIPETSLPPPNEAVASPEVAVAPITAPEPIPEPEPSLATPTEPIPVEAPVVIQEAVDAVEVPVTETSTSIPETTEPDVANINDGAPATEITTPAVEIVTAAAEVSDTAIPLIDPPVPQEIAVAEIPETETKPAEVIVEQSTIPIEAPVPEVSKYAEPVISEAPAAEVPITAGDNPDNTSVGISEVVPTIAEKAVEEVPTSEIPEQSSSPSDSVPVAKITPLLRDLQTTDVSLLAIAATLDAIGEKLKDQKARNQQVMDRLCEIEKILGPPKSN

SEQ ID NO: 26686 - DNA, 8881 bp, DROSOPHILA
aaaacgcaaggatgtccgcaagactcttttgttcagaaacacgtcgcatattttaacgatgaaaatattgctcccaagagggatacacctgtcgcgcaaagggaaagggaaatgattgccatgggcgtatgtgctcaggtcaaacgttttaggcaaaacaacccaagaacgcccatcgatccacatcttggcacagtgtacttgatatttgacaatagaacaagtaaaaatgatttcatgccgagtcctgatgttagaaagtgccaacttaagcccaattctctgaccaagacatacaagtatgattgcgagaggaaagcggataaatggacatgtacttttgccagcaagggaagggacttggccataaatgacaagattacaagtcacttaggatgattatcattttattgtataggactcaaggctcaaatgggaatgcaagacacagcggactaattttattccaaacgaaattttaaatatacatatatgcaattgatcaaattcgtaataaaaatatgaataaaacgataatttgttcatttcttttatcgcgatggaatatagctctatatatccgttgttatacgctaataatattatgttctatgatcgaagttttaacgctttttgtgttttacagaaaaacgttttatgtctaaaagcgcatttttcacttaaaggatccgagaaattttaaaagtggctttatgatagaattgtataagagtttatgcaaggattacaagcggaaattcttttgaaaaacatttctttatttaaagctaacataactaagacacaaattttgaaaatattacggtctataccaaaaaaatatcgatattttgtccttattagcttatcgcactgccatctagatctggaaaaaatatctatgtgcttcttttcgatagtgatgaaaattacttttatcgatacttcgcgcacgaccatctctagcgcagcgtcagacgtgattcgattttctttcgtcgttcggatcggagcgtaatattggataggcggagtgtttagacaagggcggccatctttctgaagtgaggaaaactgtagtccaagtagtccagtcattttgacaaatcgccgttgcaacacgtaagtttctaactaatttcacagtttgcgctgcgcctctgtcctttacttgtgtaggctaactgaaaactggtgcgtatgtatgtatctgttggcgaaaattttactttttcacttgctacccgggcgtctgaaaatagtaattattgattttcctggggctccttgcgtgtatttgtgcattaagtaatgtgataatgaggtaactgcttttttacgaggccttgattgtggattatcgtcgtaagcgttatttatttgcattccagagcttagactaatgcgtatagtatacgtcattggtgcaaaacatgtttttatcgcgattaaatgggtctttggctttttttttcctattctgtactctaactttccctccctttcgcactcatacggccggccggctttctggctgaatcaattacttatacacactcagcgtctgggccgccatcttttttccactcgcagtgataaattttaggtgttttttgttaccttcatttaaattggccaaaaggcgtgaatgtgttggtgtcgcacaaaccagttttacatgtgattaatgtaaactgctgactgtagcgccaaattgttccatttcttttccttttcccctatctctttgcgtgtatgtgtgtgtaagtggtgtgtgtatacgcacgctggcttgttttacggtttttgatgcggttccataataactacccgtagatgtggataaagagatctggcgattactaacccaaattaatgaattcccgcttgcatctcaacatttgttttgttctttgtgccgttttactttcagcttgtttaaataatttcctcgcttaaacacaaaccctacattacacatcccataaacactcccaaaaacagcaaaaaaaaacccatcaaaattatggtcaggtatgctgcacatcaaccccgaatattcgaaattatttatgtatccctagttcccaattccaacgtgattaattataaaattatatttttccaatattgtcgatatgttcttgtttaaaaattgtcagcttatgtagaataatatatcttaaactgcttggaaaattataattttattgaataaatttgtccccctaccgcttcgaaagaaagttatagttatactgataagtgaatcatgtctttttgcagcgtaaaggtcaacggaaatccgcagaatcgtttagtgaataacgcaaaggtcaacggcaacatggctttccgtggtaaccagaaccgcaaccgcaattttggaggtggcaacaacaactatggtggacccatgggcgccaaccgcatgggcggtatgaacatgtcgccttgggaatcgcagaatcccggcggcggacagtttggtaacaacatgcgacagggtggcggtcagatgaacgcccaggccatcaacttggccaacaatctgctgaacaatctgttcaggaaccagaatccaccatcgcttctcgacttgccccgcggcggcggtggcatgggaaatcgcaaccaacgtggtggcccggtatgtacaaaagtttacttattctcgaattagttgacaatgccaaccgaatgaattgttatacttacctatgttgttattatttatgggttcgtgaactgcgaatcgtatttctgttgtggagtgtcatatgttgaaataatttaaaaaattctactaaacatgtagaattcaattcaaagcacatagtaatcttaatattttgtctgtttacttttgttgtactcaatataaactcaacttaggatgcctaaatcgtataaacattttgtaattacgtgtataccttttggtaatatacttgctctccacagcagaaccttttattttgtgttttacccttagttagatcgtaatattgctaaatgtagctaatgcttttcctttaaaagataaatcaaaatgatcttaaacctaatcttagcttgtagtttactaaactaaaccgacgactgaaaaataacgaaaaccagcgaaaagaatattgaaaaaagtaataagaactttgtgcagtgtaggatgtaaggttgtcaaacattaggattaatgtggtattaggaggatttcgataaaaacgcatttattccatttaaaatgcaatgcttttttgtttcgtagaaactgcacaaacgaataagaacctgattattacaccgaaaataagaaatgacaattttataaaataatacacacgtattgatagcgaaatgtaccaattaaaacatgtaccgccaacacttgttccacttaacgatgaaaagagtatgatgatgatctccatatgtcaagattgaatcataagtaatttatatgcaatattttcttactagttgtacttaagcatttaattacatttttaccatatttataattcgattaattaatttccgaagttccattgccaagtaaaagaaactttcttggccgaactcaatttgccacaacgcttttctaatttatcaattatctatttttattctctcttccaaaaccaaacaatgccaaactcaaaaattcgatgcttttcaatacacctccaaatatcgaatatcgaaaccgcatcgtcttgcatatttcgaataatgcattccatattgttgttgctgctccggcatatatacttgctgttgttgttgttgctgccgccgctgctgtcgttgtggttgttgttgtcgttgtcgctgttgcgcgttgttgttgccgtcgatgatgactcttcccatttgcaataatccattgcaatcaacaaaaatctaatccccattgacggccaacaatattttcgaatatccaaatgaaattgaatgcaaaacgcaacgcacacgcactcaacacacacgcacacgcgatgcacacacacacgttgtggccaatatgcgaatcttcaccaacgatgcgatactgtaaactgtacgatgcttcccgtgcgacgccactgattgattgattgattgattgattgattgaccgattgccaaatcgattgacattgatcgccatgcaatcttctaatctgctctgctctgaaaccgaaactgatccgatctggtactggtactgcttgatggtgcaacataattacatccaaaaccacaatatgaaatacctattaatattttatgtctaatgccaattcatcgccaaattcttcttcgacgttcctgcctctgaaactcaaaatccgatttccatttttaaatgccactcgccgccacacgccaacgaattaatatatatatatgtttatgcaatatatatcaacctatccccgtcgactgattggccgccgcaactgccccgtcgatctgaccaaaatcaatatatatataccatgtgctccatgtacttatgtatactttactatatatcaacgatttattcccacaattatctataatgtgttcaatctgatcgctccgcccctcacacaatattgtaaatggccaaccgcgccatattgtctccgatctttcgaaaatgctttgtatcattaatgcctctgtttgtaaatcaaaacgatatcaattcacatatgccccatgtgcgcattccgaattgtgcaaatattttaatgtcaatcccaaatgataaacgaaacaatgtatagatggtcagtcgcggcggcggtgccggcaatcgtctcaataaccgtcgtggccagggaggtggcttccaaaatcgtggcgccactggtagtggacccaagcccccgccaaagcagggcggcggcggtattcgcaagcaaaatgcttttgatcgtgccaagaaacttttggctaaaaatgccaaccaaaataaaaagaaggaacccactcctggcgaaaagaaaatcgagaggtaagacttacaacaacttttccaaaacaaaaccaaaaccacaacaaaaagtataaatattttgctgcccaaaatcgaaaggattgatttctttcactaatatcaaaacaaataacgaacttagcagggcgaataacaactttttacttaagtacttaggcattccaattctctaattgcgttccctcatacatctctaaaaaaaaaagtatatttaattagaattagttcttcattagggatagtatattttttgatgctgtttataaaactgtgtgtatgtggggcaacttgtgcggggactcatttgggtagggaattgtaaatgtataaatttatgtgttgaaactacatactattcaagttcatactaattttttaaaatataatttaccttaaaagaaattgtttaaatataatcttttctttctttgacttttgtgcacattaaaagttttaaaaatatttttaaagttaaaatggagagaactttataatttaacttcatattcatgcttaaatatttaaattaaatgtataagctcacaataatattaaatttcctctccttttttattgatttggaagaatataaattttgaataaatatatcataaatgtaagatttcataagaaaagaaacatgcttctacatacctaataattttgtttaaaacataatttgtggcatatttcttctccttgcaaagtcatcattctcactatagtaacgcatttttatcatagctaaaaacatttattattgtatcacctatcgccacctgtactgtacgtatcataagtctaaattgcagcgagaaccactatactcctataatataataatctcttcccaatagccagacaaccagacgaattcccgtctatgaatttcaaattagaaaactaatgaatctttctttttctattccttctcgaacaaatcgaatgatccatgatcaattttaatagccctaccaaggagtctccatacgctagtgtgccgaacgacatgttctactgccatctgtgcaagaagcacatgtgggatgccaactctttcgagaaccacatcaagggccgcacccatctgatgatgcgtgagggcattgaggagagctatcgcctcaaggccaacatgatccgtcaggaggctaagatcgcagagcagctcaagtcgatcgagtttgaccgcttgaagcgcatgggcaaaagcaagcagcgtcagctggactactgcaccatgtgcgacctgaacttccatggtcacatctcgacccatcgcaagtcggagggacatttgcagctgaagaagttcttgcaccccaagtgcattgagtgcaacaaggagttcgccactcgcattgactacgatactcatctgctgtccgccgagcatctgaagaaggctgccgagaacaacaccaaggtgggtgagcgcaagcgccagaccttgcccatcagcaccgaagaagaggagacccgcgatttgcgcctgccccagaagcgcaagaagaagccggtcaagaaggagggcgaagcagccgatggcgaggctaagaaggagggtgccggcgatggcgagggtgccgaaggtgatgaagccgagggagaagaggccaaggagggtgaggaagctgctgacgagacaaaggagggcgatgagctaaacgagagccaagaggaagaggaagtggcactgcccgtggaccccgaggactgcatccttgacttcaacgacggcgatgagatccccagcgaggtggatacccgcctacctaagtacaactggcagcgtgctgtcggtcccggtctgatctccaagctggagtgctatgagtgctcggtgtgcagcaagttcttcgacaccgaggtgaccgccgagattcactcccgtacggcgactcatcaccgcaacttcttgaagtttatcaacgagaaatcaagcgataccaagatcgcacagaagcgcgcagctgccgccctggaggagaatgagcgtaagaagcgcaaggttgaggaggcagaggctccggctgccgagggcgcagccgaggaaaccaccgaaggcgctgagggtgagctgtacgatccatcggaagccactggcgatgacgaggacgtggagatggtggatgataatgctgagggcgagggcgaaggcgaaggtgacgaggaagccgaggctgaggtcgaggaagatggcgccggccaggacaacggcgaagaggagatggaagcccaggaggaagagggtcaggagggcgagcaagagcccgaacctgagccagctccagtccaaactcctgccccggctgaacctgcaccaccagccaagaccccagccaagactccgaccaaggcagctgctccagccgctgttgccagtcccgcagctgcggcaacgtcggcagacgcctctccatctccggccaagaaggcaacgcctgctcgcgctgccgccggagccaaggccacgccgcagcgacaacgcgcccgcggtcgctacaatcgctactaagtagacgtcgaaggaattcgtaatttaacataacataaaccttaatatacaagaaaaaatttacattcacgcccaggaggaggatgaagaaagaacagatcaaatcgatctcttcccgcaatttgacatttgcatcccaatttgcatatacactgaatgaatggaaactgagaagaagacggtcaacttttagttgaaacagttgaatatattgtacgacgaagcttcttgaaactgacgagggagaacacaaacaagttaattgaatcgagaatcgtattacctacccgattcccccctcacagaacgcataccatgccagccagcgaaccaaccattcaacttatgtaatcatataaattctataataaacaaagaaacaaaactagttgtaaaacaaacacgattcctgtgtgtcattgcgggatatggaaattggctttcaatctgttgcaaaatgagattcagtagcagtgtatatatctatgagggctgtacgatttcgttttagcgcacaattaatacatttaatacttgatctttttacacaagcgttatatttaatgctacaaatcggtacagagattaagtgaggtgagaatacatacatataaggaaagccttgatatagtaagatacgaagtgggatatatttattatttacagcttacgagactaggcgctactcccaggaatgctccgagggaggcggaaacgcttttttgagtgagatcccactgagtcgggaaatgggattaagtacttgggggcgcgcggtatgaagatcgagtggaatcagttgaattccagagtattcgcctccgtcatcgtcgtacgcatgcggctctggtcgctctgggaacgacgaagtccgcccggacgccatccgctcctccagcgcttaatgcatcccagcaaggaccagttgatggacttggagcgactcagcacatagacatacggatccgaggtgaagtgcagcgccgtaagaacatcggcgatgatgaagaacttgttcgatgcgggcacccgatttggagctatagccaacgggatggcgatctaaaacggagataattgttgataaaggccatgtaaatttattatattatattagatttgcataatacggaatggttgaagatactagacgtttagtagttactatctgcaaatttagaatggtatccacccagtactcaccatctgtggcatccagcagatgacgaacgagatgctgaggaacgccattagtttggcgaacttgatctcgactggcgaggagtcggtggccgccattgtgacgctaacgctgtgcctgtactgccttgccggctgtacactgcgatggctgtttccgcttccggtgctca

SEQ ID NO: 26687 - DNA, 2408 bp, DROSOPHILA
gttcggatcggagcgtaatattggataggcggagtgtttagacaagggcggccatctttctgaagtgaggaaaactgtagtccaagtagtccagtcattttgacaaatcgccgttgcaacaccgtaaaggtcaacggaaatccgcagaatcgtttagtgaataacgcaaaggtcaacggcaacatggctttccgtggtaaccagaaccgcaaccgcaattttggaggtggcaacaacaactatggtggacccatgggcgccaaccgcatgggcggtatgaacatgtcgccttgggaatcgcagaatcccggcggcggacagtttggtaacaacatgcgacagggtggcggtcagatgaacgcccaggccatcaacttggccaacaatctgctgaacaatctgttcaggaaccagaatccaccatcgcttctcgacttgccccgcggcggcggtggcatgggaaatcgcaaccaacgtggtggcccgccctaccaaggagtctccatacgctagtgtgccgaacgacatgttctactgccatctgtgcaagaagcacatgtgggatgccaactctttcgagaaccacatcaagggccgcacccatctgatgatgcgtgagggcattgaggagagctatcgcctcaaggccaacatgatccgtcaggaggctaagatcgcagagcagctcaagtcgatcgagtttgaccgcttgaagcgcatgggcaaaagcaagcagcgtcagctggactactgcaccatgtgcgacctgaacttccatggtcacatctcgacccatcgcaagtcggagggacatttgcagctgaagaagttcttgcaccccaagtgcattgagtgcaacaaggagttcgccactcgcattgactacgatactcatctgctgtccgccgagcatctgaagaaggctgccgagaacaacaccaaggtgggtgagcgcaagcgccagaccttgcccatcagcaccgaagaagaggagacccgcgatttgcgcctgccccagaagcgcaagaagaagccggtcaagaaggagggcgaagcagccgatggcgaggctaagaaggagggtgccggcgatggcgagggtgccgaaggtgatgaagccgagggagaagaggccaaggagggtgaggaagctgctgacgagacaaaggagggcgatgagctaaacgagagccaagaggaagaggaagtggcactgcccgtggaccccgaggactgcatccttgacttcaacgacggcgatgagatccccagcgaggtggatacccgcctacctaagtacaactggcagcgtgctgtcggtcccggtctgatctccaagctggagtgctatgagtgctcggtgtgcagcaagttcttcgacaccgaggtgaccgccgagattcactcccgtacggcgactcatcaccgcaacttcttgaagtttatcaacgagaaatcaagcgataccaagatcgcacagaagcgcgcagctgccgccctggaggagaatgagcgtaagaagcgcaaggttgaggaggcagaggctccggctgccgagggcgcagccgaggaaaccaccgaaggcgctgagggtgagctgtacgatccatcggaagccactggcgatgacgaggacgtggagatggtggatgataatgctgagggcgagggcgaaggcgaaggtgacgaggaagccgaggctgaggtcgaggaagatggcgccggccaggacaacggcgaagaggagatggaagcccaggaggaagagggtcaggagggcgagcaagagcccgaacctgagccagctccagtccaaactcctgccccggctgaacctgcaccaccagccaagaccccagccaagactccgaccaaggcagctgctccagccgctgttgccagtcccgcagctgcggcaacgtcggcagacgcctctccatctccggccaagaaggcaacgcctgctcgcgctgccgccggagccaaggccacgccgcagcgacaacgcgcccgcggtcgctacaatcgctactaagtagacgtcgaaggaattcgtaatttaacataacataaaccttaatatacaagaaaaaatttacattcacgcccaggaggaggatgaagaaagaacagatcaaatcgatctcttcccgcaatttgacatttgcatcccaatttgcatatacactgaatgaatggaaactgagaagaagacggtcaacttttagttgaaacagttgaatatattgtacgacgaagcttcttgaaactgacgagggagaacacaaacaagttaattgaatcgagaatcgtattacctacccgattcccccctcacagaacgcataccatgccagccagcgaaccaaccattcaacttatgtaatcatataaattctataataaac

SEQ ID NO: 26688 - protein, 109 aa, DROSOPHILA
MAFRGNQNRNRNFGGGNNNYGGPMGANRMGGMNMSPWESQNPGGGQFGNNMRQGGGQMNAQAINLANNLLNNLFRNQNPPSLLDLPRGGGGMGNRNQRGGPPYQGVSIR

SEQ ID NO: 26689 - DNA, 3149 bp, DROSOPHILA
acacacagaccagcgcacagttactcacactggcgcagagggacacgttcttgttcttctgcgccgctgctccgtcgtcgtcttggacttttgtgtgttgtcgtaggttctacagtttagcttggattttccctggcgcatttggagcgctgcgaagttggcgcttggatctcgacgaagcgagagttttgtacgcgcgatcaccatttctcccaaaaaataataaaatcgacgcgcgagtgtgccgccacaaaacgaacctatatcgaaacgagcgcccgattttggaactagcctgaacttggaaacgaaggacttcgaaaacaacacggaagtgaattgaaaaattatgcaatacaagctattacgaaggctaagtgcaagtgacaaacttaagcgaggggattagtaatgagaaatgcgaaatgatcgtgataattgaattcaagcattaacgaaagaactgcgcacaaagtagggaggcaataattacatatgtacatggctgggaaaggccttaactaaacttagcaaactaataaatagaaaaaaggaaatattggccaaatattatagtattgggaatattaggttacttgatatcaaaaattaatgtctattttatacacttattcttagacttaatgttaacttatcgtacttattatgattggtttttcaagattaccagaacttgatagattggtctagcttttgaaatcggatagcattttctttaaaggactttgccatatgctaaagcctaacttcttttttcaattcagccacagctgacaaaagcgaagaaaatttgaaagaccgtgaatccttttgaaacgccctctccggattcctcattaagtgcaaaagatataacatcgcagagatttcccataaaaatgctgatcaggcgccctcgcaggttgccaacgtcgatttccgccagcaggacgatgatgaagatgatggatgcccatctcaccgattcgatccgagcaacatggatgtataccaaatagagctggaggaacaggcacaaatccgctccaaactgctggtcgaaacctgtgtgaagcactcgtcttcggagcagcagcagctccaagttaagcaggaggacctcatcaaggatttcactcgggacgaggaggaacagccaagcgaagaggaggcggaggaagaggacaacgaagaggacgaggaagaagaaggcgaagaagaagaggaggacgaggacgaggaagccctgctgccggtagtcaattttaatgcaaattcagactttaatttgcatttctttgacacaccggaggactcgtccacccaaggggcctacagtgaggccaatagcttggaatccgagcaggaagaggagaagcaaacacagcagcatcagcagcagaagcagcatcaccgggatttggaggattgcctaagtgccattgaagctgatccattgcagttgttgcattgcgacgacttctatagaacatcagccctagcagagagtgttgcagccagtctaagcccacagcagcagcagcaacggcagcacacccaccagcaacaacagcaacagcagcagcagcagcaacaccctggacagcagcaacatcagctcaactgcacgctgagcaatggtggaggtgctttgtacaccatcagcagtgtgcatcagttcggtccggccagcaaccacaacaccagcagcagctccccctcctccagcgccgcccactcttcgccggacagcggctgctcgtcggcctcctcctccggatcttcgcgatcctgcggatcctcctctgcatcctcctcctcgtcagcggtcagcagcaccatcagcagcggccgcagcagcaacaacagcgtcgtcaaccccgcagcaacatcttcatctgttgcgcatctgaacaaagatgcggctgctgttgcagttggtggtgttgctgcagctgtggctgatgttgctgctgctgttgctgctgtagtagatgctgttgctgctgctgctgtaggtgactcgggtgcagtgtgctgctggtagagtcatccacattgagggaggcaggagctccagcggcggcggaggaggcggccgctccgttcagctcacgggaacgcttgggaacgcgaccataacgtacggctgcagaggtaaagtatattgaaaaatggggaaatttgttactcagttaatgacactttttcaagtaagttttttatttaaatagacaagctgctgtatgcaactgcaattttaataacttctctggctgtccggaggtcggatataagtccattttatatggtatattacatacaatactgagaaagtttgtttcagaagatagccacgccccttcttccgcccaatcttttgaaaaatattttgagttcttaccttttattacatgactagtattatctcttattttacatttgtatgtaatgcatttatttctgtccagccaaaaagtatgctttgaattgcattttccatttccatttatatttccaaaagacgccgatgagccacggtcatgtttacccattaaaatagtgcgtatttttttttattgcctgtatcttattagtcacctgattatctaaattaaaaaacgcgctccctacaaaatacacaattatcatatcatagcatcacatcaaatgatgttgttttcttacattaagttgggaaagtgaaaaactggcacacgcataaatcttagaaatgcgtcacacacttgtggatactttcgcgtatctttcaagcaaattgccaacatttctgttctatcaactagaaaatttgcgtgtcctacaagttgtttgctcggtccgtcgaaatgcgatacattctgtctgaggaaaataattaatttccatttttcgttaagcgtttgaagtcttcattagccaaaaggttgtttcgtcatttcttgaatatattgaatgtcttctatgtgaaattataaaatgtgagctgatttcgctttgtgcaaccgaagacagcacatattttattaattaaaatcgcatttggttgcacaaacagccagcccaacagacagacggacagactgagtgaaaaagaaacagacgcagctgctccagttgccggcttttagtgttcactttatcagtgg

SEQ ID NO: 26690 - DNA, 2782 bp, DROSOPHILA
atggatgtataccaaatagagctggaggaacaggcacaaatccgctccaaactgctggtcgaaacctgtgtgaagcactcgtcttcggagcagcagcagctccaagttaagcaggaggacctcatcaaggatttcactcgggacgaggaggaacagccaagcgaagaggaggcggaggaagaggacaacgaagaggacgaggaagaagaaggcgaagaagaagaggaggacgaggacgaggaagccctgctgccggtagtcaattttaatgcaaattcagactttaatttgcatttctttgacacaccggaggactcgtccacccaaggggcctacagtgaggccaatagcttggaatccgagcaggaagaggagaagcaaacacagcagcatcagcagcagaagcagcatcaccgggatttggaggattgcctaagtgccattgaagctgatccattgcagttgttgcattgcgacgacttctatagaacatcagccctagcagagagtgttgcagccagtctaagcccacagcagcagcagcaacggcagcacacccaccagcaacaacagcaacagcagcagcagcagcaacaccctggacagcagcaacatcagctcaactgcacgctgagcaatggtggaggtgctttgtacaccatcagcagtgtgcatcagttcggtccggccagcaaccacaacaccagcagcagctccccctcctccagcgccgcccactcttcgccggacagcggctgctcgtcggcctcctcctccggatcttcgcgatcctgcggatcctcctctgcatcctcctcctcgtcagcggtcagcagcaccatcagcagcggccgcagcagcaacaacagcgtcgtcaaccccgcagcaacatcttcatctgttgcgcatctgaacaaagagcaacagcagcagccactgccgacgacacagctgcaacagcagcagcagcaccagcagcagttgcaacacccgcagcagcagcaatcttttggcctagcagacagcagcagcagcaacggcagcagcaacaacaacaacggtgtctcctcgaaatcatttgtgccctgcaaagtctgtggcgacaaggcatcgggataccactatggtgtaacctcctgcgagggttgcaagggattctttcgtcgcagtatccagaagcaaatcgaatatcgctgtttgcgggacggcaagtgcctggtcatcagactgaaccgcaatcgctgccagtactgccgcttcaagaaatgcctttccgctggcatgagccgcgattccgtacgttatggtcgcgttcccaagcgttcccgtgagctgaacggagcggccgcctcctccgccgccgctggagctcctgcctccctcaatgtggatgactctaccagcagcacactgcacccgagtcacctacagcagcagcagcaacagcatctactacagcagcaacagcagcagcaacatcagccacagctgcagcaacaccaccaactgcaacagcagccgcatcggcgtacgtgtgaagaccccgagtactccacaaacgccacaaatgtgttcgatcgcctcctcgccatcggagctgggcggttgcaatagtgccaataacaataacaataataacaacaacagtagcagcggtaatgccagcggtggcagcggcgtgagcgtcggcgttgttgttgtgggcggacaccagcaactggtgggaggcagcatggtgggaatggcgggcatgggcacggatgcccaccaggtgggcatgtgtcacgacggcttggcgggaacggcaaacgagctgaccgtctacgatgtcatcatgtgcgtgtcgcaggcgcaccgcctcaactgctcctacacggaggaactgaccagagagctcatgcgtcgtcccgtgacggtgccacaaaatgggattgccagcacagtggccgagagtctggagttccagaagatctggctgtggcaacagttctcggccagggtgacgcctggcgttcagcggattgtggagtttgcgaaacgcgtacctggcttctgtgatttcacccaagatgaccagcttatactaataaagctgggcttcttcgaggtctggttgacccatgtggcccggttgatcaatgaggcgacattgacactggacgatggtgcctacctgacgcgccagcagcttgagatactctacgattctgactttgtcaacgccttgctgaactttgccaacacgctgaacgcctacgggctgagtgacaccgaaatcggactcttctcggccatggtgctgcttgcctcggatcgagctggactcagcgagcccaaggtgatcggcagggccagggaactggtggccgaggcgctgcgcgtacagatcctgcgttcgcgggcaggatccccacaggcgctgcagctgatgccggcgctggaagccaagatacccgagctgagatccttgggggccaagcacttctcacacctagactggctacggatgaactggaccaagctgcgcctgccgcccctcttcgccgagatcttcgacatcccgaaggctgacgatgagctgtaggatgtggagccaaccccgcgattccagggccgtgcaaagcaaaccgcaacaagaacagaatattctaccacttgtaggcttaagcaacgtagctatagatcgaaatgggagggccgcagatcagatacacgtctactcagcattaccggagagatagtccactaagcctatatgcatactactatactagcagtgtta

SEQ ID NO: 26691 - protein, 537 aa, DROSOPHILA
MDVYQIELEEQAQIRSKLLVETCVKHSSSEQQQLQVKQEDLIKDFTRDEEEQPSEEEAEEEDNEEDEEEEGEEEEEDEDEEALLPVVNFNANSDFNLHFFDTPEDSSTQGAYSEANSLESEQEEEKQTQQHQQQKQHHRDLEDCLSAIEADPLQLLHCDDFYRTSALAESVAASLSPQQQQQRQHTHQQQQQQQQQQQHPGQQQHQLNCTLSNGGGALYTISSVHQFGPASNHNTSSSSPSSSAAHSSPDSGCSSASSSGSSRSCGSSSASSSSSAVSSTISSGRSSNNSVVNPAATSSSVAHLNKEQQQQPLPTTQLQQQQQHQQQLQHPQQQQSFGLADSSSSNGSSNNNNGVSSKSFVPCKVCGDKASGYHYGVTSCEGCKGFFRRSIQKQIEYRCLRDGKCLVIRLNRNRCQYCRFKKCLSAGMSRDSVRYGRVPKRSRELNGAAASSAAAGAPASLNVDDSTSSTLHPSHLQQQQQQHLLQQQQQQQHQPQLQQHHQLQQQPHRRTCEDPEYSTNATNVFDRLLAIGAGRLQ

SEQ ID NO: 26692 - DNA, 4868 bp, DROSOPHILA
aataatctggcgggcagcaacatttcgtcgccgcagggcggatacaacgatcccaacttcgaggacagcagcgcctaccagcgttccaattccgtgggcggtaatctggccggaggcttgggtcagcagagcggcgtcagcgacagcgactggggcggctggcaggacaacggcaacagcaagtcgcacatgaccagctcgagttcgtaccacaatcagttgagtagcagcagcggcggcggtaccgcctccgccggcctaacccgcgacgctgactggtccggcttcgaggcgacgaactatcagagttcagagacctcctaccagaacgcttcgtccggcggatcgacagctcgccgcaacatgaagctgcaggacacatcgcagaagctgagcgagggcttcgagagcctggacgtgaagagtgtgaagcccaagacggcaacggcctcgtccgccaacaaaggcactgccgaggacgacgcctggaatctgctgatgaactagaaaccgtggcgagcagcttatgcgattgtattttttgtattccattcggttgtcaagttgtgtctcctttgttttatgtgtctcttgatgtctggccccgaggctgctatgcgcgcatttaatgtaaccaactgaattgtgtattcattcttcgacttcaaacataaagtgcaactattcccgattatttccacagtttagaccaattttgtatagatctacttaactaacgaattacttagcttaaagtgtatgccaggatactgcgagggatgcgagatgagaaaatacatattatgttaacaagtgtagtcgttcgttttttaaatgggcggttttaaattcaaaaaatataaatatttgcaaatttaaaaaatacatttaaaattaatagtgttaccctacaattccacattttaaaaaccacaaataggtttgagtcacggctaagcagtgacgcgatgcattttagggtattttcgaccacacaagaagtatatctagataaacgttcgtggtcacactggcaaacccaaaaaattaaaattgaagagttctgcgtgaatcgctttaagccacaaagtcgccgaaatagcgtaaaagcagacgaactcttaaatagctcgaccagtaggtagtgaccacagaaaaagtgggaaatgcaattgaagcttgccactttcttttgcatatccacattcctttcgcctgcatgtgagcgtgtgtgtgtgtgtgtgcatgaaaatcgagtgcagaataatttttgccaaattggcaacaatttgcaagcgtttcgagagaaatttgagtcacacctgtctggaaaatgggcggagaattcagaaaagaatgtagaaagtgtgtgagagcgtgaagaattcttcggttaaagctacgctttgcaaagtagaaagttcgagttgctgggggaaagtctcccttttcccaacactccccccctctaccacgacttttggagacatgtgcgtgcgtgtgcgtgaagctgtgggtttttcaaggttttccggaaaatcgctggccttcaaaattaactgcgaaaatcaatgggatgtgggttgtacgcgggatcctgaaaattggcacctacaatgtacatatgtagttctccagccaagaagaggatgacttcatcgcggggaaattcgatacgttgagctgttttatttatctttcgcccagacataacattataaactaatgtgtatacaacactcgatacctctttcagacgactgtttttccatttgacttgccaagtagtgcaaaatgagccggccataagagcagagcagctgatagcccaacacgtaatcccccagagaatcggaaaccgagcaaacccagagaaatccttcagctgccagttaaagaacagaaaactcaaggtaaactgtaaacacgagtgtggagaatggtcagaaagcaagttggaatcgaaaacagtgcatccttagcagtaagcaagcagcaggatcaaaaggagcaggactataagccagaggatcaaaagcaacagcacatcgacatcgacttgacgcccgatccggccagcaacttcaacttcgcccagcaggcgcaggccaactactccgcccgcacgctagccgccagctatgagcacggccaaaatctcggcctgcaacatgcccatcttgccaccagcagcactaccaacacgcccttggcctatgatctgcacgaggtcgccagctccggctccatcctgcccaccgagatccccatcgaggacgaggagcggctggagcgcatcttcaacaagctggaccgcgatggcgacggcaggatcgatatccacgacctgtcagcggcactgcacgagttcgggttgtcgagcgtttacgcggaggtgagcaaagcctatttataggatgatatatggaagccatcacatctcatctagctatttcaaatgtatcatggataggacatatctgaggctcccatgattttaacagatgtatcttagggtagaaaacaagcaatcttgattagcatagttgaactacacgtgccctgggctcgccattttcacagggaactaacaatgcctttttctatttgctattcttcgccaaacagaaggcagacggttgagatcaataatatgcggccttgacgggcaaaagtatctgagaatcttaatttatacattttgcattgtttgcttgctctgatcaaggcgaaacatttggcactgctgctgaccctgggcagcctgaccctttcattgtgtcatttttgcagttgccaaaaaagggcttattaaatcaaaagaaatgtggggtggcaaaccaggcgaagatgaatattctatttttagatgagcacaatattatttcgcgtacaaatctctttgtttgactaacagatattgtttgtggtattattagcagctttgtttatattttagccaaaacaaactagatataaagaaatttaaactattacttttatcctgtgacctaaattctgctccattatacttctagtgaaatcctatattagtttatttatgttgcacaaatcgccagattgtgaaattacatgcaacaagtattgtgacaacttccgaaagcaatcagaattggattagatggtatatagagggttaatgtgcagacaactgagtagatttatatggtttccgccggcgaagcccgcatgatacgagaaattgatttgctttcacgattcaggtcgatactctagtcagcggctcactatgcgaaaggcctgcgagtgttcgacacaaattttccagtaatattccggcagtgaatctagtaaattttccaggagcaatgccagtaatattccgcacttgctttccattacagaaattccttcagcagtcggacaaggatcagagcggcaacgtgggcttcgccgagttcctgcactacgtgcgggagcatgagaagaacctggtcctgcagttctcgcacctagataaaaatcgcgatggtgggtaattgattaaaccttaattggattagttcttataagtgaattgtattacaggcaaagtggacttggaggagctgatatcggcgttcaaggacctgggcctggacattgacatggacgaggccagaaatctgctcaccaggtgggttaattatcctcaactttcttttgtgcatgtgttaatacgcgtgacttttcttgcagaatggacaaggatggcagcctgaacattagctttaacgagtggcgggacttcatgctcttggcgccctcaacggacattcatgacttgattaaattttggcggcactctactgtgagtttactagagatacgttttgcaagttgctgaattcataaaacagagagcagtggttcttcgaaggtgttccactgtttctctggattagttttcgttctatcgcgtttgtttttaaaatatctatgtacactagtatacatgtagctgtttaacgttaactaattgccaacttttacccttcttatcccctcgcccatatccaaaaacaaaattaaaccgaaaaaacacacacttcacacactaacaaaccaaaatgtcgaatgtagtacctacacccacactactcctgactaactgaggaagatctgaaggtacatatccgtcaagttacatattacgattaccattgatattgttgtagacccacccacgtagaagcagggcactcgggaacacatacgtacctacgcccggacactgtacacacccatcacaaccatcacaccccgtcacacccaccgggaaaaaaggctttatcatcagtcccattcgctaatcagccactagttatattgcctgcatgtgtattatctcgtagtattttaccttcacccgagcgaccatttttcaaggaccggagcgcccaagagacggagctttagccataccatatcatgtgcactctcttaaactcgttctcttttttagtcgagactggcgtaaacattatgattatttcatcagactgtttaaacgctcgcttaatgggaagtccgttttcgatatcgtttcgaccgctttcgggataatttgcacattgtcataaagatgcagcacttttcgttacacagcgaacaaggttcatgctcaaaagattagaaacccgtacaaatttgattagtgcttctactttcattagtgctttgtattaaaagatcttcaattatttttattaattaggtagtcgaatgattcgtacttgggcttaatcattagaaccttaaaaaaggccaaaatagcttaactgaattgaaatgagttaccaactgtaccgaaagtctaaataccattgctttctttgtgcgtaatt

SEQ ID NO: 26693 - DNA, 1139 bp, DROSOPHILA
agtatatctagataaacgttcgtggtcacactggcaaacccaaaaaattaaaattgaagagttctgcgtgaatcgctttaagccacaaagtcgccgaaatagcgtaaaagcagacgaactcttaaatagctcgaccaacgactgtttttccatttgacttgccaagtagtgcaaaatgagccggccataagagcagagcagctgatagcccaacacgtaatcccccagagaatcggaaaccgagcaaacccagagaaatccttcagctgccagttaaagaacagaaaactcaaggtaaactgtaaacacgagtgtggagaatggtcagaaagcaagttggaatcgaaaacagtgcatccttagcagtaagcaagcagcaggatcaaaaggagcaggactataagccagaggatcaaaagcaacagcacatcgacatcgacttgacgcccgatccggccagcaacttcaacttcgcccagcaggcgcaggccaactactccgcccgcacgctagccgccagctatgagcacggccaaaatctcggcctgcaacatgcccatcttgccaccagcagcactaccaacacgcccttggcctatgatctgcacgaggtcgccagctccggctccatcctgcccaccgagatccccatcgaggacgaggagcggctggagcgcatcttcaacaagctggaccgcgatggcgacggcaggatcgatatccacgacctgtcagcggcactgcacgagttcgggttgtcgagcgtttacgcggagaaattccttcagcagtcggacaaggatcagagcggcaacgtgggcttcgccgagttcctgcactacgtgcgggagcatgagaagaacctggtcctgcagttctcgcacctagataaaaatcgcgatggcaaagtggacttggaggagctgatatcggcgttcaaggacctgggcctggacattgacatggacgaggccagaaatctgctcaccagaatggacaaggatggcagcctgaacattagctttaacgagtggcgggacttcatgctcttggcgccctcaacggacattcatgacttgattaaattttggcggcactctactgtgagtttactagagatacgttttgcaagttgctga

SEQ ID NO: 26694 - protein, 272 aa, DROSOPHILA
MVRKQVGIENSASLAVSKQQDQKEQDYKPEDQKQQHIDIDLTPDPASNFNFAQQAQANYSARTLAASYEHGQNLGLQHAHLATSSTTNTPLAYDLHEVASSGSILPTEIPIEDEERLERIFNKLDRDGDGRIDIHDLSAALHEFGLSSVYAEKFLQQSDKDQSGNVGFAEFLHYVREHEKNLVLQFSHLDKNRDGKVDLEELISAFKDLGLDIDMDEARNLLTRMDKDGSLNISFNEWRDFMLLAPSTDIHDLIKFWRHSTVSLLEIRFASC

SEQ ID NO: 26695 - DNA, 2427 bp, DROSOPHILA
gctgttgtaaattaagtcgacgaccaaattaatgcaaaatgtgtacaaaattgatgtgaaaccgaatttagtttaagctattatttaaagcaacaattagccaataagctgaagacaaaaggccccgagcacattttgaaatgaataggaaatgataacgaacttttattcttcttgctgtgtgcgcctagtggaggtggtatttattgcccaaaactctcaaaacattaaacattgtataccgtaagctcataattttttcaatacttttaagtagacaatgattcacacaattttggtgcattgcgaaatgtttactaaataaatagtggtattctgacagccttaggtttccgacaataacacgaacgaacagagaatcggacatgaccagatcgactcagctaatgatcttgaatatccaagaatttatattttatagggtctaaaccgtttcctttttccgttaagtacttttcaaccaatttactatattataatataaagggtatctaatgataaatccttaattgaaatacgtgagtttgacagttttggttggtagaatagggaaggcaatatttactactcaagtaagcggtataaaactgagatccatgtcggcatcatattctgttatactttagagtatttggttggtagaatagggaagacaatatttactactcaagtaagcggtataaaactgagatacatgtcggcatcatattctgttatactttagggtatttgcttcaagctcggcttttattaaaatgctaaaataacagggtatttgatagtcggggaagtcgaccttagcattctctgttgttttgaattaaatcagttgctttgcccatttctatcgatatgccgaaaacatttcggcctcgccgctgtgacccctaaaatttatagcgaagttatgttttaaaaattattttttttgtcgaaatcgcatatgcttttagttagaatacaaatattagtttcataccatcaattttagccttattggaaagacgcgtataatttacaagcgctgccgtctctaagctttttttaatcatttgacgaacttcttcaggtggaacgggggtaacaatgtctttcattagaactctctctaatagggataatgttgctttgagtgcaccttcggggcgaccaaatggaaaacagtatctgaaattggttatttgaaattcgagtaactggcgtaggcgttctttgatttcagaaaatttctccttttcctcatgtgttatgcttccaactccatcaggttcatcttcgcaagcgtcaggcattgtcaatgcacaagttgcttcctctgttgccattcgctgtgcgactgcctgatatgcttttgaattcagcttgtcttccaatacaccttgtagttcaaagtctgaatatattttctaaatttataagtttagaagattaatataaattgattataacgcacttaagagataataactatgcatttggtttacatactactgcaacaagtattgtaatataaacaagaaagaactctatagtagaggttcccgactatcagatgcccgttactcagctagaccgagaattttcaacatttttcaggaactttggttttttgggaaacaaatatatttcaatgctctaaggtgggggcgggatagatttgggcggcttttatgagtccgagtgtgcgtttgtgtgtgtttaatccaataaaataaatcaaggtagaaaaagttttttgacaattcaataaaatttacaagacttaatgaaatatgaaaaaatatttcaaagttttcaaaaatgtggccgtggcagttttaagcggttttagggcgttagagtggacgtggcaaaaaatttttaatgcaaatcgatagaaatttaatttaatttgtaatgtaaaaaaatatcaacatacaagctatccaacccgtaaatatagcaaattgccccagttgataaacaaatttcaaactccaatcctagcagcatttccattgtccgtttttgtcgccagctggctaacccgataaataaccaaactaaaagtaatcacaagtcagctatccgagcggttttatcacatggtaataaaccaattactttcatatctaaaactttaaataaaaccgaacaactttacgccacaaacaaaaaaaaattgttagccatagtttgtgctcttgaaaatctcagaaaatatttatatgcagtaatcaatatagaaatacaaacagaccatcaatctttatcttttgcaatctcagataatacctcgaacgtagaaatgaaaagatggtgttctttcatagaatgtttcacaccaaaaaaaacccggatcaacaaatgccgtacctgacgctttttctcgaataaaaaaaaataatattacaaacaacgatatag

SEQ ID NO: 26696 - DNA, 4820 bp, DROSOPHILA
cctgatgtcgccttgaaaatacataaaaaacttatatttttgtcaataattatactatgaatttcgtttgtcattcacatagtaaatgaattcaaagttttgttatcgtgtaactcgaattcatataaatagtgataaagtttgttcataatttaaagctatattataagcaccatacattaccgaacgacaagcataaatctaatatttaaggattaaaaaacaagtaatcgcgttccgcttatttttttaccatgattgatcctagttcaagtgaggaagaaggagaagatgacgctgttcctaacgtttcatcaaaaggacgtcttacaaatacgaccaaaggaacaagtgccgtttctataattggaggatctgcaggatccgtcgtaggatcaaacattcctgtatctggctctaatacagatttgatcggaaatcaaagacaatctaatataagttctatttgtaaccgcaacgatgttgggaacattagtgtagcagctttaggatcaacctctaacaaaattgagcaaatatgtggcaaccgagctgataccggaaatcttgaagttcccagtaatggtattccgagtggaatttcgcaagaaactttaaatcaaagtgttggatcgtcaagggcaaactcattgccaaggccattgtcaccgtcgccatctctaaccagcgaaaaacatgaaactgcagagccgcatggcaaacatgaacgtgaagaagaggaacgtaaacgacgaattcaactttatgtattcatttcaagatgtatttcatacccttttaatgctaaacagccgacagatatgactaagcggcaaaccaaaataagcaaacagcagttggaaattataactcagcgatttcaagcgtttcttaaaggcgaaactcaaataatggcagatgaagcatttcaaaatgctgtgcagagctaccatgacgtatttcttaaatcggaacgagttttaaaaatggttcaatctggtgcatcatcacagcacgattttcgagaagtttttcgtaataatatagaaaaacgtgtcagatctttacctgagatagatggtctaagtaaagaaaccgtactaacttcatggatggcgaaattcgacattatattaaagggtactggggaagaagattctaagcgaccatctcgaatgcagcaatcactgaatagcgagttaattctttctaaagaacaattgtatgatatgtttcaacaaatattgctagtaaaaaaattcgagcaccaaattttatttaacgccctgatgttagattctgccgatgaacaagcagcagctataagacgggaattggacggtagaatgcaaagagtaggagagatggaaaaaaatcgcaaactaatgcccaagtttgtacttaaggaaatggagtctctttacgttgaagaacttaaatcgtctataaatcttctgatggcaaatcttgaatctcttccagtgtcaaaaggaaatatggatagtaaatatggactccagaaattaaaacgttataatcacagtacaccgtcgtttttaaaattgatactgcgatctcacggatctttatctaagttggagggtgattcagaggatggttccacacaattgacaaagttagatgttgtactaactttccaactggaagtaatagttatggaagttgagaacggggaaaagcttcaaacggatcaagccgaagcatcaaaaccaatgtgggatacgcagggcgattttacaaccacacacccactgccagttgtcaaggtaaaactgtacacagagaaccccggaatgctggcattggaggataaggaactgggaaaggtaacacttaagcctactccactttcttcaaagtcacctgagtggcatcgaatgattgtaccgaaaaatcttcccgatcaagatatacgtattaagatagcttgccgacttgataagccattaaatatgaaacattgtgggtatctttatgctattgggaaatcagtatggaaaaaatggaaaaggcgttattttgtcctagttcaagtatcccaatatacttttgcaatgtgcagctataaagagaaaaaatcagaaccgtctgaaatgatgcagcttgatggatatactgttgattatatagaagccgccagtgcaaatcttatgtttggaatcgatttgaatggaggccgttatttcttcaatgctgttcgagagggagatagcatttcgtttgcttgcgatgatgagaacgaatgcagtctttgggtcatggctatgtacagggcgactggacagtcccacaaaccaactccaccaataacccaagataagaactcagctatgtcgaaaattcaaggtgacgcagataaagcccggaaacatggaatggaggattttataagcaccgatccttgtacttttgatcatgctacacttttcaagacgttacagaatcttacactggagtataggctcaacgacccatatgcttctttggggtggtttagtcctggtcaagttttcgtgttggacgaatattgcgctcgatatggtgtccgaggatgctacaggcacttatgctacctttctgatttactggatcgtgccgaaaaacaacacatgatagacccaactctaattcactattcattcgccttctgcgcgagccacgtacatggaaacagacctgatggagttggaagcataacacatgaggaaaaggagaaattttctgaaatcaaagaacgcctacgccagttactcgaatttcaaataaccaatttcagatactgttttccatttggtcgccccgaaggtgcactcaaagcaacattatccctattagagagagttctaatgaaagacattgttacccccgttccacctgaagaagttcgtcaaatgattaaaaaaagcttagagacggcagcgcttgtaaattatacgcgtctttccaataaggctaaaattgatgaggacttgcgaggagacgttattgttccggccccaaaaaaactagaggacttaatacacttagcagaactttgtgttgatttgttgcaacaaaatgaggaacattacggagaactgcgcaaacatgataaaatggataaaaagaaattacttaaggaagatgaagatgtatcaggaggccacaatgaaagcgaagttgatttaatcgacagtactggactcattagcgcatctgaactggctactgccgcatcaactgatggatcgtcatttcgttactgtatgccgactcatgcagtgtacaccccgccagtaccaacggcatgtatcgcatttgcatggtttagtgacttgcttgtggaacacgcggaaatattttggtctctctttgctgttgacatggatagagtcttatcagaacaagctcctgatacgtgggactcttttccattgtttcaaatattaaatgattacttgagaactgatgacaatttgcgaaatggacgctttcatcagcaccttcgagacacttttgcacctttagttgtgcgatatgtggatctgatggagtcttcaatagctcagtcaattcataagggatttgaaaaagaacgatgggaaagcaaagggattaacgctgccttgaaccctgcagcattaaacaatgctgcccaggcgctcaatacagcagctctcaacccatcaatgatactgtgcggcaaaaaagatcaagtaaatttttatgtaccgaagctaccaaagcaatcaaattcaacagcggccaacgacgaaatgagaaacgggtgtgccacttctgaagatttattttggaaactagacgctctacaatcttttataagagacctacactggccagacgcagagtttcgacaacatttagaacagcgcctaaaaatgatggcggtggatatgatagagcaatgtattcaacgaactgattcgtcctttcagtcatggctaaaaaaaaacattgccttcatttcaactgattatatattgccctctgaaatgtgcgccatggtcaatgtgatattagacgctaaaaatcaaagctttaaattaaccactattgacggcattgatttgtacaagtttcatgcgaaaattgatgaccaaatcgacaaagcgaatgtagctatgacacaaggtctaagcggtaaacttatgtctgtgctagagtcgactttgtctaagctagcacgatacgatgaaggtagcttgatcggctcaattcttagttttacaaatgtttcaagctcaggaaaggatctggggcaaggatacgtaaatttcttcaggaacaatatggatcaagtacgaggaaagattgccgacgatttgtggacattacatttttttgaacagtggtattcgcagcagattaatatgctgtgtaattggctgtcggaacgggtggaccacgcccttcactatgctcaagttgcatctatttctcatattatcaagaaaatatattcagactttgaactacaaggtgtattggaagacaagctgaattcaaaagcatatcaggcagtcgcacagcgaatggcaacagaggaagcaacttgtgcattgacaatgcctgacgcttgcgaagatgaaccctgtgacgaaattcgagaaggggaggaagaagacaatggcgatgaatctacatctaatataccaaggggcttgccaaaaccaaaagtcgctgccgcccaagctgctgctgttaccaacgtagttgccggacgggtgggaaatttactgggaaaaggcattggtgggcttagttcaaagttaggaagtggaagttggttttagacttga

SEQ ID NO: 26697 - protein, 1519 aa, DROSOPHILA
MIDPSSSEEEGEDDAVPNVSSKGRLTNTTKGTSAVSIIGGSAGSVVGSNIPVSGSNTDLIGNQRQSNISSICNRNDVGNISVAALGSTSNKIEQICGNRADTGNLEVPSNGIPSGISQETLNQSVGSSRANSLPRPLSPSPSLTSEKHETAEPHGKHEREEEERKRRIQLYVFISRCISYPFNAKQPTDMTKRQTKISKQQLEIITQRFQAFLKGETQIMADEAFQNAVQSYHDVFLKSERVLKMVQSGASSQHDFREVFRNNIEKRVRSLPEIDGLSKETVLTSWMAKFDIILKGTGEEDSKRPSRMQQSLNSELILSKEQLYDMFQQILLVKKFEHQILFNALMLDSADEQAAAIRRELDGRMQRVGEMEKNRKLMPKFVLKEMESLYVEELKSSINLLMANLESLPVSKGNMDSKYGLQKLKRYNHSTPSFLKLILRSHGSLSKLEGDSEDGSTQLTKLDVVLTFQLEVIVMEVENGEKLQTDQAEASKPMWDTQGDFTTTHPLPVVKVKLYTENPGMLALEDKELGKVTLKPTPLSSKSPEWHRMIVPKNLPDQDIRIKIACRLDKPLNMKHCGYLYAIGKSVWKKWKRRYFVLVQVSQYTFAMCSYKEKKSEPSEMMQLDGYTVDYIEAASANLMFGIDLNGGRYFFNAVREGDSISFACDDENECSLWVMAMYRATGQSHKPTPPITQDKNSAMSKIQGDADKARKHGMEDFISTDPCTFDHATLFKTLQNLTLEYRLNDPYASLGWFSPGQVFVLDEYCARYGVRGCYRHLCYLSDLLDRAEKQHMIDPTLIHYSFAFCASHVHGNRPDGVGSITHEEKEKFSEIKERLRQLLEFQITNFRYCFPFGRPEGALKATLSLLERVLMKDIVTPVPPEEVRQMIKKSLETAALVNYTRLSNKAKIDEDLRGDVIVPAPKKLEDLIHLAELCVDLLQQNEEHYGELRKHDKMDKKKLLKEDEDVSGGHNESEVDLIDSTGLISASELATAASTDGSSFRYCMPTHAVYTPPVPTACIAFAWFSDLLVEHAEIFWSLFAVDMDRVLSEQAPDTWDSFPLFQILNDYLRTDDNLRNGRFHQHLRDTFAPLVVRYVDLMESSIAQSIHKGFEKERWESKGINAALNPAALNNAAQALNTAALNPSMILCGKKDQVNFYVPKLPKQSNSTAANDEMRNGCATSEDLFWKLDALQSFIRDLHWPDAEFRQHLEQRLKMMAVDMIEQCIQRTDSSFQSWLKKNIAFISTDYILPSEMCAMVNVILDAKNQSFKLTTIDGIDLYKFHAKIDDQIDKANVAMTQGLSGKLMSVLESTLSKLARYDEGSLIGSILSFTNVSSSGKDLGQGYVNFFRNNMDQVRGKIADDLWTLHFFEQWYSQQINMLCNWLSERVDHALHYAQVASISHIIKKIYSDFELQGVLEDKLNSKAYQAVAQRMATEEATCALTMPDACEDEPCDEIREGEEEDNGDESTSNIPRGLPKPKVAAAQAAAVTNVVAGRVGNLLGKGIGGLSSKLGSGSWF

SEQ ID NO: 26698 - DNA, 2800 bp, DROSOPHILA
ctgccaaagctttaagaacctgaacccatcatgtcgattggaagaagcaaatagacatgctctttgtttaagactgggcatcaagtaaggcagtgcaactccagcaattgccgtgtgtgcggatctaagcaccacaccctgcttcatcaggaaaactcagtctcgccttcaaaacataaaagatcacagactgaagcttgcctcttactcgcattatgccgaagaaccacctgcattgcctggaacgtgtgctgctcttcttgcacaggatcttggtaaggatgttttgctcctagcctctggaaccatattagtgaggaaccgttaataaatcttcgtccgtgcttattagctaaacatgaagaggacttagaatttctgaatcaattgatgtctttgcaagccttcagctcgatatctgttgacaagtatgcttataaaaaatgtgtacccacaaaatacactataaagaatttatttaagtatttaagtgtaagcaaattgtcgataacggcattgctgcctatctaaaacttttgatgaaagctgaaagtagaccaaattacttactttattataaacattaatatataacatacctttatttaaatttttcaatattttttttaatatcggtagaaagttggaaaaaatacgaaaacttaaaacaaaattagaaattgttcaaaagtgtggaagtgacacaagattttcgacaaatcgatagaaatttacaatactaaaaatatatgaaaaaatgtcataaaattttcaataggtttgggcgtggcagttttgggaggtttgttattatattgaataaaaaaatttcgtttatttaagcacagaacccttaattttttacctttaaagtcaaaaattcaacttatttctcagcttgtaaacagtttcttgacaaactgtatatatattagtgggacacagctataacatcgaataataagaccgttttatagtaattattattgtctatggcgctattagtaaatgtaaataataaaataatacatcagcttgtgtattttcgttgtttgaaaatcagaaatttccgtttgctttaaatggctaaagcgttgccgctcatcagttgtactactttagcccagcggtggttgttggaaagatcaaaatgggacagaacattccaaatcttcgacaatcacttataaaaatgctgcgccactacaatcttcaaggtgaaattttatcctccgcccaacaaattcaacttaatgactattttgaaattcactcggagatagtcaccacgcaaagacgaggtcagcaggtttcctacgaacaactatgctcattgtgccaccgtccagtactgatggcaggcacacacttgtattgtataatcaggttagagtgtggtcatgtataccataaaccgtgcatacaaggtgaattgcttaaaaattgcaacgagtgtaacctttggaagttaaccgtggggaaataggtttatagcgacatcataactgttaccccggcgtcctgttaggggaattaagaataaataaactttatagcttaatttcttacgcccaatgttttcaaacgtatattgcctaaatgagttaaacgatttcttttaaatttcatattctcttaacaattaaattccataactattgataattaaatctttttcactaataagcttagtttcagctattttttgttaactgttccattttaagaatgccggatggacaagtaaatattatagtacagcaagcgagcgaaggaggtgtgctgagttaaagaacaaaagaccttgaactttttttgcgcggtggtggcgatatcattaagtataatcgttacttgtggcagttaaataattgaggtcatatttggtttaacatatcgatggatataatatatcattgaaatatgaaatatttgaaaaaaggaaattcttttcaaaagtgtaagcgttttggcgttgtggacgtgggagtctacagtctttttggattcgaaaccattccttctacctggtacatcttttttaacgattctgctgttttttttttttttaacgcgttacttaagtttgtgcgttctaatgcggcggtataactgaacctgaagaagtcgccaatttaatttatattcttgcatatctacaaacttctgcctggaaaattttggggtcaactcaaatttctgggacttgttagacctcgggtagctacagacttttccacattgacattgggtctgtacagactcttacttgcttgactttcggatctccaataacatcttcaagcttgtggaatatctggtatacagattttggattttaggagccctccatgtttgtagcaaatatttgcaaataatatcaagagcttaactaattggcacatcctcgcctccaattattatccacttatactcatttcccacatccagcggcttaatcccaagcagtacagtaaggacaccgggaaaaggattttccacacagtcgttgtgtggtgtgaaatactcgtggacaatagcatcttgtggccaatacgacatactgttttacttgctggacacgaatttgaattttttcgcgcagttgccaatggaggtaaacgaattccaggagcaacaccacagccccagggctttcgccctgaagtagttggccctagacgtgaacggactggggagtctttggttctgggaagaggttcggttcaaccgcacggactatagccacaataacatccttggtctcattcgatccggctggtggtccgttggcagagcc

SEQ ID NO: 26699 - DNA, 2922 bp, DROSOPHILA
attagtaaatgtaaataataaaataatacatcagcttgtgtattttcgttgtttgaaaatcagaaatttccgtttgctttaaatggctaaagcgttgccgctcatcagttgtgactcttgggccgatagcataaatgaggaagatgtggagcccaaatttaagtatcaccgtctcgcaaatgatttaaaatacatgctcaacgctgatgtcatcacttgtagcgctgtacacttaaagtttcttatatttggaactttccgaggacgtgtttgtatatttgaccatcaaggaaactcagtctactcaaatcttagcgctagcgaacgtcacactcaccaagtggcagtaaacaatatagatgtagatcataagggcgagtatgtggccacatgctccgacgacggaaaagttaacataacgggattgtttagctctgataacaatcacagtctcagctttggcaaatttataaaggtcgtatcactggagcccgattccaaagctcacattaaaagatttgtagtgggcgacgacaaacttatcttgtacgagcgaaacttgctaaagaagcttaaaccagttgaactgtgctcagtcgaaggcagtgttttgtcaatctgctggcatggcaactttattgcctgggcaagtcacataggagttcgagtctacgatttaaacgaaagatgctcacttggattaataaagtgggaggttcctcctcaggagcgattagaaaattttcgatgccaccttcgttggtccaacaagcatacattattaattggctgggtagacactattcgagtttgcgtaattcgaaagagaaattcaatcgaagcttcaactggcaatctgcctgtctacattgtggatccaatctcgacatttcaaacaactttctacgtatgtgggcttgcaccattatctgcaaagcaattggttgttcttggctttcgcaaggaaaaaagctcttgttttaaagccctacgacctgtattatgcgttattgaatacaaaatgaataatagcgaggaaatctgcacagacagtttaactttacgcggctttgaggagtacaccgtgaatgactatagtctgggtggcataatcgaggagaatcgcttttatattgtggccccaaaggatattgtggtagctagtcttattgaaacagatgatcgtatagaatggttgattaaacacagtaaatttgaggaggcaatggaacttatatctgcgaatggaggtaacgttcccgtactttccgttgctaaactttatatcaaccatttactggcgcttaagaagtatgatgacgcagcaaaactttgcctccgcatgctaggcaatgacaaagtcctttgggaagaggaagtttttaagtttgtaaagtgtcagcagctacgatcagttagcgcctatctgccgacttcagacgaatgcaaacttgatccccatgtatacgaaatggttttatacgagtttctcaaatttgatgtatgtggtttcctgaatcttatcaaggaatggccatctcatctttatgacggcctggctgttattaacgctattcacgataactttcgaaagcactatgccaatcagttgctggaatcattggctcttttgtattcctatcaaggcgacttcgaaagtgctcttcgcatgtatttaaagttgcagaacaaggatgtcttccaattaattcgacggtatgagctttacgatgtcatttcaaaactgattattccacttattcaattggatcgtgactgcgcctttgaaatactacttgacaagaaaaaaataaagactgagatagttgtccaccagctagagcacaatcaagagtacctgtactggtacttagattctttacttaaaaaggatcccagtaatgtgtttcaaaaaaaacttatctccttatatgccattttcgatcgaaacaaactattgccctttctaaagcgttcaaaggactatgacattcaggaggcgttggtcatatgcaaacaggaaaacttttatccagaaatagtctacctgctcgggtgtatgggtggcgtagaagcgtccgaagcacttaatattattattcatcgcatcagagacatagaaatggccatagagttttgcaaggagcacgatgacagcgatctttggaatgcacttataaatgaatttagcaagcaccctgaaattgtgaccaaagttttggacggcatagttgactactttagcccagcggtggttgttggaaagatcaaaatgggacagaacattccaaatcttcgacaatcacttataaaaatgctgcgccactacaatcttcaaggtgaaattttatcctccgcccaacaaattcaacttaatgactattttgaaattcactcggagatagtcaccacgcaaagacgaggtcagcaggtttcctacgaacaactatgctcattgtgccaccgtccagtactgatggcaggcacacacttgtattgtataatcaggttagagtgtggtcatgtataccataaaccgtgcatacaaggtgaattgcttaaaaattgcaacgagtgtaacctttggaagttaaccgtggggaaataggtttatagcgacatcataactgttaccccggcgtcctgttaggggaattaagaataaataaactttatagcttaatttcttacgcccaatgttttcaaacgtatattgcctaaatgagttaaacgatttcttttaaatttcatattctcttaacaattaaattccataactattgataattaaatctttttcactaataagcttagtttcagctattttttgttaactgttccattttaagaatgccggatggacaagtaaatattatagtacagcaagcgagcgaaggaggtgtgctgagttaaagaacaaaa

SEQ ID NO: 26700 - protein, 841 aa, DROSOPHILA
MAKALPLISCDSWADSINEEDVEPKFKYHRLANDLKYMLNADVITCSAVHLKFLIFGTFRGRVCIFDHQGNSVYSNLSASERHTHQVAVNNIDVDHKGEYVATCSDDGKVNITGLFSSDNNHSLSFGKFIKVVSLEPDSKAHIKRFVVGDDKLILYERNLLKKLKPVELCSVEGSVLSICWHGNFIAWASHIGVRVYDLNERCSLGLIKWEVPPQERLENFRCHLRWSNKHTLLIGWVDTIRVCVIRKRNSIEASTGNLPVYIVDPISTFQTTFYVCGLAPLSAKQLVVLGFRKEKSSCFKALRPVLCVIEYKMNNSEEICTDSLTLRGFEEYTVNDYSLGGIIEENRFYIVAPKDIVVASLIETDDRIEWLIKHSKFEEAMELISANGGNVPVLSVAKLYINHLLALKKYDDAAKLCLRMLGNDKVLWEEEVFKFVKCQQLRSVSAYLPTSDECKLDPHVYEMVLYEFLKFDVCGFLNLIKEWPSHLYDGLAVINAIHDNFRKHYANQLLESLALLYSYQGDFESALRMYLKLQNKDVFQLIRRYELYDVISKLIIPLIQLDRDCAFEILLDKKKIKTEIVVHQLEHNQEYLYWYLDSLLKKDPSNVFQKKLISLYAIFDRNKLLPFLKRSKDYDIQEALVICKQENFYPEIVYLLGCMGGVEASEALNIIIHRIRDIEMAIEFCKEHDDSDLWNALINEFSKHPEIVTKVLDGIVDYFSPAVVVGKIKMGQNIPNLRQSLIKMLRHYNLQGEILSSAQQIQLNDYFEIHSEIVTTQRRGQQVSYEQLCSLCHRPVLMAGTHLYCIIRLECGHVYHKPCIQGELLKNCNECNLWKLTVGK

SEQ ID NO: 26701 - DNA, 3749 bp, DROSOPHILA
agtcaggtgagcttatgagaacaaatgaaacgcatatcaagtgctgattagggcttatgcatagtactaagaaacttactaggtgtgctggtgctgcaggttgtcattgcactagtataagtgtgtccctcctctcctcgaatatgatctgtaaaatccgtatactttttagccactacttattttaaatgtactcaccttgtgtgtgtgccgaaggaggactaacttgcttaacccttagtccgggcggcgcgtataaagtatataaaatgtaaaaaagggcgagaatcagaagtacttagataaatcattgaaacggcgtgcccccttggcatcctggtgcttgggtctctgaaggaagagcgagcgctactttcccccccattaaataggcccgcagcccttcgaagattcccttcatccagtcggccaggagtagtcgaagacgaggcatccaatggtgcggttctggttctggtagaacatcaaggcgatgaagggcataactaccaccgaaaaaagcctcatcattcgaaaacagggacaccccatctaggtttaggttccacttgatacggcgtcgatactccatgcagacggatatattgacactagcactataaacatgtagcagagggtccaaaacaacatcttccccctccggtcgaacaccttcatccacgataactgagtccatagtcctgtccaaaatttatccaaaattttgttatatagaacgcgaagtctgacaccggttaaaaagtagaatgacgttcgatttatttgagctgacttaaaattcaattctactagattaaaaaaaaaaaagggaaaaaaggtaacattgaaacattgtagtctagaagagatgcgccagatagcttctccaaagccagaggatcagcttgtaaagcaaaaagaggcgaagcagccggtagaggaacaccttgctgcaagaatttcacctgaagtcaactgtgtatcaaacaagaacatgtactcacatccttaagattctcttggaacgctccagagttttcggatcttctcgaagcaagtgcgttcggatactgtggagcatgttgctgcaggattggatcaccaggccatggatgtccggatggttgaaggcatcgaagttgaatgcagaactggagcagaaaggattgaacggtgatatggggctactaactagctactaagtggaccgcacgtacccctcgccgtgcttggacagcgtctccatgtccgaaaccccgggactgtcccaattgttgaacatgaagggctgcatcacctccagcgtttggtaggccttgcgaaccgcactcatcagcacgggcttctgaccgaaaatccttagaagcaagtcgagaataagggccggcaggatctgcttggtaaagacgagaaactggtaggcccaccgtttgtccgtgtagtggcagcccgggatcatcaggttcttttcaaatgccacatcccgccacaagtccagcgtgtccatctgctcggcaatctgggtgaaggtgtgcggcacgtgggtgcaagacgaggacaggaaaactggcagatcagccggtgggccctgcctgtaaatatcgtagcccattttggtgtaacacagcatgctcttgatgccaatgtcctgcggcgtgatgtccaatcgaatgtccttgcccaggtaaacagtcttgaggattccagcgccgaccagcgcgaacagtcccatggcgcccatcaaggatggcgagaatccgggcgatgggtcctccacggcaaagagaactggaaaaagctttttgtaaatcagggtcttagggatttgcagtcctttgattacctatggaaggacgatacactattactggcagccgatggcggtagtcattcaccagggattcggccaggtttttggtaaacgtatacgtgttgggaaagcccatgatcaacctggggcagggagccatgagataaccaaatgatatagcattatataaagtgcatcctggtaaaacacaggtcgatagccaagtgtattccttaccaaaggaatcaatatggaggcaagacttactttcttgttaacgcgttgagcatcccgtcgtctgcgacatcgtcgatcattcggaggcacaaccgccagtccatcggcgaggagtagtactgcaagtatcagagccacaaagtcagggaaacaagcaaggtagtccaggatccgtaacacacccaccttgggctccacacgtgtcaaatagggattactgtagaatgtggaaacgtggatgaaggccctcagctggggcagagtctcggcgaacttaagcgcctccaaggtgcctccgacattcagacgtactgcctcgcgaagcggctcatcgaatcgcaccgtggcggcacagtggtagaccagggaaacacctttcatacgctgcatcatcgagggatcgatgcccagtcccggcaaagagacgtcgcccgggaccgccacgatcttgtccagctcttcgggtttttgtacggccagtacgtggaagacagtggcctgccgcagtcggacgagtctctgctccgctgttagctgtttgcgaggacgcagcaggacgtagatgcgccgaacgttgcaggagcgcaggagcttctcgaccagcgccttgcccaccactcccgatccgcccgtcacgaatatttcgctatcctcgaagaattcctccatttccccggatagtggatggtgcattgtgattcactgaccaaagcccgcaaagcaatggaacgcagctccaggggtcgatccgcttaactgaacgctagtcggcgcgcgttcattaaatccgtgatttgataaacatgagctgcgccactacatttcatgctaatttcgggctcaatgcgatcgtaagcactttacagttgacagtggcccggcaatcccggatcgggctgaccttaagcgggttccacttccaatgaggtggagctgccgtactccctgcacttaggttaataatatataggattgatgatgataagccgattcatccgtttcaggaggaggccaaatgctgtggctgcatcacttgctccaaggagacccgcgacacattcgccgaaatgatgaacttctctctgctcaaggacatggtgttcgtgatcttctccgtgtctaatttctgcacgagcattggcttcaacgttccgtacctgtatgtggtcgcctacgcggagaccctgaaactcaccaagacggatgccagctatctgatatccacgattggcgtggccaacacagtgggccgcataatcctgggctacatatcggataaaccgtgggtgaaccgcctcctggtctacaacgtctgcctcaccgcctgcggagtttgtaagtttgtgatctgatcggcgcgaccttcagactaatcccatcctgctcctccgttccctttccactagccactgccatggtgccgctatgccacgacttccaatccctggccttctactgctgcgtctttggcttcacgatcggcgcctatgtgggcctgacctcggtcattctggtggacctgttgggactggacaagctgaccaacgcctttggcctgctgctgctcttccagggtattgccagcttcatcggtccgcccatcggaggtgagtactcgccatagctggaagtagtgctatgtgtctgacctttgctctccaggctggatgtacgacctgacggactcgtatgcgccggcctt

SEQ ID NO: 26702 - DNA, 1437 bp, DROSOPHILA
tgaatcacaatgcaccatccactatccggggaaatggaggaattcttcgaggatagcgaaatattcgtgacgggcggatcgggagtggtgggcaaggcgctggtcgagaagctcctgcgctcctgcaacgttcggcgcatctacgtcctgctgcgtcctcgcaaacagctaacagcggagcagagactcgtccgactgcggcaggccactgtcttccacgtactggccgtacaaaaacccgaagagctggacaagatcgtggcggtcccgggcgacgtctctttgccgggactgggcatcgatccctcgatgatgcagcgtatgaaaggtgtttccctggtctaccactgtgccgccacggtgcgattcgatgagccgcttcgcgaggcagtacgtctgaatgtcggaggcaccttggaggcgcttaagttcgccgagactctgccccagctgagggccttcatccacgtttccacattctacagtaatccctatttgacacgtgtggagcccaagtactactcctcgccgatggactggcggttgtgcctccgaatgatcgacgatgtcgcagacgacgggatgctcaacgcgttaacaagaaagttgatcatgggctttcccaacacgtatacgtttaccaaaaacctggccgaatccctggtgaatgactaccgccatcggctgccagtaatagtgtatcgtccttccatagttctctttgccgtggaggacccatcgcccggattctcgccatccttgatgggcgccatgggactgttcgcgctggtcggcgctggaatcctcaagactgtttacctgggcaaggacattcgattggacatcacgccgcaggacattggcatcaagagcatgctgtgttacaccaaaatgggctacgatatttacaggcagggcccaccggctgatctgccagttttcctgtcctcgtcttgcacccacgtgccgcacaccttcacccagattgccgagcagatggacacgctggacttgtggcgggatgtggcatttgaaaagaacctgatgatcccgggctgccactacacggacaaacggtgggcctaccagtttctcgtctttaccaagcagatcctgccggcccttattctcgacttgcttctaaggattttcggtcagaagcccgtgctgatgagtgcggttcgcaaggcctaccaaacgctggaggtgatgcagcccttcatgttcaacaattgggacagtcccggggtttcggacatggagacgctgtccaagcacggcgagggttctgcattcaacttcgatgccttcaaccatccggacatccatggcctggtgatccaatcctgcagcaacatgctccacagtatccgaacgcacttgcttcgagaagatccgaaaactctggagcgttccaagagaatcttaaggatgtga

SEQ ID NO: 26703 - protein, 475 aa, DROSOPHILA
MHHPLSGEMEEFFEDSEIFVTGGSGVVGKALVEKLLRSCNVRRIYVLLRPRKQLTAEQRLVRLRQATVFHVLAVQKPEELDKIVAVPGDVSLPGLGIDPSMMQRMKGVSLVYHCAATVRFDEPLREAVRLNVGGTLEALKFAETLPQLRAFIHVSTFYSNPYLTRVEPKYYSSPMDWRLCLRMIDDVADDGMLNALTRKLIMGFPNTYTFTKNLAESLVNDYRHRLPVIVYRPSIVLFAVEDPSPGFSPSLMGAMGLFALVGAGILKTVYLGKDIRLDITPQDIGIKSMLCYTKMGYDIYRQGPPADLPVFLSSSCTHVPHTFTQIAEQMDTLDLWRDVAFEKNLMIPGCHYTDKRWAYQFLVFTKQILPALILDLLLRIFGQKPVLMSAVRKAYQTLEVMQPFMFNNWDSPGVSDMETLSKHGEGSAFNFDAFNHPDIHGLVIQSCSNMLHSIRTHLLREDPKTLERSKRILRM

SEQ ID NO: 26704 - DNA, 9566 bp, DROSOPHILA
ccattccgccgctgcagcgcctgcaggttcgcaagtcggagcgaaagccccacaccgagcacctggcccttagttagtagttcaccgccacccatccaccacccacagtgccctgtttattcctactccatatttttttgtttttttttctactgtaactataaatctagatacgtactgatgcacacgacacttggttagattaagtcctagacctaggccagccatgtaccgaggtatgcgtgtatgccgcagctatggcatatccgaataattgtgtacgggcgactgtcaccgaaccgccggcttctgtcccccgagccatgacctctgaccccagaccccagacccctgacccctgaccccagaccccattaaaggcccccattgcaagtgcatgcaaatgtatgcctacacgtacatgtacccataccaaattattgttattctattatgactgtatgcctgtgcgtgtgtgtccgtctgtgtatgcgccattaaagaaagcttttgtacaacaacagaaaaccacaaaagtccattttgaaatcgattggctgaaaaaccacacatgcccctgacaatgggaatatgaaatgtgcgggtaagtagcgttgtgcttgaaacaatctattttttacgaaatcaaatacgaaagatacaggctctagaaattcatacgcgttaagattactgcaatcagttttggccaatagccccagaaatgcaatagataatccatgtaccatataaatcacatgccatatacatactgcccagtcgacttgctcctcgtcaacacagcattcctttcacatactacagtgcttgccaagacgatcccaaaaaaacgaatgagagcccagagaatctacatcgtggcaattttcaacttgttggtcaatcgcagaccggtgatcttcgtggctagttggctattcatatttattgtcagggcacagaggcgttcctcgaaaggggtccacatacagaacggattgcagatatagttcgaaaggattcggtgtttattggattcttaagtgactacgaataaaatagcaacaaagggctcggatgcgattcacgccaccccgaaaagtacgcattcacaaaagcactcactcattcacacctaaaaaaaaaaaaatgaagttttgaagctaaatatgaatcactgaatctccccggtgatcagcttctttagggtacactctccggctcccagcttgtggaggatggccaacacttcctcgcggtagcgatccatgtggcccatctcctccggagtgtactcctcgtggtcgaaccgcgtcatcctccagatcacattcagcttggcctcgatcagcacgtagttcgaggagggacagaagcgcggacacagctcgttgatgaagtggatcatgtcctggacactgcacgagttgatacggttattgatggtgttcagcgcgaagtcctggtacttggccatctttgcgtgcgggaacacgttctcgcaagtgatgcaccgccagtccggctgcagtgtccgagtctggacgggaatcaccaggccacggcagccctgttcccggcagaaaagcgccgacaagtaggtgccgttttcctgcaagaagacaatggtcagtgaatcgaaggacttggggggaatcaggaaatcgggggtggaatctgcagtcaaagatccggcgggttcacgtccgcctctgtccattcacggcgtacagttggttccactccgaatcgaaatggaaatcgaaatcgaaatcagaatcgaaatcaaaattaacattctgtgtgtcatgctcatgtaaattttgggggtgtgtgttagtagcccgggaactttggatgcccacattaaaggcatataggcaaataggatcaatggactgataatgtatgcctcggaggtcttgaacaagagtgcgtttaaggtgtatatttaatagcaagaatggaactgtccaacgactgcagggctgtgacaaagatgtctcaagctcacccaactcccaacaagtaattttgttactatgcccatcaggcagtcattttagcagggaaaagtgcgtgtgcctgttaccaaatgttgcccctttgcccacttgatggacacccccccttgggcgcgcccctgggccctggttgatgcaaatcatataactaatttaattagggaacgcatttgtgtcagggggcctggccagcggcggccactgccaacgccagaggccattattcaactcatcccagagcggcagagagcggccacataaatagatgtggccggccggatatgtggatcgcgtacgtacatacatatatgcccatgccactcacatccctaccacacgcgcactttcacaacgccggtgacatcggcgttggccaagaaatgtgcccgaaattcagagcttttcaaattgcaattattgttttttgttttgggacaaatatattgcgatggtcgcgatgcagatggcggatagggagaatgatagctatcaggtaggttcagaaaaagaggattggtggaaagtttggcgaagattgctattaaccatgaagaaactccatcagcctagaaatgaccatagtcagaagctaagcttgcagatggtgggaggagggattacccaaggagaccaggattcctattggtaccgtactcacagtattgtcgtgacacctcacgcagtcgcaggcaaagtgcttggtcatcttgaggaagatattccgggtgaggttgccccagaggatcttggtgtaggtcgtggtaatctcaccgcccttgggaatatcgcgcgcagcccgaaccaccgccagtcgaccgttttcgaagtagtgactagcgttcggggtgcactcgtggttcatgatcgccgtgagcgggaacagaccccgcagtagcgtctcgtggccgccagagcggcaaggagcctcgaaggcatttgtattgagcacgcccacgatccggaacagctggtccatgaacacccgatccgtggtggggaagttccggaagcattgggccgcctggatgatctcccgccggtaagcgcgctccgcattcgcttgcatggcgtccaccagatgccgctgttccttgcccaagtggaagaccctcactgcggtgaggatcctcagcgacataggattcacctgctcctgctccgcatccacgtctttgggctgccagcgacggaagtgctcgcactccgcctggtgctcctcggaatccgaacaggtttcgcatacgggcagggtgcagcgatgccggcaaaggaatcccgtttgcggcagggtctcatgacagcagatgcagctgctcagttggccctttctcgccgtcggaccggtgactagggctcgctcctggaagatcagctcgccggcggctatgtctcgggtggcaaacaccccacgacctgccaccgtggaggagctgatggtccagttgggctgctcttggcgcagatcccccaagtggacgtctatcagctgcgccagctgctcgggcgtggtgtcgcgacaaggggccatgtgagcgctcagggcggccagtgtggtgtctcctccaccaccgcctgggcgaggaggcgggcactgggcagcagtagacatggcgactgcggtgggaggtcggtcggaactgcggcgaaccaacgcgacgcgcggcaactcggcgagtgaagatgtctccgcgcagctgggcggactacgcgggaatagcaacgatatagtggcgacagcgacgacagcagcaacatgagcagcggcagcagcagcagcaacaccacccagcacatcagcaacaacagcaacaactgactgccgacagtggaagcaacccagcaaagcagcgacgcttatgacgtggacacaccgacgccctcggagagcattagacacaactaaaaaaacacaaattagaggcatccaccagggaacgggggaaggcgattgacgaaaggggccgggaggtgaggaacgggaaatgggggggcaaggggacaacagcgacaacagtcaaatatgattttttccaaggcacacgcacactgaaagcacacacactcgccgccaagttcccatttacgaaatccaaaataacattttccccgaaggaaagaacttgagcattgtgttcattgttttggccaaaattcgggctatttttaggcagcttgacacaaaagttcaacactttttgtgagaagccaaaagttttgattccgcgataagcggtttcgaaacgttttcggagtcgggaacgtggagccacttggtgcgccactgggaaatagagacatttggctgggacgacgcaaagcggattttgcttttgactcttattcaatttgtgcttgagctgttgttgccgtgtggttgttgctgccgctgctgtggttgctattgttgcgttcaattggattcgctagtgggcgtccatcgggggttgacgatcgcgaggggcatagtgaaaggcactgatgcagccatcagccatcagccattcagccatcaaagaacatttcccactgtcaatttgttcgccaaacacctcactgtggctgaaacccccagcccccttcaccgaagtctgcttgcggttggttatggacgccataaactgaaacgaagccataggagcaccacccaccccatctcatccccacctccacccccatcccatcgctatcaccatcttcatccgatttctgtcgccctacgacaatctgaacggttggcaaaattatttgtggagatgcagcgccattgataccaagcgtgtttgtctcccacgctgctacactggccaaaaatgagtgcacgacgtaataggccgctcatggataggactgtaagccctggagagtgttgcctaaatgcatacaacgtagaataagaaatgagtactacaatcctggctggcagtgcaacccactttctgcgggtctaactacatatggcagtgcgtgtggccgggacataaattagggcttcgctggccaatgagttgcgtgttccaggggccaaggggtcggagacaccaggccgcaaaacgaggtgagcgtcgcaacacgtgacctggtggggagaaggaccagtaccaggaccatgaccaaaaatggggtggctccactcccagctgttcactttccgacgcgaatgtcacgcactgtcacatgttccaaagtggagtaggttcgtcctgccacgcccattctctgcggtaatacgtaaatcagttctaaagcgtacgacctccgttctccctgctcctgctacggaccgccagcaacttatagttcgcccacattccaaatctattttcacttttacgcgcattttattggcccaatcgaacggaagctagactgagcggcatgaagcgaatagaacgcactcgaatgccaaatatcaaaaagcgtgaataccaactgaaaaattatagggtgcgttcgggcattatcgaccatgagtcctttaaagctatcatgataaatattattacattagcacaaccacaacttttgtaatagtcgatcaaatgtggaatgccataccttgttgaattcgtagcttaatttcctatccagtggcattcccagctaaaaatattaaaatttcaccatttttcgaaaaaaaacgtgatgtaaccccttataaaaaagtgaaaatttcgcaaaaaattatttttaccaaattatctaaaaaatgaaatgggtcgttaggtgaggttgtcagctgcaaaaaacagtatgtttcgtatctgtgcgtcttcattttgcgaagttacaactaaaaaaccaataaaaaagtcgttcattttgacaaacaaatgtgtcatgatttttagtaaaaaaaatatcagaattttgaccacaacttttgtaatagtcgatcaaatgtggaatgccataccttgttgaattcgtagcttaatttcctatccagtggcattcccagctaaaaattttaaaatttcaccatttttcgaaaaaaaaacgtgatgtaaccccttataaaaaagtgaaaatttcgcaaaaaattatttttaccaaattatctaaaaaatgaaatgggtcgttaggtgaggttgtcagctgcaaaaaacagtatgtttcgtatctgtgcgtcttcattttgcgaagttacaactaaaaaaccattaaaaaagtcgttcattttgacaaacaaatgtgtcatgatttttagtaaaaaaaatatcagaattttgaccacaacttttgtaatagtcgatcaaatgtggaatgccataccttgttgaattcgtagcttaatttcctatccagtggcattcccagctaaaaattttaaaatttcaccatttttcgaaaaaaaacgtgatgtaaccccttataaaaaagtgaaaatttcgcaaaaaattatttttaccaaattatctaaaaaatgaaatgggtcgttaggtgaggttgtcagctgcaaaaaaacagtatgtttcgtatctgtgcgtcttcatattgcgaagtttttcaatcatagtgattgataattcaatcactgcttttgttacttagtgccatgagcagaagtgaatagacaacctttttccccaaatagaaagggtaggcggaacgaaattctcgacaaatttcaaatgattctttatccgtttaagttttaaagaatttgtgctaaaattttatatttaaaggcgtacagagtgagcgaaaacaaaaggaaaacctagtgttttagtggattgacgtgcgactgggtcaaaggggtattgaagagaagagaggcaatagctgttttgacgtgctatacggactttgacagtatccgaaattgaataaataagtaattcagtgtgggctatgtggtatgtgtgggtacttgaactagttggggcgcctccattatgtcagtattggcagactgcccgaatcgtatcatacaataaaatataccgactactacattgtgggcaaacagtttagttggttattgcccccagtgcgatagccagcaagatgtcattcaaaaaagatagttattgtaaagctatcgaaatatttgtgtgtggggggacatgcattcgtatttgtttcgtttatcagtaagttatcttgattgctcgtctgcgagagctcttctcgacaataaaagcagtactcactgaaggcagatcctctatgtggacacgttttgggatcatcgctgctttcggtgtcggccagctgccttgacttaatcattcacttaatcgcattgacttattgctcatcggatgtttctctcgcgctcacacttgcattccccaggggcgtctaactaggggctttctaccttatcagcaaagcatttagataagccaatttcaagatgaaaactgacatctacataatattgttactgcaaataacttcctagaaaccactgagttccaatatatattatagggctggtgagaatcttaatcttatgtctgtgtcgaaagtccccttctcgtatgcccctgcgatgacatttttcggccctaccgagtgagctatttcggtggcacttctcagcaatagcgacattctcgccgcagtggccctcttgcgatgcagtgcctcatccaaattgaaaatcagcttacaagtgaactcaccgtgggatcttggcatcgaacgcacttgcagatgaagtgcttagtcattccgaggaatatttttctagccagcgtggaccatagtaacttggcgtacgacatggtgatttcggctccagctggaatccgttcagtagcgcacaccacaatggtttctccgttttcgaagtggtgcgctgcattcggggtgcactggtggttcaggagtccagccaaagggaacagcgcccgcaccaacacctcgtggccatccacattgcttcggctttcgaaggcgttggtgttgaaggcgcagatggtgcgatagaagtagtccaacatgtcctgctcccgcggaaagtgctcaaagcaatcggcagcccgttggacctcctgcatatagtaccgatccatattggcctgcatggcatacagcaactttcggctggcttcgtccagaaagaagcatcgcacaacactaagaatcctaagggcgcgcggttcgattctctggctctccagaggcttccacttgcgaaagagcttgcactctaggtcgtgacgcgtggagtcccggcactccgagcaaactggtaatccgcatccggctgggcagagggctgccgagtccgtggatcccggaatcaggcggtagcagagggtgcaagtgcgcagattcatggacctatgagctgttggacccacgagcaacgtgtgctcacggaagagctcctcgccagcggctatttctctggtggcaaagatgcccctaccggaaattggagagtcggccacccgccaagagggctcctccggtcgcaggtcacccaagtggatgtttatcagttcggctaattcctgcgtggacgcactgatggtcatttggcttgaggatctcggttcctctgtaacaggtgtgctagtggacatatcggctgcagtaagggcaactctctcttgattccgtcgataaccgaaacgctactgaccgctgccgcatcggaaactctctgatcgtgcgagtttcctcgcttttctcggagtgacagctaattatagtctggtggctctcggatttcccgactgctcgctggacaggcacagctggcggatatgctgccgtcggaaaataaacactagccttttattggaattgttgttaacccactgagggcattgctcaaacatttatatgtacttttaagcaattaatataaactgatttatttttgcgtgtgctgaatttcgtaatagtctatattagcctttacttttcctaacgcgtaatatttgtggtaggcaacactgcgtatgattaatgtacttgcagcgactacgtatacgtaatattctattacaggcgcgatttgttgttccaagcagaagagaaacaatcatagcatactttcaggcgcaggcgtaaacccttaacgaaaggaagtcaagtgggtcacattaagttcaacgtaacaaaacaaccagtccacaaaataaacactttgaagttcagttttattttattatatattgaacatgacacacatcgttttgggttaaaacttgggcttcgcgcatccgtcgctgttttagtaagttagatttcgaacataaactggactctgaaacgcaaacaagggcttcgataaatgcttctgttagtacactacaaatacgatggaggggcgattctagattccttggagcgcaagcccattgaaaatggtctcttattatatacgttgcattcgcttaaatctgactgctgtatgtacatattgctttcctgttcctctctctttttcgtggctatcgctttgctttattgcacgcttaataattaatgtgtttattaaaattatcgaaacaaaatcagcataggatcgggtgggggaagggaaatgggctgtggaagggggcacgaaggcggggg

SEQ ID NO: 26705 - DNA, 3150 bp, DROSOPHILA
atgtccactagcacacctgttacagaggaaccgagatcctcaagccaaatgaccatcagtgcgtccacgcaggaattagccgaactgataaacatccacttgggtgacctgcgaccggaggagccctcttggcgggtggccgactctccaatttccggtaggggcatctttgccaccagagaaatagccgctggcgaggagctcttccgtgagcacacgttgctcgtgggtccaacagctcataggtccatgaatctgcgcacttgcaccctctgctaccgcctgattccgggatccacggactcggcagccctctgcccagccggatgcggattaccagtttgctcggagtgccgggactccacgcgtcacgacctagagtgcaagctctttcgcaagtggaagcctctggagagccagagaatcgaaccgcgcgcccttaggattcttagtgttgtgcgatgcttctttctggacgaagccagccgaaagttgctgtatgccatgcaggccaatatggatcggtactatatgcaggaggtccaacgggctgccgattgctttgagcactttccgcgggagcaggacatgttggactacttctatcgcaccatctgcgccttcaacaccaacgccttcgaaagccgaagcaatgtggatggccacgaggtgttggtgcgggcgctgttccctttggctggactcctgaaccaccagtgcaccccgaatgcagcgcaccacttcgaaaacggagaaaccattgtggtgtgcgctactgaacggattccagctggagccgaaatcaccatgtcgtacgccaagttactatggtccacgctggctagaaaaatattcctcggaatgactaagcacttcatctgcaagtgcgttcgatgccaagatcccacgtttatggcgtccataaccaaccgcaagcagacttcggtgaagggggctgggggtttcagccacagtgaggtgtttggcgaacaaattgacagtgggaaatgttctttgatggctgaatggctgatggctgatggctgcatcagtgcctttcactatgcccctcgcgatctggcgcaccaagtggctccacgttcccgactccgaaaacgtttcgaaaccgcttatcgcggaatcaaaacttttggcttctcacaaaaagtgttgaacttttgtgtcaagctgcctaaaaatagcccgaattttggccaaaacaatgaacacaatgctcaagttctttccttcggggaaaatgttattttggatttcgtaaatgggaacttggcggcgattgtgtctaatgctctccgagggcgtcggtgtgtccacgtcataagcgtcgctgctttgctgggttgcttccactgtcggcagtcagttgttgctgttgttgctgatgtgctgggtggtgttgctgctgctgctgccgctgctcatgttgctgctgtcgtcgctgtcgccactatatcgttgctattcccgcgtagtccgcccagctgcgcggagacatcttcactcgccgagttgccgcgcgtcgcgttggttcgccgcagttccgaccgacctcccaccgcagtcgccatgtctactgctgcccagtgcccgcctcctcgcccaggcggtggtggaggagacaccacactggccgccctgagcgctcacatggccccttgtcgcgacaccacgcccgagcagctggcgcagctgatagacgtccacttgggggatctgcgccaagagcagcccaactggaccatcagctcctccacggtggcaggtcgtggggtgtttgccacccgagacatagccgccggcgagctgatcttccaggagcgagccctagtcaccggtccgacggcgagaaagggccaactgagcagctgcatctgctgtcatgagaccctgccgcaaacgggattcctttgccggcatcgctgcaccctgcccgtatgcgaaacctgttcggattccgaggagcaccaggcggagtgcgagcacttccgtcgctggcagcccaaagacgtggatgcggagcaggagcaggtgaatcctatgtcgctgaggatcctcaccgcagtgagggtcttccacttgggcaaggaacagcggcatctggtggacgccatgcaagcgaatgcggagcgcgcttaccggcgggagatcatccaggcggcccaatgcttccggaacttccccaccacggatcgggtgttcatggaccagctgttccggatcgtgggcgtgctcaatacaaatgccttcgaggctccttgccgctctggcggccacgagacgctactgcggggtctgttcccgctcacggcgatcatgaaccacgagtgcaccccgaacgctagtcactacttcgaaaacggtcgactggcggtggttcgggctgcgcgcgatattcccaagggcggtgagattaccacgacctacaccaagatcctctggggcaacctcacccggaatatcttcctcaagatgaccaagcactttgcctgcgactgcgtgaggtgtcacgacaatactgaaaacggcacctacttgtcggcgcttttctgccgggaacagggctgccgtggcctggtgattcccgtccagactcggacactgcagccggactggcggtgcatcacttgcgagaacgtgttcccgcacgcaaagatggccaagtaccaggacttcgcgctgaacaccatcaataaccgtatcaactcgtgcagtgtccaggacatgatccacttcatcaacgagctgtgtccgcgcttctgtccctcctcgaactacgtgctgatcgaggccaagctgaatgtgatctggaggatgacgcggttcgaccacgaggagtacactccggaggagatgggccacatggatcgctaccgcgaggaagtgttggccatcctccacaagctgggagccggagagtgtaccctaaagaagctgatcaccggggagattcagtgattcatatttagcttcaaaacttcatttttttttttttaggtgtgaatgagtgagtgcttttgtgaatgcgtacttttcggggtggcgtgaatcgcatccgagccctttgttgctattttattcgtagtcacttaagaatccaataaacaccgaatcctttcgaactatatctgc

SEQ ID NO: 26706 - protein, 991 aa, DROSOPHILA
MSTSTPVTEEPRSSSQMTISASTQELAELINIHLGDLRPEEPSWRVADSPISGRGIFATREIAAGEELFREHTLLVGPTAHRSMNLRTCTLCYRLIPGSTDSAALCPAGCGLPVCSECRDSTRHDLECKLFRKWKPLESQRIEPRALRILSVVRCFFLDEASRKLLYAMQANMDRYYMQEVQRAADCFEHFPREQDMLDYFYRTICAFNTNAFESRSNVDGHEVLVRALFPLAGLLNHQCTPNAAHHFENGETIVVCATERIPAGAEITMSYAKLLWSTLARKIFLGMTKHFICKCVRCQDPTFMASITNRKQTSVKGAGGFSHSEVFGEQIDSGKCSLMAEWLMADGCISAFHYAPRDLAHQVAPRSRLRKRFETAYRGIKTFGFSQKVLNFCVKLPKNSPNFGQNNEHNAQVLSFGENVILDFVNGNLAAIVSNALRGRRCVHVISVAALLGCFHCRQSVVAVVADVLGGVAAAAAAAHVAAVVAVATISLLFPRSPPSCAETSSLAELPRVALVRRSSDRPPTAVAMSTAAQCPPPRPGGGGGDTTLAALSAHMAPCRDTTPEQLAQLIDVHLGDLRQEQPNWTISSSTVAGRGVFATRDIAAGELIFQERALVTGPTARKGQLSSCICCHETLPQTGFLCRHRCTLPVCETCSDSEEHQAECEHFRRWQPKDVDAEQEQVNPMSLRILTAVRVFHLGKEQRHLVDAMQANAERAYRREIIQAAQCFRNFPTTDRVFMDQLFRIVGVLNTNAFEAPCRSGGHETLLRGLFPLTAIMNHECTPNASHYFENGRLAVVRAARDIPKGGEITTTYTKILWGNLTRNIFLKMTKHFACDCVRCHDNTENGTYLSALFCREQGCRGLVIPVQTRTLQPDWRCITCENVFPHAKMAKYQDFALNTINNRINSCSVQDMIHFINELCPRFCPSSNYVLIEAKLNVIWRMTRFDHEEYTPEEMGHMDRYREEVLAILHKLGAGECTLKKLITGEIQ

SEQ ID NO: 26707 - DNA, 12885 bp, DROSOPHILA
acgtggaccgatcgatcggatcatcccggattcttgtgattccctagatacgtacgcactctttttgttttttttttttttctagcctaatggaaatgtgaacggaaataaagttaaatcggaggaaggacttagttttagagaagtgttaagggcaaccaaagacaaggttattcatattagttttttagccttgccattatttactaagttaggctctacgtaatgttagtaacggggtttggtagttttagcccttaaaacatttatttcttttgaataaaattgtacattcatggatatataatttactattaataaatatgttttatattacactcaattaatcgctgttaaaacgtataaaaagtttacgaaaattgaaggtaatttcataagaaattattaagttaacaaatttaattaatggtaatgtaaaaaagtgtgtaaaagaaagaaaattttaaatttaaataccagactgcagtgttaccatttttcctagtaatatcgaagtgcgatagggcccgataggttcgggccaataatcgatgacaggacaggctctaaacaaaagaaaaaaattaaaattacagcaggattgcgagcgatattcgttttatcccattgcagcatcattgagatcccggaaaacaaacaacggcgtaacgccagtccggagttggagtgtttccagaggagccgcagcattgtctcctgtcccacagctttccctcaaaaaaaccagcgactctgcctttgccttcccctccgcccccgttcaccacccacgctaccaccgcctcccaaggcctcgcccgcagaccacgccccccgcctgcagcttggcaggcttactcagcaaataaacaaacggaagagtgacgaagtgcagcggcagcagaagcagcaactcctactgtgagtaatccggaagctggagcagcaaaagcgtggatcctcatccattcggcggctaagcgatgcagtataggccaccatgggttcacagaccttggagattctgcgccagggcgtgtgggcctcgctgaccggcggttacttttacgatccgcatcagggtgtcttctgcaacgtggtgcacctttacctgtggctctacctgctctgctcgcccttcgtggcctacctggtaagtagtgaccgagtgtagtcctaagtagtccgttcatagatcttcttgcagtactttccgagcacttggttgacatggtgcctgtattgcgtgataacgagcttaaccatactgatggtaaagctggccaatctggcgctgcacaggctctacgatcgcgcacagaccatgtccgaggggaacctaaaggggcagttcgtgaaggtcaccaaggaaacggaaccgcgccacgacgacgagggcggcatcgagatgaaggtcatccgaccgggcggctcacgcatttccggcgagcaggccattaatgaagcaagcgaggagaacagcatcatgtccatcgacaacgtgaacagcattattggtgagtggtgcttcttgtgcacacgtgctatagcctaagaactcctcttcgcagatctcaaggtcgatgtgcatcgcaagaacagctcggagtccattgaactgatgttctacgccccatccatgctatccggcggtagccaacaggatcaacaatcgctggctggttccgccagcgttagcaagtccattcggagtacaggaccgggcggaaactcgtccaccagcgccgccgctcaagcagacatgttcaacaagtacctcactgtctatccggaggttgtcgaggcggctggaagcagtgcgggtagcgcagatggaggaagtagtggtggcgacagtagatcaggcgcagcagtgagtacactgggacatacaggagcgggaacagcaccagcccagcacgtacgcactggacatctgtcgcgcaagtgttctgaggtgtttagccgccgccatcgacgacgtctcgaacggcagagcagcttggacacagcggcggcagctgcaaactccaacgcggaaaacaagttgatgcgcaatcagtcggatacgatagccacagcggcaccctcgttcctgcactctcagccaacgaacaaggcgcgcggtcagaccaatccgcgtcagcactttataaccagcgccccatcaacaggaataggcggaggagatgctcccacttcatctaccgccgtcgttgtcattgcccccgcctcgaactcattggttaatcctggacgttcctcacgtctgcagcgccacagaagttcggagacgcatgacgagcggctgaagcaccagagccgtggtggactcttccagcccattcttcaacttccgcaccacagtgcagccagcagcatcggcgcactggcagtgctcggtggaggaggcaatgttgccgcaaatgatgtggaagacatggaactgggcctggttaggaatgcgggcagcggcggagtggcggatgcttgtagccgggcactacagtcctggatattaggtaagctgatacaatatcagaactcttcattgtcgtagtttagaaatctcaataaattagttttaatatgtactatgttgcccatttagatccctttccggatgggtacctggaggacgatagctacaccaaatctgatctgggcattgaacagccacaccagccaactttccgcacccagcatcgtcatcaccatcaccaccaccacctgcatcatcacctaggaggtgcaatcattcgtaaggatccaaccagcacaatgtctgcacttcaattggctgcagtcacccagccaggaacgggaggatcggtaacaggcggtggtggagcagcaggtggaggtggatctgctgctggtatgaagcgacgcagacattccaacgctacgagctacaagcacggctcgagccagagcaacaaatcgtctctggtgggcggcggaggttccaggggtccgtctggagaagcaggcacttccggaggggccggaggaactggtggagtgaggcgcattaagagcgcagccctggaggttctgtgcccgcagccctctgtatccaatcttagtccacaccccaacagcgtggaggccatctcgggtcaacaacagatgcggaaccctctaccacctcctagcaaaagtctggtgcgaaaccagcaccttaacctttatcctacgcaaggctatggcgacggaactccctccgctggaggaggagggcctggtaacagcagcacatgcagcagtctctttttcggcagctccagcgcctgcggttccacaacagcattgattgaacctccagtataccccatagtggagcactctgacgagaagacggcgcacgaagaacacggtgatgattgcttgggaataggacaaggcaacgccgacgatgacgatgaggtggacgacgtcccgatccgaagaagaacgcgggcgttaggctgcagccaaacgcactacagtgttgaatcggatgtaggtggcttcttggcagacgaagtcggtgctgacgaggatgtgtttaaagatttcgacgacaaccttgagcacattcttagtgagctgcagcagacgcataatcagctggatgacgtcctaaagacccacgatctccatcaccactcgcatttgcaccatcataaagcagcatcagtggagggcgctgggccgtcgggaggatccgtggcagtaggggtaagtgccggaaatgatgacgaagacgaggaaacggaggataataacacggggtcgagatctccattgctcaacgatcgcaatcgccagccggcaacactgcgagagattcaagctgacaagcaactccgtcaggagctatcacaccagtccggggcagtaattcctgcccctaatcctcccgtccccatacgcagcgaggcggactcaggctgcccttcaagtgattgcgagcaagtgagcgccagctccaaggaccaactcctgtcgggaatagagttggagctgcagcagtatcagatcctgcaaaggtgtcaactagacgaagagcaaccatgcacctcgaaaatggctgccaaaagcctgggagccattccaaaagtggtaaagtaccgagaagtggatgaactaagaagaagacgcagaggaggctccccggcagatgcggctgaggctggaaacgagtttgccctagtcaaacagaccaagcaggcctcgcggaattcctcctcctcgaattcgacgcacagcatcagcttgaccgatagcctgacggctgacattcacaagatgctctggctgatgcacggcggagccgtcgatgaccggggccgtccaatcaccggcacctcggcggacggcactccaatcccggcaagcagcagcctggtcccgccgaacatgtccaacgcacacttccagttctaccaggatgctattcaagcgcttcagggcacccatcccacttccggttccagtgtggaacacatgaccaacattgagttggctagggataagttgcgcctggatgccaaattgatgtgcgagcagctggttgcggcggcggaggccaactcaggagtccgaggaaacacactcgcaactcagcaaatgacgcagcagcaggtgggcatgttaatgcgcggaggctctagctcccggcacccatccagtgctccgttctcggtccaaggattaatcaatgtgatccgaagtgagcgcccggcagcgcgcagtcaattggacgccttgcagcaactaagtgatgcagcagcagcattggccgctaatgccagtgaggctgcctccgtttcagcctccggtgcaggaggaggagcatcgagtggcgggggaggagttttaagcgccctaggactggcgaatcaccccagcaaccagatcagccaaatcagtcagctcagtcagatgagccaacccatgctgaatgtggacgggcattttgcaccctactgcgactactggagacccgcgtgccttctatccgcgacagaaaagccagcggctccaaagagtttctacaagtaccgattcaagtggtgcggccaagagcatgagttcaagattgccatggaccggctagagcttcttgccctgttcgaccgtgatctccactggatgcacgtccttctggccagtctgctgtgcaccctggtagcctgcttgggagcggcgatcttgcagcacgatcactacaaggatctatgtgccctgctcttctgcgcagtgatcgcgggagctcagtactcgctagtaaaaagtgtgcaaccggacgcagcttcgccagtgcacggattcaacaagacagtcgcctactcgcgggctatatacttctgccttgccgggggcatgctgttgctactaaagcgcctagatacggactacggggaacggacaccggaccctgtggtattctttggcatgcgctactctcctgctgatgtggttgccctccttctgcaggcgctctacatcttgctgctgtgcttccccatcatattctcggtgggattgtgtccccagataaacacgtttcttatgtacctgctcgagcagatcgacatgcatgtctttggcggaaatgctgctagcagtcttctaggtgagaactctttaatccctattttgcttcttagactaattcctaatactgtacaggttcctttttgtgcgtcgtccggtcggtgctagctgtaatgctgctttacggacctctgtacggagcattggacgagcagcgcgggacgcagtacattctgttctccatcttctgcgctatgctggtacccctgggctaccatctgtctcgatgtgccagcgacttcagccacctgtggcggctgatcaagacgtgcattgtgagcacgtatcgggacgatgaggatgaagatctcagccagatgcaacatatagcaaccggaacagttactggatcagggactgccaatagcactgcccttcaattgaccaccagtactccaaagcagcacaggcaaacagacgtaaaaacggaacatgagcagatcgagctgagttcgctagaaaagctaacagtcaacgaagaacatcacgagaaagatcacggagcagatgatcaactagagacggatcaagatctgcctctgcaacaaaagcacagcaaatcaaaaacttcgtccttgggcagcagtcagcaaaccctgggtaagacgatcagcagtagcaagagggccataaccgcctccagttcgtgtacctccattggaacgggagaaccagcggtggaagctggagctttgaccgaggaggcggtggaaggcgaggagcaacgtaggaatacactggctggcgaggtggggagcaagcacgaattagcggagaactatgaccaagccgccaaaattgatgagtgtgaagacaagatctccagctcatctgccacaaaccccggggacatgtctacgttgacagcgggggcgggcacagccaccactgatgccacacccgcttgcctggaggcagatcctgacgccgaagctgaggcacctgctgacgaaaagcaacatcaggggattctgggaacgggaactggaactggaactggaactaccgaagccagtgaaaatggcagcggtggcggcgctaacggaaataccaatagcaatgggactggcaacgaccttcccgatccactaccacgaaagctgcaggctacagtaacaactcggctgaagaacgacttggtggtgatgaccctgctggcggtcagtgtactggggttgcactgtagcactgtattcaccgccctgcagccggatctcaacgtggttctctactcgttcatcggcgtacttggacttctcctgcactacatagtgccgcagatgagaaagcatatgccctggctttgtttctcccgtccgttgctccggcagcgtgagttcggccagtttgaggtgctcaacgcccccaagatcatgtggttcgaaaagctctacatttacctcagtgtcctggagcggaatgtgctctttcccctgctggccatttcctctctaacggcggactcgcagttgattgtggctaagtttggattgccctggggcacgctcatcgtggcgatctgcgccctaaagtgtgagtcatccgatcatagaaatcgatcatttgaaatcgttattaaatgtatattaatatatctaaagactgaacggcaaaccctatatgcagatcttccatctccctcacttttaagctaatcccaatccatctatctctttttatcagttgtaaggaacgcttactcggatccgaccaaccagtacctgataataatttttacggttctgctattccgcatcgactttgccatggccacagagacattcattatagattatttctttgtgtcgctggcctttcgcaagtgctgtgacttcctgcttaaggtgagaacttggcctggccattatactattctaataaatgctaatgcatgttctttcttagctgcaatttattgtgacgtacatcgctccgtggcaaattacttggggatcggccttccacgccttcgcccagccatttagtgtaccgcactcggcaatgctgttcctgcaggcggccatctccgcagtgctctccactcccctcaatccgtttttgggcagcgccatctttctcacttcgtatgtgcgtcctattaagttctgggagcgggactacaacacgcgccggatagaccactccaatacaaggctaagctcccagctcgagcgggacttgggtgcggacgataacaacctcaacagcatcttctacgagcacttaacccgctctctgcagcactccctgtgcggcgatctcctgatgggtcgctggggaaatgtcaaccaaggagactgctttggtaacaacataattttatacctttcctacaaagaggctgagaccctgtttatcctttcagttcttgcctcagacgatcttaactgtttggttcacatcattgagctaggcaatggcttatgcacgtttcaaatgcgcggcttggagttccgcggcacctattgccagcaacgcgaggtggaggccatcaccgaggacgtagaggacaacgacggatgctgttgctgcgatccaggccacctgccccaattgctcagcgccaacgccatgttctccacccgctggctggcctggcaggtggtcgcagcccagtatgtcatcgagggctactcaatatcagacaacttagccagcgccacgctacaggtgtttgaatatcgcaaggtgctcataacctactacattaaggtgagccctctggatttgctcgtaataacttttgctaatcaaaaaccattttatagagcatcatctactatgttgtaaagaatcccaagcttgagcagtggcttgcctccggtcccatacaagatgccctccagcatactctaagccgacagttcgttgacctagatcccatttttaatttcaatttagacgaggactttgattttcgggcagtaggcatcacgcgttccagtttttgctacgtgtacctcaaatggatcaattactgtgtggatatgcgccgagatgccaactctatgggaggcgcaccacctgcccaagcaccagcagctgctggaggagcttcgtccgctccggcaacagcgggtgttgctccaccagcgccggttacgcccgcccacaatgactccaagagcactcccaatctctcggcgcacggtggacaggctggtccgtcttcaggtcaatccaagtcacagtcacagcagcagctgcgccgtccacaaaagagtgttgcccaggaaaccagcgtaggcggaggaggtgtagttgtcggagggactactgtccctggcacaggaggagtgaccggtggtggtggagatccgcagctgagcagctcccatagctttgccaatatctcccggcaaacatcggagagtgctcccggactgggtggctacgtagcgtatatggatcaaaatgttttcgtgaagctggctaagagtagcaccaccacaggagcaggagccggagcaccaactagccggaaagaaagtcaggaaaaaccagcacttcgtctgaaactagccagcgtgggaaaagatgcaccgctcgtgtccctgtgcctggccctgggccttttggccaggcgatcactggccacggcctcgcacagcgcgttgaccggtgtggagttctttctgcatggtttacatgctttgttcaagggagattttcggatcacatcgccgcgcgacgaatgggtctttgcggacatggagctacttcattccgttgtggcaccggcggttaagatggcacttaagctgcagcaggaccacattaccaatcccgatgagttcctggatcctcatgccctgtacgatgccattgacaactgctctaacgagttggtaatttcgcatgaggctgatcccgtttggcgaagtgccgtactacgaggagcacccaatctacttgccctgaggcacgtaatggaggatggctcggatgagtaccgcattattcggctgacaaagaggtgtctgagcttccgggtaatcaaacttaacagagagtgcgttcgtggcctgtgggcaggacagcagcaggaactgatctacctgaggaatagaaacccggagcgcggaagtatccagaatgccaagcaggcgctgcgcaacatcatcaactccagctgcgatcaacctattgggtatcccatctacgtgtctccactcacaacgtcatatgcggatacaaatgcccaactgtgcgaagtgattggcggcgccatcacattagacaccatccggcatacagtgctggggtggtggcaccgtatacgagagcgctgtcgccagggatgcagttcgggatctgctctagaaccgcatccgggatcgggacccgtccaactgggtgcctgcaattttggcagcggtggcagcgtcgttggtgccgcatccactgctaccggagttggtgcctcgacaggatctggcttgggagtagctgctcccggcaccgctggcagcacgggaggcgagtccggggatctagctcctgtttttatttctgctcctctctacaacactcttacggttaacagttactacagcgtgcgtccgggaaatgttcccggaggacccattcccggaaatctgggcggtaactatgtgagcgacagtttggcggtggtgcgtggaggtctggcagtgatgcctgtgaaacccacatccactacacttattgcgggtctgctgaacagagaacgcgatgaaacatctggatctggaattatgggagcaggagccagtggacccaccagagcaacgagtagtggcggagtgcgcagtcgaagacctgaagtcggcagcagtcgaggtagagatcatgaacgcagagccactttgcccatagcgagcggtggagccggcggtgagccaggaaaggatcttaccgcgcctcaaacccaagtggagcatgaaccaagcccacgcagcacaaagctctcctcttcttctggcagtctgggtcttggaatgggcgtgggccttggcaacattatcaccacgccgggagattatccacggaaaaccaagggacccatttgcctcaccgccgtggacacaggaactagtagttcagcggcagagggaaagcccgcaggatcgggaacagtggctggaactggagtaggtggcgttatcaggaagccgcgcattgagatcttcaagaaagtcataattgttgatgacactggggtgagtagaaataattatagaccctttacattaaggtagtaaaactaaacccaaattgaacagatttacgactgcctggatatcatcgatgctgttgtgtggccaactgaacgaatgcgcaacaatggtggcaggctgtcctggaaagactgggagccgagtgccggcatggtgggccatgtggtccactgctggacgcctaaccataaggacattcgcttccgttcgcatgtcaaccgctatgtttacctcgtggagatcggtgaccactatgtgcccgtagaggagttgggtctaagggaatataatcagattatgggcagcaccgaggagatggccaattcgcgacgaagctccatccagcgtgattttcacgagtacaacattcagctaaagctggctggtcttgctccaattattggaggcggcgaatcctcaacggcaacgactagtgatgcttctaaatcacacaaggcgaaaatccgagcggtaagcagcagcagttccgaggacgaggatacgtcgtccactcgctccattccattaccacagggcgatgatggcgacttgacgaacttcaccaggctggtgagcatgtggaaggaaatcattttggacaataacaagagaagactctacgatatgggtgagttgtccccagagctgctacaaaaactggatgatgccgttcagcagcagcagcaactggaagatgcactagcggaggaatcgaaggaaaagggcacagccacagtcactgccaacgaaggtgaagagggggtaggagaaatggaaattgagccagaacaggaacagaaagaagtggtgtatctcgaggagcagtcaccgctggaagaggtgaccgtttcgaagcccgacgagcagccagctcagccaacaattccggctagtcccgttcctgctgagaccagctctacttccagtgccaaatccacaagttccccttcattatgccaggaggaagaggatgcagtcgatccggaggagacccctgaactggcctccgaggagtcaccaagcgatgagaatggcgagagcgaggcgggaacaacggtctaagtagatcacatatatttgcatttgtttgccaagcaaacaccccaatggcagggactgacaccaaggcggacatggacacaaccttgtaatacatatcagcaaagagcagaaatatggatattgaaatcgcagaggagacaaccttgccccgggcttccgcactgtacgccttttccatgggtgtggcccatatccgagcaccgttcctggtcagaaaaacaaacaaacaaacaaacaacaacaaatgagaacacttccaagaaatcaaagtaatgtttataaaacgactgcgtttagtgtatgcataggaattaggagcaaactacaataattcagacaaaaacaaacaaaaaaacaaagaattcaattttagtattaataaaagttataggttatactcggtatataggaaaaagagcgcaaatcgagagcaggatattggaaagatcataaaaaatatatttaactaattgttgtaacttgcgaattgtataatatggaaacggaaaaccaaatgcttctcaaacattacctattttgttctttctcctctcgctagccaatacagaaatattaagcaaacctaaagaatttataaatgtatatttaacggaaattagtttaaagttaaagttaatgaaccccacacacagacacaaaacataccaaattcgattgttaaagagtacacaaatgaaacaaatcccgcattacataagcctaagcgataagcgaacttcggacaggattcaagttacaaaactaagatattacacacaattcctagatgattaagaggatgaggatgaggacgaggatcaagtggaatgacgacatgtaaagctctcacgttgccttaatatattagactgattttttctacacacatttgtagacgtatggtggatgacatttgagaagtcccagccaattgcctggggggggaggagttgcagcaaacggagtcctaatcccaatcccaactagcgatttacatgta

SEQ ID NO: 26708 - DNA, 10314 bp, DROSOPHILA
atgggttcacagaccttggagattctgcgccagggcgtgtgggcctcgctgaccggcggttacttttacgatccgcatcagggtgtcttctgcaacgtggtgcacctttacctgtggctctacctgctctgctcgcccttcgtggcctacctgatcttcttgcagtactttccgagcacttggttgacatggtgcctgtattgcgtgataacgagcttaaccatactgatggtaaagctggccaatctggcgctgcacaggctctacgatcgcgcacagaccatgtccgaggggaacctaaaggggcagttcgtgaaggtcaccaaggaaacggaaccgcgccacgacgacgagggcggcatcgagatgaaggtcatccgaccgggcggctcacgcatttccggcgagcaggccattaatgaagcaagcgaggagaacagcatcatgtccatcgacaacgtgaacagcattattgatctcaaggtcgatgtgcatcgcaagaacagctcggagtccattgaactgatgttctacgccccatccatgctatccggcggtagccaacaggatcaacaatcgctggctggttccgccagcgttagcaagtccattcggagtacaggaccgggcggaaactcgtccaccagcgccgccgctcaagcagacatgttcaacaagtacctcactgtctatccggaggttgtcgaggcggctggaagcagtgcgggtagcgcagatggaggaagtagtggtggcgacagtagatcaggcgcagcagtgagtacactgggacatacaggagcgggaacagcaccagcccagcacgtacgcactggacatctgtcgcgcaagtgttctgaggtgtttagccgccgccatcgacgacgtctcgaacggcagagcagcttggacacagcggcggcagctgcaaactccaacgcggaaaacaagttgatgcgcaatcagtcggatacgatagccacagcggcaccctcgttcctgcactctcagccaacgaacaaggcgcgcggtcagaccaatccgcgtcagcactttataaccagcgccccatcaacaggaataggcggaggagatgctcccacttcatctaccgccgtcgttgtcattgcccccgcctcgaactcattggttaatcctggacgttcctcacgtctgcagcgccacagaagttcggagacgcatgacgagcggctgaagcaccagagccgtggtggactcttccagcccattcttcaacttccgcaccacagtgcagccagcagcatcggcgcactggcagtgctcggtggaggaggcaatgttgccgcaaatgatgtggaagacatggaactgggcctggttaggaatgcgggcagcggcggagtggcggatgcttgtagccgggcactacagtcctggatattagatccctttccggatgggtacctggaggacgatagctacaccaaatctgatctgggcattgaacagccacaccagccaactttccgcacccagcatcgtcatcaccatcaccaccaccacctgcatcatcacctaggaggtgcaatcattcgtaaggatccaaccagcacaatgtctgcacttcaattggctgcagtcacccagccaggaacgggaggatcggtaacaggcggtggtggagcagcaggtggaggtggatctgctgctggtatgaagcgacgcagacattccaacgctacgagctacaagcacggctcgagccagagcaacaaatcgtctctggtgggcggcggaggttccaggggtccgtctggagaagcaggcacttccggaggggccggaggaactggtggagtgaggcgcattaagagcgcagccctggaggttctgtgcccgcagccctctgtatccaatcttagtccacaccccaacagcgtggaggccatctcgggtcaacaacagatgcggaaccctctaccacctcctagcaaaagtctggtgcgaaaccagcaccttaacctttatcctacgcaaggctatggcgacggaactccctccgctggaggaggagggcctggtaacagcagcacatgcagcagtctctttttcggcagctccagcgcctgcggttccacaacagcattgattgaacctccagtataccccatagtggagcactctgacgagaagacggcgcacgaagaacacggtgatgattgcttgggaataggacaaggcaacgccgacgatgacgatgaggtggacgacgtcccgatccgaagaagaacgcgggcgttaggctgcagccaaacgcactacagtgttgaatcggatgtaggtggcttcttggcagacgaagtcggtgctgacgaggatgtgtttaaagatttcgacgacaaccttgagcacattcttagtgagctgcagcagacgcataatcagctggatgacgtcctaaagacccacgatctccatcaccactcgcatttgcaccatcataaagcagcatcagtggagggcgctgggccgtcgggaggatccgtggcagtaggggtaagtgccggaaatgatgacgaagacgaggaaacggaggataataacacggggtcgagatctccattgctcaacgatcgcaatcgccagccggcaacactgcgagagattcaagctgacaagcaactccgtcaggagctatcacaccagtccggggcagtaattcctgcccctaatcctcccgtccccatacgcagcgaggcggactcaggctgcccttcaagtgattgcgagcaagtgagcgccagctccaaggaccaactcctgtcgggaatagagttggagctgcagcagtatcagatcctgcaaaggtgtcaactagacgaagagcaaccatgcacctcgaaaatggctgccaaaagcctgggagccattccaaaagtggtaaagtaccgagaagtggatgaactaagaagaagacgcagaggaggctccccggcagatgcggctgaggctggaaacgagtttgccctagtcaaacagaccaagcaggcctcgcggaattcctcctcctcgaattcgacgcacagcatcagcttgaccgatagcctgacggctgacattcacaagatgctctggctgatgcacggcggagccgtcgatgaccggggccgtccaatcaccggcacctcggcggacggcactccaatcccggcaagcagcagcctggtcccgccgaacatgtccaacgcacacttccagttctaccaggatgctattcaagcgcttcagggcacccatcccacttccggttccagtgtggaacacatgaccaacattgagttggctagggataagttgcgcctggatgccaaattgatgtgcgagcagctggttgcggcggcggaggccaactcaggagtccgaggaaacacactcgcaactcagcaaatgacgcagcagcaggtgggcatgttaatgcgcggaggctctagctcccggcacccatccagtgctccgttctcggtccaaggattaatcaatgtgatccgaagtgagcgcccggcagcgcgcagtcaattggacgccttgcagcaactaagtgatgcagcagcagcattggccgctaatgccagtgaggctgcctccgtttcagcctccggtgcaggaggaggagcatcgagtggcgggggaggagttttaagcgccctaggactggcgaatcaccccagcaaccagatcagccaaatcagtcagctcagtcagatgagccaacccatgctgaatgtggacgggcattttgcaccctactgcgactactggagacccgcgtgccttctatccgcgacagaaaagccagcggctccaaagagtttctacaagtaccgattcaagtggtgcggccaagagcatgagttcaagattgccatggaccggctagagcttcttgccctgttcgaccgtgatctccactggatgcacgtccttctggccagtctgctgtgcaccctggtagcctgcttgggagcggcgatcttgcagcacgatcactacaaggatctatgtgccctgctcttctgcgcagtgatcgcgggagctcagtactcgctagtaaaaagtgtgcaaccggacgcagcttcgccagtgcacggattcaacaagacagtcgcctactcgcgggctatatacttctgccttgccgggggcatgctgttgctactaaagcgcctagatacggactacggggaacggacaccggaccctgtggtattctttggcatgcgctactctcctgctgatgtggttgccctccttctgcaggcgctctacatcttgctgctgtgcttccccatcatattctcggtgggattgtgtccccagataaacacgtttcttatgtacctgctcgagcagatcgacatgcatgtctttggcggaaatgctgctagcagtcttctaggttcctttttgtgcgtcgtccggtcggtgctagctgtaatgctgctttacggacctctgtacggagcattggacgagcagcgcgggacgcagtacattctgttctccatcttctgcgctatgctggtacccctgggctaccatctgtctcgatgtgccagcgacttcagccacctgtggcggctgatcaagacgtgcattgtgagcacgtatcgggacgatgaggatgaagatctcagccagatgcaacatatagcaaccggaacagttactggatcagggactgccaatagcactgcccttcaattgaccaccagtactccaaagcagcacaggcaaacagacgtaaaaacggaacatgagcagatcgagctgagttcgctagaaaagctaacagtcaacgaagaacatcacgagaaagatcacggagcagatgatcaactagagacggatcaagatctgcctctgcaacaaaagcacagcaaatcaaaaacttcgtccttgggcagcagtcagcaaaccctgggtaagacgatcagcagtagcaagagggccataaccgcctccagttcgtgtacctccattggaacgggagaaccagcggtggaagctggagctttgaccgaggaggcggtggaaggcgaggagcaacgtaggaatacactggctggcgaggtggggagcaagcacgaattagcggagaactatgaccaagccgccaaaattgatgagtgtgaagacaagatctccagctcatctgccacaaaccccggggacatgtctacgttgacagcgggggcgggcacagccaccactgatgccacacccgcttgcctggaggcagatcctgacgccgaagctgaggcacctgctgacgaaaagcaacatcaggggattctgggaacgggaactggaactggaactggaactaccgaagccagtgaaaatggcagcggtggcggcgctaacggaaataccaatagcaatgggactggcaacgaccttcccgatccactaccacgaaagctgcaggctacagtaacaactcggctgaagaacgacttggtggtgatgaccctgctggcggtcagtgtactggggttgcactgtagcactgtattcaccgccctgcagccggatctcaacgtggttctctactcgttcatcggcgtacttggacttctcctgcactacatagtgccgcagatgagaaagcatatgccctggctttgtttctcccgtccgttgctccggcagcgtgagttcggccagtttgaggtgctcaacgcccccaagatcatgtggttcgaaaagctctacatttacctcagtgtcctggagcggaatgtgctctttcccctgctggccatttcctctctaacggcggactcgcagttgattgtggctaagtttggattgccctggggcacgctcatcgtggcgatctgcgccctaaagtttgtaaggaacgcttactcggatccgaccaaccagtacctgataataatttttacggttctgctattccgcatcgactttgccatggccacagagacattcattatagattatttctttgtgtcgctggcctttcgcaagtgctgtgacttcctgcttaagctgcaatttattgtgacgtacatcgctccgtggcaaattacttggggatcggccttccacgccttcgcccagccatttagtgtaccgcactcggcaatgctgttcctgcaggcggccatctccgcagtgctctccactcccctcaatccgtttttgggcagcgccatctttctcacttcgtatgtgcgtcctattaagttctgggagcgggactacaacacgcgccggatagaccactccaatacaaggctaagctcccagctcgagcgggacttgggtgcggacgataacaacctcaacagcatcttctacgagcacttaacccgctctctgcagcactccctgtgcggcgatctcctgatgggtcgctggggaaatgtcaaccaaggagactgctttggtaacaacataattttatacctttcctacaaagaggctgagaccctgtttatcctttcagttcttgcctcagacgatcttaactgtttggttcacatcattgagctaggcaatggcttatgcacgtttcaaatgcgcggcttggagttccgcggcacctattgccagcaacgcgaggtggaggccatcaccgaggacgtagaggacaacgacggatgctgttgctgcgatccaggccacctgccccaattgctcagcgccaacgccatgttctccacccgctggctggcctggcaggtggtcgcagcccagtatgtcatcgagggctactcaatatcagacaacttagccagcgccacgctacaggtgtttgaatatcgcaaggtgctcataacctactacattaagagcatcatctactatgttgtaaagaatcccaagcttgagcagtggcttgcctccggtcccatacaagatgccctccagcatactctaagccgacagttcgttgacctagatcccatttttaatttcaatttagacgaggactttgattttcgggcagtaggcatcacgcgttccagtttttgctacgtgtacctcaaatggatcaattactgtgtggatatgcgccgagatgccaactctatgggaggcgcaccacctgcccaagcaccagcagctgctggaggagcttcgtccgctccggcaacagcgggtgttgctccaccagcgccggttacgcccgcccacaatgactccaagagcactcccaatctctcggcgcacggtggacaggctggtccgtcttcaggtcaatccaagtcacagtcacagcagcagctgcgccgtccacaaaagagtgttgcccaggaaaccagcgtaggcggaggaggtgtagttgtcggagggactactgtccctggcacaggaggagtgaccggtggtggtggagatccgcagctgagcagctcccatagctttgccaatatctcccggcaaacatcggagagtgctcccggactgggtggctacgtagcgtatatggatcaaaatgttttcgtgaagctggctaagagtagcaccaccacaggagcaggagccggagcaccaactagccggaaagaaagtcaggaaaaaccagcacttcgtctgaaactagccagcgtgggaaaagatgcaccgctcgtgtccctgtgcctggccctgggccttttggccaggcgatcactggccacggcctcgcacagcgcgttgaccggtgtggagttctttctgcatggtttacatgctttgttcaagggagattttcggatcacatcgccgcgcgacgaatgggtctttgcggacatggagctacttcattccgttgtggcaccggcggttaagatggcacttaagctgcagcaggaccacattaccaatcccgatgagttcctggatcctcatgccctgtacgatgccattgacaactgctctaacgagttggtaatttcgcatgaggctgatcccgtttggcgaagtgccgtactacgaggagcacccaatctacttgccctgaggcacgtaatggaggatggctcggatgagtaccgcattattcggctgacaaagaggtgtctgagcttccgggtaatcaaacttaacagagagtgcgttcgtggcctgtgggcaggacagcagcaggaactgatctacctgaggaatagaaacccggagcgcggaagtatccagaatgccaagcaggcgctgcgcaacatcatcaactccagctgcgatcaacctattgggtatcccatctacgtgtctccactcacaacgtcatatgcggatacaaatgcccaactgtgcgaagtgattggcggcgccatcacattagacaccatccggcatacagtgctggggtggtggcaccgtatacgagagcgctgtcgccagggatgcagttcgggatctgctctagaaccgcatccgggatcgggacccgtccaactgggtgcctgcaattttggcagcggtggcagcgtcgttggtgccgcatccactgctaccggagttggtgcctcgacaggatctggcttgggagtagctgctcccggcaccgctggcagcacgggaggcgagtccggggatctagctcctgtttttatttctgctcctctctacaacactcttacggttaacagttactacagcgtgcgtccgggaaatgttcccggaggacccattcccggaaatctgggcggtaactatgtgagcgacagtttggcggtggtgcgtggaggtctggcagtgatgcctgtgaaacccacatccactacacttattgcgggtctgctgaacagagaacgcgatgaaacatctggatctggaattatgggagcaggagccagtggacccaccagagcaacgagtagtggcggagtgcgcagtcgaagacctgaagtcggcagcagtcgaggtagagatcatgaacgcagagccactttgcccatagcgagcggtggagccggcggtgagccaggaaaggatcttaccgcgcctcaaacccaagtggagcatgaaccaagcccacgcagcacaaagctctcctcttcttctggcagtctgggtcttggaatgggcgtgggccttggcaacattatcaccacgccgggagattatccacggaaaaccaagggacccatttgcctcaccgccgtggacacaggaactagtagttcagcggcagagggaaagcccgcaggatcgggaacagtggctggaactggagtaggtggcgttatcaggaagccgcgcattgagatcttcaagaaagtcataattgttgatgacactgggatttacgactgcctggatatcatcgatgctgttgtgtggccaactgaacgaatgcgcaacaatggtggcaggctgtcctggaaagactgggagccgagtgccggcatggtgggccatgtggtccactgctggacgcctaaccataaggacattcgcttccgttcgcatgtcaaccgctatgtttacctcgtggagatcggtgaccactatgtgcccgtagaggagttgggtctaagggaatataatcagattatgggcagcaccgaggagatggccaattcgcgacgaagctccatccagcgtgattttcacgagtacaacattcagctaaagctggctggtcttgctccaattattggaggcggcgaatcctcaacggcaacgactagtgatgcttctaaatcacacaaggcgaaaatccgagcggtaagcagcagcagttccgaggacgaggatacgtcgtccactcgctccattccattaccacagggcgatgatggcgacttgacgaacttcaccaggctggtgagcatgtggaaggaaatcattttggacaataacaagagaagactctacgatatgggtgagttgtccccagagctgctacaaaaactggatgatgccgttcagcagcagcagcaactggaagatgcactagcggaggaatcgaaggaaaagggcacagccacagtcactgccaacgaaggtgaagagggggtaggagaaatggaaattgagccagaacaggaacagaaagaagtggtgtatctcgaggagcagtcaccgctggaagaggtgaccgtttcgaagcccgacgagcagccagctcagccaacaattccggctagtcccgttcctgctgagaccagctctacttccagtgccaaatccacaagttccccttcattatgccaggaggaagaggatgcagtcgatccggaggagacccctgaactggcctccgaggagtcaccaagcgatgagaatggcgagagcgaggcgggaacaacggtctaa

SEQ ID NO: 26709 - protein, 3437 aa, DROSOPHILA
MGSQTLEILRQGVWASLTGGYFYDPHQGVFCNVVHLYLWLYLLCSPFVAYLIFLQYFPSTWLTWCLYCVITSLTILMVKLANLALHRLYDRAQTMSEGNLKGQFVKVTKETEPRHDDEGGIEMKVIRPGGSRISGEQAINEASEENSIMSIDNVNSIIDLKVDVHRKNSSESIELMFYAPSMLSGGSQQDQQSLAGSASVSKSIRSTGPGGNSSTSAAAQADMFNKYLTVYPEVVEAAGSSAGSADGGSSGGDSRSGAAVSTLGHTGAGTAPAQHVRTGHLSRKCSEVFSRRHRRRLERQSSLDTAAAAANSNAENKLMRNQSDTIATAAPSFLHSQPTNKARGQTNPRQHFITSAPSTGIGGGDAPTSSTAVVVIAPASNSLVNPGRSSRLQRHRSSETHDERLKHQSRGGLFQPILQLPHHSAASSIGALAVLGGGGNVAANDVEDMELGLVRNAGSGGVADACSRALQSWILDPFPDGYLEDDSYTKSDLGIEQPHQPTFRTQHRHHHHHHHLHHHLGGAIIRKDPTSTMSALQLAAVTQPGTGGSVTGGGGAAGGGGSAAGMKRRRHSNATSYKHGSSQSNKSSLVGGGGSRGPSGEAGTSGGAGGTGGVRRIKSAALEVLCPQPSVSNLSPHPNSVEAISGQQQMRNPLPPPSKSLVRNQHLNLYPTQGYGDGTPSAGGGGPGNSSTCSSLFFGSSSACGSTTALIEPPVYPIVEHSDEKTAHEEHGDDCLGIGQGNADDDDEVDDVPIRRRTRALGCSQTHYSVESDVGGFLADEVGADEDVFKDFDDNLEHILSELQQTHNQLDDVLKTHDLHHHSHLHHHKAASVEGAGPSGGSVAVGVSAGNDDEDEETEDNNTGSRSPLLNDRNRQPATLREIQADKQLRQELSHQSGAVIPAPNPPVPIRSEADSGCPSSDCEQVSASSKDQLLSGIELELQQYQILQRCQLDEEQPCTSKMAAKSLGAIPKVVKYREVDELRRRRRGGSPADAAEAGNEFALVKQTKQASRNSSSSNSTHSISLTDSLTADIHKMLWLMHGGAVDDRGRPITGTSADGTPIPASSSLVPPNMSNAHFQFYQDAIQALQGTHPTSGSSVEHMTNIELARDKLRLDAKLMCEQLVAAAEANSGVRGNTLATQQMTQQQVGMLMRGGSSSRHPSSAPFSVQGLINVIRSERPAARSQLDALQQLSDAAAALAANASEAASVSASGAGGGASSGGGGVLSALGLANHPSNQISQISQLSQMSQPMLNVDGHFAPYCDYWRPACLLSATEKPAAPKSFYKYRFKWCGQEHEFKIAMDRLELLALFDRDLHWMHVLLASLLCTLVACLGAAILQHDHYKDLCALLFCAVIAGAQYSLVKSVQPDAASPVHGFNKTVAYSRAIYFCLAGGMLLLLKRLDTDYGERTPDPVVFFGMRYSPADVVALLLQALYILLLCFPIIFSVGLCPQINTFLMYLLEQIDMHVFGGNAASSLLGSFLCVVRSVLAVMLLYGPLYGALDEQRGTQYILFSIFCAMLVPLGYHLSRCASDFSHLWRLIKTCIVSTYRDDEDEDLSQMQHIATGTVTGSGTANSTALQLTTSTPKQHRQTDVKTEHEQIELSSLEKLTVNEEHHEKDHGADDQLETDQDLPLQQKHSKSKTSSLGSSQQTLGKTISSSKRAITASSSCTSIGTGEPAVEAGALTEEAVEGEEQRRNTLAGEVGSKHELAENYDQAAKIDECEDKISSSSATNPGDMSTLTAGAGTATTDATPACLEADPDAEAEAPADEKQHQGILGTGTGTGTGTTEASENGSGGGANGNTNSNGTGNDLPDPLPRKLQATVTTRLKNDLVVMTLLAVSVLGLHCSTVFTALQPDLNVVLYSFIGVLGLLLHYIVPQMRKHMPWLCFSRPLLRQREFGQFEVLNAPKIMWFEKLYIYLSVLERNVLFPLLAISSLTADSQLIVAKFGLPWGTLIVAICALKFVRNAYSDPTNQYLIIIFTVLLFRIDFAMATETFIIDYFFVSLAFRKCCDFLLKLQFIVTYIAPWQITWGSAFHAFAQPFSVPHSAMLFLQAAISAVLSTPLNPFLGSAIFLTSYVRPIKFWERDYNTRRIDHSNTRLSSQLERDLGADDNNLNSIFYEHLTRSLQHSLCGDLLMGRWGNVNQGDCFGNNIILYLSYKEAETLFILSVLASDDLNCLVHIIELGNGLCTFQMRGLEFRGTYCQQREVEAITEDVEDNDGCCCCDPGHLPQLLSANAMFSTRWLAWQVVAAQYVIEGYSISDNLASATLQVFEYRKVLITYYIKSIIYYVVKNPKLEQWLASGPIQDALQHTLSRQFVDLDPIFNFNLDEDFDFRAVGITRSSFCYVYLKWINYCVDMRRDANSMGGAPPAQAPAAAGGASSAPATAGVAPPAPVTPAHNDSKSTPNLSAHGGQAGPSSGQSKSQSQQQLRRPQKSVAQETSVGGGGVVVGGTTVPGTGGVTGGGGDPQLSSSHSFANISRQTSESAPGLGGYVAYMDQNVFVKLAKSSTTTGAGAGAPTSRKESQEKPALRLKLASVGKDAPLVSLCLALGLLARRSLATASHSALTGVEFFLHGLHALFKGDFRITSPRDEWVFADMELLHSVVAPAVKMALKLQQDHITNPDEFLDPHALYDAIDNCSNELVISHEADPVWRSAVLRGAPNLLALRHVMEDGSDEYRIIRLTKRCLSFRVIKLNRECVRGLWAGQQQELIYLRNRNPERGSIQNAKQALRNIINSSCDQPIGYPIYVSPLTTSYADTNAQLCEVIGGAITLDTIRHTVLGWWHRIRERCRQGCSSGSALEPHPGSGPVQLGACNFGSGGSVVGAASTATGVGASTGSGLGVAAPGTAGSTGGESGDLAPVFISAPLYNTLTVNSYYSVRPGNVPGGPIPGNLGGNYVSDSLAVVRGGLAVMPVKPTSTTLIAGLLNRERDETSGSGIMGAGASGPTRATSSGGVRSRRPEVGSSRGRDHERRATLPIASGGAGGEPGKDLTAPQTQVEHEPSPRSTKLSSSSGSLGLGMGVGLGNIITTPGDYPRKTKGPICLTAVDTGTSSSAAEGKPAGSGTVAGTGVGGVIRKPRIEIFKKVIIVDDTGIYDCLDIIDAVVWPTERMRNNGGRLSWKDWEPSAGMVGHVVHCWTPNHKDIRFRSHVNRYVYLVEIGDHYVPVEELGLREYNQIMGSTEEMANSRRSSIQRDFHEYNIQLKLAGLAPIIGGGESSTATTSDASKSHKAKIRAVSSSSSEDEDTSSTRSIPLPQGDDGDLTNFTRLVSMWKEIILDNNKRRLYDMGELSPELLQKLDDAVQQQQQLEDALAEESKEKGTATVTANEGEEGVGEMEIEPEQEQKEVVYLEEQSPLEEVTVSKPDEQPAQPTIPASPVPAETSSTSSAKSTSSPSLCQEEEDAVDPEETPELASEESPSDENGESEAGTTV

SEQ ID NO: 26710 - DNA, 4665 bp, DROSOPHILA
cgataattcttcaaaaatatcctgtaacggccttacctcaaatattgatttgtattttctattctattatttaatatttatcctgttagcttatggttggctttttcacatttaaagatcgatatgcttgcgttcggcaattttcgcttagtggatataaaagcggaacgactggaattttttcgcatatgaaacctgttatcccaccgatccctatctatattttaatatttcaatataaatagttttgtttccgcgataattcagctaaaaaaaattttatcgattgcatgcattaagtaactgaaaaattaacaacaaactttaatataaaaaaagcccggtacatgagaatcatttactcagaaacgcgtttatgaaacgcttgcaattcccagcaattatgcctaacgcgtagtttaaataacaattgattgctacagaagcagacagcgcgaaagacaatattaagtttataatttaaatatagcttgaaggcagagttaaaaaaggcagatactcagcgcataacgtgcaaatcgatttggcactttaatttgccgtttatttgtttatagtctgtcaaaacaaacagttgtacataaaaaaaggaaatataatcgcgcgcatgcagcatttctggttaaaataaacattaataaagcaacgaattgaatgggactcacggacaacgatgagggattgtaaatagagacattggttaatgcctgaaatgtacatatttttttgtgttgtgcacgatttgatgcaagaatagtgtgtatttttaaacaagactccggcgctgatacattcatacatagctcacgcgcacaggacatacagtcctaacataaaattctcgttcgttttcacgccatcgcatctattgtgttacatagcgcccaaaaaacgagaagtaaagaactataatcagcgaagtttcggttccttggcaaacaaacaggtatgtattcagattcgcagggatgcgtacatgtatataacgcgtacattcaactgtttacatccttattactaaatatagaagtaattccaattgtgcaaatcgctagtggaggtgtacatatgtatttatgcaagcgtgcgtatgtatgtgggtacataaaacatggcaagtgaaaattcgcatggtcttctcctcagtttcacactgaggacattatttatttggacgattatcaaatgtaaataagcatatacctctgcacctgtatgtacgctcgtgtgtttgtatgtatgtatgtatatacagtggtcaactgctaaaaagaaagcaaataaaaacttaggaataacgtaactgtcatgcaaaaacaatacaaaaaagtggaaaagggacaatgctatttttaaactcatatatttggctaaaatattctttcttttaatccattattaaatgaaatgcaaatattaatgcaatgcaaaaaaaagaagtatctttttttttcatatatcaaaaatcaaacaaaaggagttcatataatatatatacttaatatgcaatacaatatttttaagggaaacctactagaattatgatgtcacgagaaagattcggtcaaattacttgatccttattcttagttcattcaagagagtcgaatttatgatatattcgaattattgtctattgacgatagttataatttatcctggaatttaccaacactctattgcaggatatacaaggatctttaaatgagcgatagcttcgtaaactcaggagcacagtaaaggcgcgaactatattttgagtacgatgagcggcgctacacaggaattttgtgtacgctggaacagccatttgggcagcattggagctgcttttccgcagctgctagcaggccagagattcgtggatgtaacactcgcatgcgaaggccaacaggtgcactgccatcgtctggtgttggccgcttgttccacctactttgaggcaatactagcggagcatccttgcaagcacccggtcatcatattgcccagggagatcaagctatgggagatccaggcgcttgtggacttcatgtacaagggagaggtcaatgtcacgcaagccggtcttggccagttgcttcgctgtgccgaacaactgcagattcgcggtctatacggctctgaggcaccgataaactacaagaaactccagcaggcgagtctcgaggctgctaaggatccagctgcaaccacagcgcgaagcttcaagcatgtggacagcgcggaaacggacgatgcagccactaattcaaccacctcaacaacaatgaccacctcctccgctccaccgctaccggttaaccatcagcaacccacagtattgaagcgccagaatcccgatgctcggcagcagcagcaacagcagcagcagcagcaggtgcagcagcgaccccagataaatggcagtaatgctcaacagccatctaaggccacctctacgaacgttttgggcagccactcgaatgcaccaaccgaggatgactccggcgacgaggtgccgaacaattggaatgcctacggggagcaattcgatgattgcaatatatctgcgcaagccgttgacaacaaaatgaatgtccacctatccctgcagcaggcgaggtttgtttttgcattaatatgacaagtatctctggataaatatatatatcttttcacaggatgcaaatgcagcttcagcagcagcaatacttggattcaaatgttgaggacgaccacaactatgtggccgctcatgatgaaaacaatgacagcagttttgcgacaggagtgccatgcggatccgggctatccctcagccttgacactgatctcgatacatcggccaatacttccggaggactgagccatagctcgatcgatggttatacttcatataagcgcgttcgacgttcagaagcatctctagcacaagcggccaaatgtgtttcgaagggcgagacattccaaactgtcagcaatatgttcaatattcctgtctcaaccattcgtttctatatggcgcgaaaaggaattcttccgaagcggaaacgtggacgtggtgcttcccatgccggaaacataataatcacaacaaactcaggaaaactctcaaccgtcccagcgagcataactcatcccccagcccatccgcatatccacaccaatccccttcctcacacgcagtctcagcaaatgtccatggacagcctacatctcaaggcgggcatcgcaaataccagtggcagcaatagtccggcaactgcaacggcaacgtctatgtcaccatcatttgatatggccacaacaggtgatattgtgccttttcacctccatagcgatgcggcggcattcaaactcaacgatcagaagctgcacatgatctaaccacgcaatttgccaagttgtgctgtactagtagggcgtgtattaatagagagggatttccaagcagtagctgctttctttcatttcggggtacgcatcggctcgtgtgggatctttagtcataacatagtcaacaaaatacaatttatacataggtttacttaattacgctttggagatgccacagttttatccttggttgaaaaactcttgccgttcaatcattattcattttactttggcaatcataagaaattacagtagatgtatgctatcaacaaggattatgactaaaaacttgcgtaaaaatttcaattatgtttcttgtcgccccagtactttaaggaattactgtattgttaataagataaataaaatcgacctggaaacttttactgggtattcgtgtgattgcaaagataagatgaaaatttataataaactcgaaggtcgtaaaagacataatcataatgctaacagcttaaactaaataataatgtaaagtaattattattggtcaaatacatccgatctattttaaaaccatgtacttttcctacaagaatacgcaaatcttcaatacttgcttacaattactcggtttgtttgtttgcttattttttttggtcattataacaattggccataaatgcaagaatcccaataataaattacgttgtgaaagtattattaaatacataagtactgtgtacgagatgattgggcaataaaagtttaaatgcattcaaagtaacaacaattttttttttgctaaatttattatttgaaatttgtactgttactgtcaatcattttttttttatatttgtacatatgtatgtagattagcacagtgcaggcgcagaatgttgaagtggaaacggcgctttttgaatacttctcatagaatctatttcttttcatgttcaatcaacggtcacactgtaagcctaagccagatataaacattcgcacgcgattttaattccatttaaagaacatggctcaagaaaatcaagctgtcgacaatggactgccctgcaacgcttacctggacacaagcctgcgagaggacgaaaacatgcaacacatcctgaaaaccttttacagcagcatcgaactcctggaagccgacacggagaaggcactggcgctacaggcagaacgcacattgaacacaaatgaacaaataaaattggatagctaccttgtgtacttgaacagcacactgtttttcatatacctgaaactgcagggtgaagatgcctcaaatgt

SEQ ID NO: 26711 - DNA, 2035 bp, DROSOPHILA
tatataacgcgtacattcaactgtttacatccttattactaaatatagaagtaattccaattgtgcaaatcgctagtggaggtgtacatatgtatttatgcaagcgtgcgtatgtatgtgggtacataaaacatggatatacaaggatctttaaatgagcgatagcttcgtaaactcaggagcacagtaaaggcgcgaactatattttgagtacgatgagcggcgctacacaggaattttgtgtacgctggaacagccatttgggcagcattggagctgcttttccgcagctgctagcaggccagagattcgtggatgtaacactcgcatgcgaaggccaacaggtgcactgccatcgtctggtgttggccgcttgttccacctactttgaggcaatactagcggagcatccttgcaagcacccggtcatcatattgcccagggagatcaagctatgggagatccaggcgcttgtggacttcatgtacaagggagaggtcaatgtcacgcaagccggtcttggccagttgcttcgctgtgccgaacaactgcagattcgcggtctatacggctctgaggcaccgataaactacaagaaactccagcaggcgagtctcgaggctgctaaggatccagctgcaaccacagcgcgaagcttcaagcatgtggacagcgcggaaacggacgatgcagccactaattcaaccacctcaacaacaatgaccacctcctccgctccaccgctaccggttaaccatcagcaacccacagtattgaagcgccagaatcccgatgctcggcagcagcagcaacagcagcagcagcagcaggtgcagcagcgaccccagataaatggcagtaatgctcaacagccatctaaggccacctctacgaacgttttgggcagccactcgaatgcaccaaccgaggatgactccggcgacgaggtgccgaacaattggaatgcctacggggagcaattcgatgattgcaatatatctgcgcaagccgttgacaacaaaatgaatgtccacctatccctgcagcaggcgaggatgcaaatgcagcttcagcagcagcaatacttggattcaaatgttgaggacgaccacaactatgtggccgctcatgatgaaaacaatgacagcagttttgcgacaggagtgccatgcggatccgggctatccctcagccttgacactgatctcgatacatcggccaatacttccggaggactgagccatagctcgatcgatggttatacttcatataagcgcgttcgacgttcagaagcatctctagcacaagcggccaaatgtgtttcgaagggcgagacattccaaactgtcagcaatatgttcaatattcctgtctcaaccattcgtttctatatggcgcgaaaaggaattcttccgaagcggaaacgtggacgtggtgcttcccatgccggaaacataataatcacaacaaactcaggaaaactctcaaccgtcccagcgagcataactcatcccccagcccatccgcatatccacaccaatccccttcctcacacgcagtctcagcaaatgtccatggacagcctacatctcaaggcgggcatcgcaaataccagtggcagcaatagtccggcaactgcaacggcaacgtctatgtcaccatcatttgatatggccacaacaggtgatattgtgccttttcacctccatagcgatgcggcggcattcaaactcaacgatcagaagctgcacatgatctaaccacgcaatttgccaagttgtgctgtactagtagggcgtgtattaatagagagggatttccaagcagtagctgctttctttcatttcggggtacgcatcggctcgtgtgggatctttagtcataacatagtcaacaaaatacaatttatacataggtttacttaattacgctttggagatgccacagttttatccttggttgaaaaactcttgccgttcaatcattattcattttactttggcaatcataagaaattacagtagatgtatgctat

SEQ ID NO: 26712 - protein, 514 aa, DROSOPHILA; identical to SEQ ID NO: 19032

SEQ ID NO: 26713 - DNA, 7327 bp, DROSOPHILA
tttacccggaatcctaggaataaagcgcgaggtcttgaggatatcgccagccttcatgttctcggtggccaggatgtacttcagctcatcgccgacggcaaccagggccactttggcggtgcgacagccatcgcgtagcacctcgagtaccagttcctcctgggcgccctccgtgggaccatcccgcacccatttaacccagcgatactgctgtttgatgcctccgccaatgcccttggccaccaagcgaccggagacgggatcccgaccagccaaatgggtgatcttcagcggctcaacggtgtacttctccggaaagtgcacggttcgtcggaattgctgtccggcaccaggttttggtttctccaccactttggttttgccgcgcaattgctgcagaaacgccggcgccgtgcgaaacggcgtttgtatagtcagcgttgtgctcagcaaacgtgttacactttgcattttcgatagttttatttgaaaaattaaatagaacgaaaatatatgcaaactgttacaaaatcgaaatgcggctgaaaacagctgttacgcggcgttgccagaccacgaacgggccatgcctgatttcgggcgctagcgttgccagcattttgctcgaactgatctcttcttcttctccttcaccgcgctgaagcaataagaatcgggaaaaccgcattaaaatcgctgaaaaagtgcacaaatcggctttaaattattgcccaattactagtgttacgtgcatatcgagagatttcataaattgcaacagccaacgattttttccaacaaggtacgcaaaataataaaaataaacaagacgaacagaaaaataatatacacacacaaacacgcagcgaaaaacgtgttgtgtgcaaaaaaaaaagactgaaaaaaaagaacaacaaaaacagttcgagtttgataaccaacggcgaaaatataaacagcaaaagagagagcgagaattagtagtaataaaaatcaatagcagagtgagcggaaaatcagcttaaccagctaaatggcatataaataaatataaggtttttattttggaacacgctcatccaacacacatgcacacgcgcatacacgcacgcacacacacaggagtaaaggtatgggtggcctcaagtgtgtgtacatattttgatgttaggtgggaaaaaagcgggcggcaagtttacgcaatcgccgagcgaaaagcaaagagcagcagctatacgttgtgaaaagtgtgctttttgtgtgtttacaaagagacaaacaagacatccgtcgtttgtatgtacgtgcctatgtatgtatgcgcaggtggagtcggttgctagctgaaaaatcaacgagcggcattttttacgcatttccaatacgccacatacatatatacgtgcgtcgtttgcgcgtgtgtgtgtgtggttgtgtgtattttggtgtttttatttatttattgtgcttctctttcgtcgtttgccgttacgagtgatgtatgcatgtatgtatgtactcgccaaatctatatgtggctgtgtgtgtgcgtgtgtttacttatatgaccgtatgtatgggcgtttgtttgccttttgttgttctcgttaattttattttggtttcgttttgcatgtttatgcatgcaagctcgatcgatttcgattgatgggtagccatgtggggcctgccagtgcgagagttctcaatccgttcatgtgtgtttgtgtcgcgagttccagtgtatgtgcgtgtgttggtgccaagtggaaccaaacaagtcagagagtggagcagtgttgccaacgttcgttaataaccgcattaaaaaagaagtcgcctttttttgctccccctccgcccctttgccagagaaaactcaagatacagatcgttctgcaaaagttttggttgccatggaagttcaagtccctctgtgtgcacttattttctcctaaaacactcaaacaatgatgcatttgcggcgaattccatagtttgccatttgttgcacaggtgcataataaagggttttataactttaatagtggtggctggcaaatagcctgttgtttacattctatcgaaacgtgttcaaaatcaactagtgcaaaatatgtaattacttttataagtagaacaacgtgtccctttaatagatatttttataaattttaaaactaattttaaataaaattagttgtttagccggaaaatgtgatcaaaagtaaaaggaactaaataaaggtaacaaaaaaaaaacaactaatgaataccattctagaaacatttatgttacatgtacatacatacacatgcaatgcttcattttcgggcgcttttccttcgagtgtcacatggacacaactttttaatgcagctcttttctgctttgaatgatttattcgctatttgtggcatgtaatcgcctgttggcaacactggccgcaagctcagtttcgtttttgtggagagaggagttaccgatataagtgtggagttggagagcggagattttccattcccgggaaagcaaaaagagcgcaagcgcgagcccgctatttatcagtaaatagagtgtgtgtatgtgtgtttactcacgtagtttccgcggcgagtagtagtagttgtgttattattattattatttttgttgttgcttcaatcggcgcttgtttttgttgccgaccgaggtatgtacatatgcatgtacatacataaatacagcggtgcaaaggtgtgattgtgtatgtgcggctgcggtagcaaaacagagtaaagcaaaaaccgaaacagcaacggtgtgacttagtgtgtgtgtgtgtgtgcgtgtgtatatttggaaaataatttgtggctgacgaaaagaagaaaccttgaggccaaagcgaaaagagagcgaaaggcgcgtgaaaagctaccaaaaaacaggaaaaaattgaggcacaatcagtgcgggaataaaacaacacagttctcaatgtgcaaagtcaataggtaaaaaactttaactgcaaactatgcaaaggcttggattcaaagaaaacaaataaatgtagatacccaaacaatcatggtgtttatatcatgttgtgcaattttagtgaaaagaacagataataatcaaagataagaatgtaataaataaatgagttatatttaaattcaatcacatttgaataacttttttaggtaatttatgtaatgatatcaacgtgaatatcaacatgaaaaagcgtgaaaaacgtggtacccatttcgtgaattgttattatttaccgctttgtttaagcaaagagttttgaaacaaacctattaacgaccattcatttcgatcattttgcaggccaacaacaacactaagcgagcataggacaagttaggcacttacctttcaatggccgccactaccacaacaacaaccacaacactagcaacaaccaccggcaatagcagctccacaaacaacagcagcagcaacaacaacaacagcatcgccagcagtcacaacaacaacaacaacattgttaccgtacacaccgtactgaacaacccacccaccaatactgcaggcggtggtgttgccgacgccgccaccgttgccattgccaaggacatgttgcagctgcatcatggcgcagcagcagcagcaacagcggcgctgaataactacaacaatagcagcaacaataacaacaacagcgccgatcagctgaccggcaacagcaacaattcagcaaaccacccacctgccaccagtagcaccaccaactcctcctcatcctccaccacctccgccaacaccaacaacccctctgccaatgcggcatcgacattaacatcatcttccccgccatatggagaactacgcttcaatcaggaggtactgcccatcacggatgccgtgacagtaatcggacgcaactcgtccacgtcgctggttcacttcaacgttgccgagaacaaccttgtgtcgcgcaaacactttcaggtgctctacgatgtggagctgcgagccttctttgtccagtgcctaagcaagaatggcatctttgtggatgatttcctgcagcgccgcaatgtggatccacttcgtttgccgcagcggtaggtataccaccaagggaatcgcgaagcaatatgaacattaatattaacttattgtttgactaaagaattctttccaatataccattttatgcacacttatctctaatgcaatgccccatattcatattgcagctgctacttccgcttcccgagcacggagattcgtatcgagttcgagagctatgtgcccgccacttcatcggatgcaattgacggtcattcgccatcgttagtcgttggtggtggtggtggagtagctggtggtggagcgcacgttattattacaccgctaccgagggacgaacttcaccagcagcaattgcatcaccaccagcaacagccgcatctgcagcaacagcagcatccacaccacccgccagcgcaccacctgccgttgcagcagcagcagcagcagcaacaaccggcgcaccacccgctcccgcacacaccacaccacccgctccaccacacagcactgcaccagcagcaacagcgtagtggcagcatcgttgtggcccctccagctggagcagctgcccacctaattgccggcgatggacccggcatatattcaccgctcaaaatatccatacccaagaaggagcagaagagcccctacctatcaccaactggcaagtggaatttcattctatataacatttgaatccttaaatgcggaccacattcagccgttttaaattgattacggagatttattaaactgttataaaaccgaattttctaattctaatgaaattgtttaattgtcatcgcaggtacaataagcgctgccaacagttgtccggctagtccacgtcagggtttcattcagaatcagcccaataattacaataactacggtaacaacaatacagtaagtgaaccactttagagatcgccataaactatatgcatactaacaaacaatgaacatttgcagcaggatctgttccagactccctccacagccagctacaatcacaacgagaagccgccgtatagctatgcccagctcatcgttcaggccatatctgccgcaccggacaagcagctaacgctctcgggcatttattcgtttatagtcaagcattacccgtattaccgcaaggagacgaacaagggctggcagaattccatacgtcataatctcagtttgaataggtaatgttgatcgatgctgggagtgatagtagaaattgtttcaattacacaatcgactttctgcaggtatttcatcaaggtggcccgctcccaggacgagcccggaaagggttccttctggcgtattgatccggacagcggtgccaagctgatcgaccatagctacaagaagcgtcgccagcgaagcagccagggcttccggcctccatacggtatgccccgctcggcgccagtctcgcccagtcacatgggtaagtgacaatcgtttgtcagaggcattgcatcatatatatatatatatgaactctttcctgtcttctccccacagataattcgcgcgagagctcaccgctccaagatattgtgttgcaatcagcacctggatcaccgggcatgtcgctggaacagcgagctgctgatcccggtatgttttgctcaatttaaatccgtttcattcaattccaaaatcgagttgttaaagtattgttctccaaacactcgacttgggaatagaactttgagaaagtcatctgattgtaatctttgggattatcttgcagaaattatttacaactcacaaaatgcacaccagcaacagcagcaacaacagcagcagcagcagcagcagacactgtcaaacaattccaatcagtacaggtgagcacaacattaaaatgattcattcaatgcgtgtcttaaacatttattttcgtattttccagtagtggcagtccgtactacgtaaccaatcaaagctctggagtggccacaccacagacgcatgtggaaggaagcgcagcgagcggcggcggcggaggcggcggggttggagctctgcttgcgctaaagaggaaccatgtgatgggcggcggggcatcgcagcatacgctgcatcagcagcaggccgtggcccagcaacagcattcagagattatctacgaggagttgccgaccgactacagcggccacattgaggccagcgaggaggagtgcgtcaccactgccaccgatgccaccgtggccaagcgacccaagtatgtgtcggaagtgctctgatgcgtgcggatccagaagcaccggcagaacaagggcaaatagtgaggcccatgggtgtaaacgattagaaagcaaaaacaaaaaagtatctccatcttgtatattgaatttgccaatcaaaaacctatacctaaaccccgaaatacaaatcaaattaaatagccacacacgcagaacttaaggaacatgaacgcacgcgaagagcaatgtatatgtaaattgatatggaacattttacaaatagcaactgtgagatgattgtgtttgaaatgttggccatgcagccgttcaacggcggcgacttatgcaagcacacattttgaaaattcgaaaacccgattcgaagtaacgactttatcccctagatctgacgaattcaatatgctcgatgacgctactctctaagtaatataataaattttaagtttacaacaaggtaaagcagcaaacaaagcaaaattatctagatatatgcgattgattattgtaatgattgatgattatgatgtttaagatgttatagctatgtgaccgaattgtgcgagaaacgtgaaaaaaaatttggggaaaattaagtaacaagcaagcaaaccacacaagtaacaaacaaacaaacaaacaggcgaatgaataatattacctatctacatacctttacctatatcgatttaaatataatatatatatatatgtgtatatatatatatgtatatctatattaatatatatacaaattattaaaatacaaacaaaaacaaaaatgatgaaaataaataagtaatatctacaaatttacggatacaataacaatatataaagattgaaatgatagcacattatttcttattaatgaagaaaatcccatttaagtgtttggacaaattgtgtattaaaaaaaaaaacaaaaatcaaatgtaaactttcttgtttcaatttgttaatatttacctgctttaattgaattagatagatgaatgaatactagttgatactagtcaac

SEQ ID NO: 26714 - DNA, 2404 bp, DROSOPHILA
cagagtgagcggaaaatcagcttaaccagctaaatggcatataaataaatataaggtttttattttggaacacgctcatccaacacacatgcacacgcgcatacacgcacgcacacacacaggagtaaaggccaacaacaacactaagcgagcataggacaagttaggcacttacctttcaatggccgccactaccacaacaacaaccacaacactagcaacaaccaccggcaatagcagctccacaaacaacagcagcagcaacaacaacaacagcatcgccagcagtcacaacaacaacaacaacattgttaccgtacacaccgtactgaacaacccacccaccaatactgcaggcggtggtgttgccgacgccgccaccgttgccattgccaaggacatgttgcagctgcatcatggcgcagcagcagcagcaacagcggcgctgaataactacaacaatagcagcaacaataacaacaacagcgccgatcagctgaccggcaacagcaacaattcagcaaaccacccacctgccaccagtagcaccaccaactcctcctcatcctccaccacctccgccaacaccaacaacccctctgccaatgcggcatcgacattaacatcatcttccccgccatatggagaactacgcttcaatcaggaggtactgcccatcacggatgccgtgacagtaatcggacgcaactcgtccacgtcgctggttcacttcaacgttgccgagaacaaccttgtgtcgcgcaaacactttcaggtgctctacgatgtggagctgcgagccttctttgtccagtgcctaagcaagaatggcatctttgtggatgatttcctgcagcgccgcaatgtggatccacttcgtttgccgcagcgctgctacttccgcttcccgagcacggagattcgtatcgagttcgagagctatgtgcccgccacttcatcggatgcaattgacggtcattcgccatcgttagtcgttggtggtggtggtggagtagctggtggtggagcgcacgttattattacaccgctaccgagggacgaacttcaccagcagcaattgcatcaccaccagcaacagccgcatctgcagcaacagcagcatccacaccacccgccagcgcaccacctgccgttgcagcagcagcagcagcagcaacaaccggcgcaccacccgctcccgcacacaccacaccacccgctccaccacacagcactgcaccagcagcaacagcgtagtggcagcatcgttgtggcccctccagctggagcagctgcccacctaattgccggcgatggacccggcatatattcaccgctcaaaatatccatacccaagaaggagcagaagagcccctacctatcaccaactggcaattgtccggctagtccacgtcagggtttcattcagaatcagcccaataattacaataactacggtaacaacaatacacaggatctgttccagactccctccacagccagctacaatcacaacgagaagccgccgtatagctatgcccagctcatcgttcaggccatatctgccgcaccggacaagcagctaacgctctcgggcatttattcgtttatagtcaagcattacccgtattaccgcaaggagacgaacaagggctggcagaattccatacgtcataatctcagtttgaataggtatttcatcaaggtggcccgctcccaggacgagcccggaaagggttccttctggcgtattgatccggacagcggtgccaagctgatcgaccatagctacaagaagcgtcgccagcgaagcagccagggcttccggcctccatacggtatgccccgctcggcgccagtctcgcccagtcacatggataattcgcgcgagagctcaccgctccaagatattgtgttgcaatcagcacctggatcaccgggcatgtcgctggaacagcgagctgctgatcccgaaattatttacaactcacaaaatgcacaccagcaacagcagcaacaacagcagcagcagcagcagcagacactgtcaaacaattccaatcagtacagtagtggcagtccgtactacgtaaccaatcaaagctctggagtggccacaccacagacgcatgtggaaggaagcgcagcgagcggcggcggcggaggcggcggggttggagctctgcttgcgctaaagaggaaccatgtgatgggcggcggggcatcgcagcatacgctgcatcagcagcaggccgtggcccagcaacagcattcagagattatctacgaggagttgccgaccgactacagcggccacattgaggccagcgaggaggagtgcgtcaccactgccaccgatgccaccgtggccaagcgacccaagtatgtgtcggaagtgctctga

SEQ ID NO: 26715 - protein, 740 aa, DROSOPHILA; identical to SEQ ID NO: 24522

SEQ ID NO: 26716 - DNA, 7674 bp, DROSOPHILA
gtgcgctggaaggcgaactcccgcttcgagggcagctgcaccaccaccttttcgtcgaacttgcgcagaatggtgccgaaggtgccggcggcatggatcaggtggcacatctggccggggttcttctccagacagtgaatgcgtgtgcccacgggcaaggcgcccaatggataggcatcgccttcgttgggacgcactatgggatcatacaaaaaaaaaaaattatattggcataactggttgtttcagagccagtaaaatttctagattccatgctcagtttaagactatactcagaggattacttagaaaacgtttaatactcccgatgagtaacagtaagtaaatttacccggaatcctaggaataaagcgcgaggtcttgaggatatcgccagccttcatgttctcggtggccaggatgtacttcagctcatcgccgacggcaaccagggccactttggcggtgcgacagccatcgcgtagcacctcgagtaccagttcctcctgggcgccctccgtgggaccatcccgcacccatttaacccagcgatactgctgtttgatgcctccgccaatgcccttggccaccaagcgaccggagacgggatcccgaccagccaaatgggtgatcttcagcggctcaacggtgtacttctccggaaagtgcacggttcgtcggaattgctgtccggcaccaggttttggtttctccaccactttggttttgccgcgcaattgctgcagaaacgccggcgccgtgcgaaacggcgtttgtatagtcagcgttgtgctcagcaaacgtgttacactttgcattttcgatagttttatttgaaaaattaaatagaacgaaaatatatgcaaactgttacaaaatcgaaatgcggctgaaaacagctgttacgcggcgttgccagaccacgaacgggccatgcctgatttcgggcgctagcgttgccagcattttgctcgaactgatctcttcttcttctccttcaccgcgctgaagcaataagaatcgggaaaaccgcattaaaatcgctgaaaaagtgcacaaatcggctttaaattattgcccaattactagtgttacgtgcatatcgagagatttcataaattgcaacagccaacgattttttccaacaaggtacgcaaaataataaaaataaacaagacgaacagaaaaataatatacacacacaaacacgcagcgaaaaacgtgttgtgtgcaaaaaaaaaagactgaaaaaaaagaacaacaaaaacagttcgagtttgataaccaacggcgaaaatataaacagcaaaagagagagcgagaattagtagtaataaaaatcaatagcagagtgagcggaaaatcagcttaaccagctaaatggcatataaataaatataaggtttttattttggaacacgctcatccaacacacatgcacacgcgcatacacgcacgcacacacacaggagtaaaggtatgggtggcctcaagtgtgtgtacatattttgatgttaggtgggaaaaaagcgggcggcaagtttacgcaatcgccgagcgaaaagcaaagagcagcagctatacgttgtgaaaagtgtgctttttgtgtgtttacaaagagacaaacaagacatccgtcgtttgtatgtacgtgcctatgtatgtatgcgcaggtggagtcggttgctagctgaaaaatcaacgagcggcattttttacgcatttccaatacgccacatacatatatacgtgcgtcgtttgcgcgtgtgtgtgtgtggttgtgtgtattttggtgtttttatttatttattgtgcttctctttcgtcgtttgccgttacgagtgatgtatgcatgtatgtatgtactcgccaaatctatatgtggctgtgtgtgtgcgtgtgtttacttatatgaccgtatgtatgggcgtttgtttgccttttgttgttctcgttaattttattttggtttcgttttgcatgtttatgcatgcaagctcgatcgatttcgattgatgggtagccatgtggggcctgccagtgcgagagttctcaatccgttcatgtgtgtttgtgtcgcgagttccagtgtatgtgcgtgtgttggtgccaagtggaaccaaacaagtcagagagtggagcagtgttgccaacgttcgttaataaccgcattaaaaaagaagtcgcctttttttgctccccctccgcccctttgccagagaaaactcaagatacagatcgttctgcaaaagttttggttgccatggaagttcaagtccctctgtgtgcacttattttctcctaaaacactcaaacaatgatgcatttgcggcgaattccatagtttgccatttgttgcacaggtgcataataaagggttttataactttaatagtggtggctggcaaatagcctgttgtttacattctatcgaaacgtgttcaaaatcaactagtgcaaaatatgtaattacttttataagtagaacaacgtgtccctttaatagatatttttataaattttaaaactaattttaaataaaattagttgtttagccggaaaatgtgatcaaaagtaaaaggaactaaataaaggtaacaaaaaaaaaacaactaatgaataccattctagaaacatttatgttacatgtacatacatacacatgcaatgcttcattttcgggcgcttttccttcgagtgtcacatggacacaactttttaatgcagctcttttctgctttgaatgatttattcgctatttgtggcatgtaatcgcctgttggcaacactggccgcaagctcagtttcgtttttgtggagagaggagttaccgatataagtgtggagttggagagcggagattttccattcccgggaaagcaaaaagagcgcaagcgcgagcccgctatttatcagtaaatagagtgtgtgtatgtgtgtttactcacgtagtttccgcggcgagtagtagtagttgtgttattattattattatttttgttgttgcttcaatcggcgcttgtttttgttgccgaccgaggtatgtacatatgcatgtacatacataaatacagcggtgcaaaggtgtgattgtgtatgtgcggctgcggtagcaaaacagagtaaagcaaaaaccgaaacagcaacggtgtgacttagtgtgtgtgtgtgtgtgcgtgtgtatatttggaaaataatttgtggctgacgaaaagaagaaaccttgaggccaaagcgaaaagagagcgaaaggcgcgtgaaaagctaccaaaaaacaggaaaaaattgaggcacaatcagtgcgggaataaaacaacacagttctcaatgtgcaaagtcaataggtaaaaaactttaactgcaaactatgcaaaggcttggattcaaagaaaacaaataaatgtagatacccaaacaatcatggtgtttatatcatgttgtgcaattttagtgaaaagaacagataataatcaaagataagaatgtaataaataaatgagttatatttaaattcaatcacatttgaataacttttttaggtaatttatgtaatgatatcaacgtgaatatcaacatgaaaaagcgtgaaaaacgtggtacccatttcgtgaattgttattatttaccgctttgtttaagcaaagagttttgaaacaaacctattaacgaccattcatttcgatcattttgcaggccaacaacaacactaagcgagcataggacaagttaggcacttacctttcaatggccgccactaccacaacaacaaccacaacactagcaacaaccaccggcaatagcagctccacaaacaacagcagcagcaacaacaacaacagcatcgccagcagtcacaacaacaacaacaacattgttaccgtacacaccgtactgaacaacccacccaccaatactgcaggcggtggtgttgccgacgccgccaccgttgccattgccaaggacatgttgcagctgcatcatggcgcagcagcagcagcaacagcggcgctgaataactacaacaatagcagcaacaataacaacaacagcgccgatcagctgaccggcaacagcaacaattcagcaaaccacccacctgccaccagtagcaccaccaactcctcctcatcctccaccacctccgccaacaccaacaacccctctgccaatgcggcatcgacattaacatcatcttccccgccatatggagaactacgcttcaatcaggaggtactgcccatcacggatgccgtgacagtaatcggacgcaactcgtccacgtcgctggttcacttcaacgttgccgagaacaaccttgtgtcgcgcaaacactttcaggtgctctacgatgtggagctgcgagccttctttgtccagtgcctaagcaagaatggcatctttgtggatgatttcctgcagcgccgcaatgtggatccacttcgtttgccgcagcggtaggtataccaccaagggaatcgcgaagcaatatgaacattaatattaacttattgtttgactaaagaattctttccaatataccattttatgcacacttatctctaatgcaatgccccatattcatattgcagctgctacttccgcttcccgagcacggagattcgtatcgagttcgagagctatgtgcccgccacttcatcggatgcaattgacggtcattcgccatcgttagtcgttggtggtggtggtggagtagctggtggtggagcgcacgttattattacaccgctaccgagggacgaacttcaccagcagcaattgcatcaccaccagcaacagccgcatctgcagcaacagcagcatccacaccacccgccagcgcaccacctgccgttgcagcagcagcagcagcagcaacaaccggcgcaccacccgctcccgcacacaccacaccacccgctccaccacacagcactgcaccagcagcaacagcgtagtggcagcatcgttgtggcccctccagctggagcagctgcccacctaattgccggcgatggacccggcatatattcaccgctcaaaatatccatacccaagaaggagcagaagagcccctacctatcaccaactggcaagtggaatttcattctatataacatttgaatccttaaatgcggaccacattcagccgttttaaattgattacggagatttattaaactgttataaaaccgaattttctaattctaatgaaattgtttaattgtcatcgcaggtacaataagcgctgccaacagttgtccggctagtccacgtcagggtttcattcagaatcagcccaataattacaataactacggtaacaacaatacagtaagtgaaccactttagagatcgccataaactatatgcatactaacaaacaatgaacatttgcagcaggatctgttccagactccctccacagccagctacaatcacaacgagaagccgccgtatagctatgcccagctcatcgttcaggccatatctgccgcaccggacaagcagctaacgctctcgggcatttattcgtttatagtcaagcattacccgtattaccgcaaggagacgaacaagggctggcagaattccatacgtcataatctcagtttgaataggtaatgttgatcgatgctgggagtgatagtagaaattgtttcaattacacaatcgactttctgcaggtatttcatcaaggtggcccgctcccaggacgagcccggaaagggttccttctggcgtattgatccggacagcggtgccaagctgatcgaccatagctacaagaagcgtcgccagcgaagcagccagggcttccggcctccatacggtatgccccgctcggcgccagtctcgcccagtcacatgggtaagtgacaatcgtttgtcagaggcattgcatcatatatatatatatatgaactctttcctgtcttctccccacagataattcgcgcgagagctcaccgctccaagatattgtgttgcaatcagcacctggatcaccgggcatgtcgctggaacagcgagctgctgatcccggtatgttttgctcaatttaaatccgtttcattcaattccaaaatcgagttgttaaagtattgttctccaaacactcgacttgggaatagaactttgagaaagtcatctgattgtaatctttgggattatcttgcagaaattatttacaactcacaaaatgcacaccagcaacagcagcaacaacagcagcagcagcagcagcagacactgtcaaacaattccaatcagtacaggtgagcacaacattaaaatgattcattcaatgcgtgtcttaaacatttattttcgtattttccagtagtggcagtccgtactacgtaaccaatcaaagctctggagtggccacaccacagacgcatgtggaaggaagcgcagcgagcggcggcggcggaggcggcggggttggagctctgcttgcgctaaagaggaaccatgtgatgggcggcggggcatcgcagcatacgctgcatcagcagcaggccgtggcccagcaacagcattcagagattatctacgaggagttgccgaccgactacagcggccacattgaggccagcgaggaggagtgcgtcaccactgccaccgatgccaccgtggccaagcgacccaagtatgtgtcggaagtgctctgatgcgtgcggatccagaagcaccggcagaacaagggcaaatagtgaggcccatgggtgtaaacgattagaaagcaaaaacaaaaaagtatctccatcttgtatattgaatttgccaatcaaaaacctatacctaaaccccgaaatacaaatcaaattaaatagccacacacgcagaacttaaggaacatgaacgcacgcgaagagcaatgtatatgtaaattgatatggaacattttacaaatagcaactgtgagatgattgtgtttgaaatgttggccatgcagccgttcaacggcggcgacttatgcaagcacacattttgaaaattcgaaaacccgattcgaagtaacgactttatcccctagatctgacgaattcaatatgctcgatgacgctactctctaagtaatataataaattttaagtttacaacaaggtaaagcagcaaacaaagcaaaattatctagatatatgcgattgattattgtaatgattgatgattatgatgtttaagatgttatagctatgtgaccgaattgtgcgagaaacgtgaaaaaaaatttggggaaaattaagtaacaagcaagcaaaccacacaagtaacaaacaaacaaacaaacaggcgaatgaataatattacctatctacatacctttacctatatcgatttaaatataatatatatatatatgtgtatatatatatatgtatatctatattaatatatatacaaattattaaaatacaaacaaaaacaaaaatgatgaaaataaataagtaatatctacaaatttacggatacaataacaatatataaagattgaaatgatagcacattatttcttattaatgaagaaaatcccatttaagtgtttggacaaattgtgtattaaaaaaaaaaacaaaaatcaaatgtaaactttcttgtttcaatttgttaatatttacctgctttaattgaattagatagatgaatgaatactagttgatactagtcaac

SEQ ID NO: 26717 - DNA, 2423 bp, DROSOPHILA
ccgcgctgaagcaataagaatcgggaaaaccgcattaaaatcgctgaaaaagtgcacaaatcggctttaaattattgcccaattactagtgttacgtgcatatcgagagatttcataaattgcaacagccaacgattttttccaacaaggccaacaacaacactaagcgagcataggacaagttaggcacttacctttcaatggccgccactaccacaacaacaaccacaacactagcaacaaccaccggcaatagcagctccacaaacaacagcagcagcaacaacaacaacagcatcgccagcagtcacaacaacaacaacaacattgttaccgtacacaccgtactgaacaacccacccaccaatactgcaggcggtggtgttgccgacgccgccaccgttgccattgccaaggacatgttgcagctgcatcatggcgcagcagcagcagcaacagcggcgctgaataactacaacaatagcagcaacaataacaacaacagcgccgatcagctgaccggcaacagcaacaattcagcaaaccacccacctgccaccagtagcaccaccaactcctcctcatcctccaccacctccgccaacaccaacaacccctctgccaatgcggcatcgacattaacatcatcttccccgccatatggagaactacgcttcaatcaggaggtactgcccatcacggatgccgtgacagtaatcggacgcaactcgtccacgtcgctggttcacttcaacgttgccgagaacaaccttgtgtcgcgcaaacactttcaggtgctctacgatgtggagctgcgagccttctttgtccagtgcctaagcaagaatggcatctttgtggatgatttcctgcagcgccgcaatgtggatccacttcgtttgccgcagcgctgctacttccgcttcccgagcacggagattcgtatcgagttcgagagctatgtgcccgccacttcatcggatgcaattgacggtcattcgccatcgttagtcgttggtggtggtggtggagtagctggtggtggagcgcacgttattattacaccgctaccgagggacgaacttcaccagcagcaattgcatcaccaccagcaacagccgcatctgcagcaacagcagcatccacaccacccgccagcgcaccacctgccgttgcagcagcagcagcagcagcaacaaccggcgcaccacccgctcccgcacacaccacaccacccgctccaccacacagcactgcaccagcagcaacagcgtagtggcagcatcgttgtggcccctccagctggagcagctgcccacctaattgccggcgatggacccggcatatattcaccgctcaaaatatccatacccaagaaggagcagaagagcccctacctatcaccaactggcaattgtccggctagtccacgtcagggtttcattcagaatcagcccaataattacaataactacggtaacaacaatacacaggatctgttccagactccctccacagccagctacaatcacaacgagaagccgccgtatagctatgcccagctcatcgttcaggccatatctgccgcaccggacaagcagctaacgctctcgggcatttattcgtttatagtcaagcattacccgtattaccgcaaggagacgaacaagggctggcagaattccatacgtcataatctcagtttgaataggtatttcatcaaggtggcccgctcccaggacgagcccggaaagggttccttctggcgtattgatccggacagcggtgccaagctgatcgaccatagctacaagaagcgtcgccagcgaagcagccagggcttccggcctccatacggtatgccccgctcggcgccagtctcgcccagtcacatggataattcgcgcgagagctcaccgctccaagatattgtgttgcaatcagcacctggatcaccgggcatgtcgctggaacagcgagctgctgatcccgaaattatttacaactcacaaaatgcacaccagcaacagcagcaacaacagcagcagcagcagcagcagacactgtcaaacaattccaatcagtacagtagtggcagtccgtactacgtaaccaatcaaagctctggagtggccacaccacagacgcatgtggaaggaagcgcagcgagcggcggcggcggaggcggcggggttggagctctgcttgcgctaaagaggaaccatgtgatgggcggcggggcatcgcagcatacgctgcatcagcagcaggccgtggcccagcaacagcattcagagattatctacgaggagttgccgaccgactacagcggccacattgaggccagcgaggaggagtgcgtcaccactgccaccgatgccaccgtggccaagcgacccaagtatgtgtcggaagtgctctga

SEQ ID NO: 26718 - protein, 740 aa, DROSOPHILA; identical to SEQ ID NO: 24522

SEQ ID NO: 26719 - DNA, 3857 bp, DROSOPHILA
gttggggatccgctgggggaatcgggatgcagctggagctggagctgaagctgacggagaaaagcaggaagaaccgcacttgtatgttcattcgcatgttgacgatatgcagcataaatggatgaagttgcggatctggcctgaccaggcgagagatgaaccttgggctagcaaagattattccactgcaattcaggccaactgccaatggccaatggccaatggccagtttccccgcgtggcactcatagacaactcttatttatgaccgccaattgaaatcgattcgtgcgataaacgcacttaaatgttgcaatatgggtagcaagaactgggtagaccactttgctatacttttctttaagctccaattaacaatcgcttatttcttaattttaagttcacttcacagcaagatgaaactcaatggctgaaagaattcgcttccaagtgcagcagttaccattaaatttctacgaaatcttgccgaggcatgaaaccatttctctaatccttcccaagatgaatctcacgggtccaccacgatacacatacgagtatatcatagttaaagtgctgtatttactatatcagtaaacacttttgtttgccatccgcgtctctgtaatgtttacttatttgcctttcgcctttttccgagttagaaagcggcaaacatgcaaaatttatttataaacattgacattgctatgaatgtgtggctatatgtatgtatgtatatacgttccaacttgagtaaacaaaacggcgaaacgagaatcatcacgagggctgagaaattctttataaatcaaggcatcaaagaagtcggtttcttaatctgcttagcgcagccagggaggaaaatgaaagtattgttatgaccattgtggagcacactcattgcttcttaaaattattatcctccatttttattatatacagaagttaaaaaccgaaattaaattccgaaattggaatgatggggtagacgagtgagttagttcaaaagttcagcctgcaattgcgttatcattgaaaatatctggcgtctagactggatgacgaatgtggaaagtgttttccctcctatatgattttataaaatgcgttttggttttgtgagtatagagcaacagcaaggagagtagtataatttctttttctattcgtgttagagtatttaaacattggttttactcactcttaagcgattgtccatcactgtccatactctggctccgtagtcattggaggtgcccaggatgtaggcgcctgtcgaatcgaaatctacggagttaatcccagcactgctcccgcttagaacggcacgtggttcggtggaatctaaaacggcatcattcaaaatagttgcatatatatatgattatttataggtgtaataaacaacgtgcgactgctgactcacttttgccaatgtcccaaagtttgactttgcgatcagcgccaccggtggccaccatgcgctccacgggactccagcgcaccgcgtgcgactcgttctcgtgggcctcgaacttcatgaggatcttggtgggattggcctggcccaggtagcccgtggccttcagggtgtcgatggaagcccgcgagttctcggcgatttcgcctgctgtaaaacgagcgctaatatattcattatcatcgagacctatggcctccatggcgccatttatcgcggcctcgtcgaaatcctcgtcgccgatgaggccgccaacgaactgggcgggactggagttgcgctgcaaggatgcggcgccgggcgaggaggcggcgttgctggacgaactgggctcacgaaccgcgtcttctaggtcacgtttcagtttagccgaacgtttcctgaaaattgacggcagtctttttctagatatgtttaaaaacggttatacatttatattaaaccaaataaaaggaacaaatcagaatgagtgacacagtcgattagattcgtctaaatggtccgttctactccttggcgacttgttaagtagttagtaagacatatgtatgtaggtcaatattgattacatgcattcgtgtagtttccgtaaacctttgcgatttggtagttcccgtgctccgtatttttcggttaacttgcttgcatgacgttgggtgggtgggcaataagtggtttattaacacaactggatgggtgatcagcggtcgggtggatgggcactgcaatctctaatcgggagttaagataataacctagtatacatgccctaaaactcaacgaagctacaaaggattctgacgtttcctgattaattaaatattcggatatttacagaatcaatatcattgttaaaacttccttctaagtgttttttttttagtaggtaatgacttaaaatatttattcaaatgatcctgtttgcagttcgtaatgatttatttgtctggtgaaacatcaaagcaaaaagctatttgatcaacagaaactccatttatttggtgtgtatttgtcaatggtttacatggaatttttatcactcttttataagcattagataagccgcgcgattaaccattttatgtgtatctgcgtacctagtacctatctagttacgaaaatgcatttatatacatgtacattaatgatcgaagagataagtaatataagttatgtttttcatgataatagggtcacaatggtatcatactgaatggaacgtacctaattatgctctcgttttcctcgttcaacttgtcggcatcctttgacttgtattgcataagtcgctccagtagacgccgattttcatcctgtgaattgtaagagaacgaaaagctttttaatagacgctttttcatattggggatatatgcaaatctctggcgccgtcgtgtttttcgtgttttccgcgttgaacgctaatatgctactggatcgaaatcggaaagatagcaagcttttcgcgtctgtagacggcgaggcatagcgattcgagccatctgcaatgtatttatcgaaccgaccccataccatagaaatagacctgctcaatgggactcggaagcctcgataagtaccaataaaatgatattctatacgctattttgaataaacagttttgaggatttaattagcgatcaatgagtaacacacagttgatcagcaaaaaatcccgttcgggatttgtctatcgttgtggtttaagtgcttttattaaatggcctataaacaataattaatggtcttatattctgacaacttttaaatagagaaatatagagaatagcgaatccccggtcatttcgttgggtcactgaatacttcaacttacaagaatttaatttactttcccaatttatacgctacgaagaatttactttatgtactgctcatagacaaatgaaacaaagccgttctggttcagtagtagtaataaggtgttaataatctggacaacttacttgcactccccttaacttctcctcgagggagctaaatgccaattgaagcgccgtatgttcgtccagcattgtgttgttcagcttcttgagttcctccaaactcgagtgaagtagctgcacctccgcgcgcaatcggttgttgttcgtttgctgttcgacgaggctaaaataaatatatgtattagtaggcattttcatttgtaatctcgccgagattaaggtttatgcttcaaataattagtcattctctacgcagcagaatcttaattgaatttaaaaatcaagggtgcgataaacaaatggttgtatgggctattaaaatcacaaaagggtttttccgagttctcttccgtaaatcgtcattctaggtaccatttgcttgaaacttttttggcggattcgaaatgcgg

SEQ ID NO: 26720 - DNA, 745 bp, DROSOPHILA
atatatccccaatatgaaaaagcgtctattaaaaagcttttcgttctcttacaattcacaggatgaaaatcggcgtctactggagcgacttatgcaatacaagtcaaaggatgccgacaagttgaacgaggaaaacgagagcataattaggaaacgttcggctaaactgaaacgtgacctagaagacgcggttcgtgagcccagttcgtccagcaacgccgcctcctcgcccggcgccgcatccttgcagcgcaactccagtcccgcccagttcgttggcggcctcatcggcgacgaggatttcgacgaggccgcgataaatggcgccatggaggccataggtctcgatgataatgaatatattagcgctcgttttacagcaggcgaaatcgccgagaactcgcgggcttccatcgacaccctgaaggccacgggctacctgggccaggccaatcccaccaagatcctcatgaagttcgaggcccacgagaacgagtcgcacgcggtgcgctggagtcccgtggagcgcatggtggccaccggtggcgctgatcgcaaagtcaaactttgggacattggcaaaaattccaccgaaccacgtgccgttctaagcgggagcagtgctgggattaactccgtagatttcgattcgacaggcgcctacatcctgggcacctccaatgactacggagccagagtatggacagtgatggacaatcgcttaagagctgaacttttgaactaa

SEQ ID NO: 26721 - protein, 243 aa, DROSOPHILA
MKKRLLKSFSFSYNSQDENRRLLERLMQYKSKDADKLNEENESIIRKRSAKLKRDLEDAVREPSSSSNAASSPGAASLQRNSSPAQFVGGLIGDEDFDEAAINGAMEAIGLDDNEYISARFTAGEIAENSRASIDTLKATGYLGQANPTKILMKFEAHENESHAVRWSPVERMVATGGADRKVKLWDIGKNSTEPRAVLSGSSAGINSVDFDSTGAYILGTSNDYGARVWTVMDNRLRAELLN

SEQ ID NO: 26722 - DNA, 4407 bp, DROSOPHILA
gttggggatccgctgggggaatcgggatgcagctggagctggagctgaagctgacggagaaaagcaggaagaaccgcacttgtatgttcattcgcatgttgacgatatgcagcataaatggatgaagttgcggatctggcctgaccaggcgagagatgaaccttgggctagcaaagattattccactgcaattcaggccaactgccaatggccaatggccaatggccagtttccccgcgtggcactcatagacaactcttatttatgaccgccaattgaaatcgattcgtgcgataaacgcacttaaatgttgcaatatgggtagcaagaactgggtagaccactttgctatacttttctttaagctccaattaacaatcgcttatttcttaattttaagttcacttcacagcaagatgaaactcaatggctgaaagaattcgcttccaagtgcagcagttaccattaaatttctacgaaatcttgccgaggcatgaaaccatttctctaatccttcccaagatgaatctcacgggtccaccacgatacacatacgagtatatcatagttaaagtgctgtatttactatatcagtaaacacttttgtttgccatccgcgtctctgtaatgtttacttatttgcctttcgcctttttccgagttagaaagcggcaaacatgcaaaatttatttataaacattgacattgctatgaatgtgtggctatatgtatgtatgtatatacgttccaacttgagtaaacaaaacggcgaaacgagaatcatcacgagggctgagaaattctttataaatcaaggcatcaaagaagtcggtttcttaatctgcttagcgcagccagggaggaaaatgaaagtattgttatgaccattgtggagcacactcattgcttcttaaaattattatcctccatttttattatatacagaagttaaaaaccgaaattaaattccgaaattggaatgatggggtagacgagtgagttagttcaaaagttcagcctgcaattgcgttatcattgaaaatatctggcgtctagactggatgacgaatgtggaaagtgttttccctcctatatgattttataaaatgcgttttggttttgtgagtatagagcaacagcaaggagagtagtataatttctttttctattcgtgttagagtatttaaacattggttttactcactcttaagcgattgtccatcactgtccatactctggctccgtagtcattggaggtgcccaggatgtaggcgcctgtcgaatcgaaatctacggagttaatcccagcactgctcccgcttagaacggcacgtggttcggtggaatctaaaacggcatcattcaaaatagttgcatatatatatgattatttataggtgtaataaacaacgtgcgactgctgactcacttttgccaatgtcccaaagtttgactttgcgatcagcgccaccggtggccaccatgcgctccacgggactccagcgcaccgcgtgcgactcgttctcgtgggcctcgaacttcatgaggatcttggtgggattggcctggcccaggtagcccgtggccttcagggtgtcgatggaagcccgcgagttctcggcgatttcgcctgctgtaaaacgagcgctaatatattcattatcatcgagacctatggcctccatggcgccatttatcgcggcctcgtcgaaatcctcgtcgccgatgaggccgccaacgaactgggcgggactggagttgcgctgcaaggatgcggcgccgggcgaggaggcggcgttgctggacgaactgggctcacgaaccgcgtcttctaggtcacgtttcagtttagccgaacgtttcctgaaaattgacggcagtctttttctagatatgtttaaaaacggttatacatttatattaaaccaaataaaaggaacaaatcagaatgagtgacacagtcgattagattcgtctaaatggtccgttctactccttggcgacttgttaagtagttagtaagacatatgtatgtaggtcaatattgattacatgcattcgtgtagtttccgtaaacctttgcgatttggtagttcccgtgctccgtatttttcggttaacttgcttgcatgacgttgggtgggtgggcaataagtggtttattaacacaactggatgggtgatcagcggtcgggtggatgggcactgcaatctctaatcgggagttaagataataacctagtatacatgccctaaaactcaacgaagctacaaaggattctgacgtttcctgattaattaaatattcggatatttacagaatcaatatcattgttaaaacttccttctaagtgttttttttttagtaggtaatgacttaaaatatttattcaaatgatcctgtttgcagttcgtaatgatttatttgtctggtgaaacatcaaagcaaaaagctatttgatcaacagaaactccatttatttggtgtgtatttgtcaatggtttacatggaatttttatcactcttttataagcattagataagccgcgcgattaaccattttatgtgtatctgcgtacctagtacctatctagttacgaaaatgcatttatatacatgtacattaatgatcgaagagataagtaatataagttatgtttttcatgataatagggtcacaatggtatcatactgaatggaacgtacctaattatgctctcgttttcctcgttcaacttgtcggcatcctttgacttgtattgcataagtcgctccagtagacgccgattttcatcctgtgaattgtaagagaacgaaaagctttttaatagacgctttttcatattggggatatatgcaaatctctggcgccgtcgtgtttttcgtgttttccgcgttgaacgctaatatgctactggatcgaaatcggaaagatagcaagcttttcgcgtctgtagacggcgaggcatagcgattcgagccatctgcaatgtatttatcgaaccgaccccataccatagaaatagacctgctcaatgggactcggaagcctcgataagtaccaataaaatgatattctatacgctattttgaataaacagttttgaggatttaattagcgatcaatgagtaacacacagttgatcagcaaaaaatcccgttcgggatttgtctatcgttgtggtttaagtgcttttattaaatggcctataaacaataattaatggtcttatattctgacaacttttaaatagagaaatatagagaatagcgaatccccggtcatttcgttgggtcactgaatacttcaacttacaagaatttaatttactttcccaatttatacgctacgaagaatttactttatgtactgctcatagacaaatgaaacaaagccgttctggttcagtagtagtaataaggtgttaataatctggacaacttacttgcactccccttaacttctcctcgagggagctaaatgccaattgaagcgccgtatgttcgtccagcattgtgttgttcagcttcttgagttcctccaaactcgagtgaagtagctgcacctccgcgcgcaatcggttgttgttcgtttgctgttcgacgaggctaaaataaatatatgtattagtaggcattttcatttgtaatctcgccgagattaaggtttatgcttcaaataattagtcattctctacgcagcagaatcttaattgaatttaaaaatcaagggtgcgataaacaaatggttgtatgggctattaaaatcacaaaagggtttttccgagttctcttccgtaaatcgtcattctaggtaccatttgcttgaaacttttttggcggattcgaaatgcggaacaccctggacagctacctgtgctccttctcggaaattatgatcctctgctgctcgaccttctggttgaggtccacgatcatctgggagttctcgcccttgcgcttgtgtagctctgtgagctcctcctgctggctgagcagcttcttttcgagggtggcgatagccacgttggagccggtgccacctgttgacaccgcgttgcggagctgctcgttttcgacggagatcttcaggttgtccgccttcagttgcgccacatggtcaatcagtcggttgtctgcaagagacgcgggcaattaatgcgtgtgaccatgaagttctgagtctattcggatcggaggttaactggtgcgatgcggggccagccaactggaacttcgctggagacccagatgcttactttgctcgatgatctccttgaagttgtcgcactccttgcgatttcgctcgcgtaagcgccgcacgacgtgcgctcgccacacatgctcctccgtagacatgtttttattgggtttctgcccggaatttctgggtgctccgtactggg

SEQ ID NO: 26723 - DNA, 774 bp, DROSOPHILA
aaccagaacggctttgtttcatttgtctatgagcagtacataaagtaaattcttcgtagcgtataaattgggaaagtaaattaaattcttgatgaaaatcggcgtctactggagcgacttatgcaatacaagtcaaaggatgccgacaagttgaacgaggaaaacgagagcataattaggaaacgttcggctaaactgaaacgtgacctagaagacgcggttcgtgagcccagttcgtccagcaacgccgcctcctcgcccggcgccgcatccttgcagcgcaactccagtcccgcccagttcgttggcggcctcatcggcgacgaggatttcgacgaggccgcgataaatggcgccatggaggccataggtctcgatgataatgaatatattagcgctcgttttacagcaggcgaaatcgccgagaactcgcgggcttccatcgacaccctgaaggccacgggctacctgggccaggccaatcccaccaagatcctcatgaagttcgaggcccacgagaacgagtcgcacgcggtgcgctggagtcccgtggagcgcatggtggccaccggtggcgctgatcgcaaagtcaaactttgggacattggcaaaaattccaccgaaccacgtgccgttctaagcgggagcagtgctgggattaactccgtagatttcgattcgacaggcgcctacatcctgggcacctccaatgactacggagccagagtatggacagtgatggacaatcgcttaagagctgaacttttgaactaa

SEQ ID NO: 26724 - protein, 217 aa, DROSOPHILA
MQYKSKDADKLNEENESIIRKRSAKLKRDLEDAVREPSSSSNAASSPGAASLQRNSSPAQFVGGLIGDEDFDEAAINGAMEAIGLDDNEYISARFTAGEIAENSRASIDTLKATGYLGQANPTKILMKFEAHENESHAVRWSPVERMVATGGADRKVKLWDIGKNSTEPRAVLSGSSAGINSVDFDSTGAYILGTSNDYGARVWTVMDNRLRAELLN

SEQ ID NO: 26725 - DNA, 4612 bp, DROSOPHILA
gcatcaagcaccagaacagcaaccactaccagaacggcgcctacaacatagacccaactgggcccaacaacatggcccatgccaagaacaatgcctacagcaccatgggcaggcggggaaacaccttcggcgacgtgggattgctcaatggcaacggggagctgatgaacgccacgctgggtcggaatggccagctcaacaatcgcctgtacggcggagaggtgcccatcaccaacccgctgtttcaaaggtatgcatagcttacttcctagtttataactataactataattggtaacaccctctatcctgcagatccaattccgatcacaaccacctgagcagcaccaatgagaacgtgtccttcgggaagagggactatggccaaatagggttctcatatctaaacgatctggataggtcggaggtggaaacaactacggaactgtagggaatacactaggaatattctggtttcgatacattttacagacttgttaatatacttagctgccaatttgtaattttaatagtgcattttaacaacgagagcggttgccatcaatttatgatcatagcacgagcaatctgtaaatacctgagcggagatgcagaatggaggaactgataactaatatatttaaccgtgcttaagatcaaataattacagtcattatatttaagcgaacgcagagtgcatacttcccacacacttacgaaactgccagacgcagtcgttttctttaggaattgttgaaaacatgtacatgcattaatataaactgtttaagttgtataaactatggaaagccaataaatgtaaataaatagatttttaacttaagagtgcctatttattaggggttccttacacccgaatgcaccaaaaactacaatggctgagtacaaaaccaactgacattttcgtgtcggagatttatatctaggtttctatgattgcaacagtaaacatttaatctacgagggcttaaaaattagtttaagatctgtttggggcgtactccctgggcttcacgtcgcccttgttgtcttcgccatgtgcggtggtcacgttgagggcttgactcgtatacagcttatccgaggggtcctcctcctccttttttatggtgctaatcaagctggtggactgggtctcctcctcctcggtctccgattcgcatttctgtgaagtaaagggaattgcaagcatgagaagaagagatactttgggcttttttctggatttgggttagtatggtgggttattacgtttactacgctattagactagttcatgagggcatcgaaccagggcatgtgttctatgccctcgagcaagcgcaacacttcgttcacattgctctccgactcgtcgatatcaaagttaagttcgttattgtcttgcacggatggttcttctaactcaaagttgtctgcgatgaggttatcttgagcctgactttcagctggaccaactgagtcgttggacccgccatcgccctcctcctcgaggcctaagtctacaggatcgctctccacaccgtcatcttcaatggctaagcccaggtcactgtccatgtccaggaacatggagtaatcatcgtcgagggagtttgccagatcgtcaactccgtcaaggtcaaaatcgaatataccattggcaaaatccaagaggtcatccccctccggctgcggctcattccgtgggtcttctccgacaaagttatcgagaccacggcctgctgcgaaaatactttctaccggcggagtgctgggaacttcataaaactgggggatgagaggtcggcaatttattcagggtcgatcacaaagggcttgcttagacagtactagcacttatatacatgtgtttcgtgttgtttctctagatatacttagctttactacaaatcaagcctaaatactagttacgcagtattgtttgttcgaactgtcttacagttggcttactatagtttcagcagtcatgtgcaacacaacttatggcaatgggtgagtggacagttggaatatataagcagttacttgtggtggttatggcgtgggttgggttagtgtttgatcaacgcaccttttgtatatactggcgcttagccggcgccacggtcaggtgcagtacgcaactggagtcttcgagaatgctagccactggctcctggcagaccaccccactccgctccacgccgcaggctcggaacagcacctggcgcttatcctccagaatgtgcttgcggcagtgcttgcagcagggcagcgttcgctcaccacacttgacaccgccttcggtgaagacgcacttcgggttgctcgacgacttggctgcgtacaaggcgtcgcgagctcgcttctccttcagtttcttgtagagcaccgcctcgacgccctggcgtcgatgatagctattcagcgcctttagctgctcgtacagctttcgctcgtgtggcgtgtcctttagctgatcgtgaatgctgcctgaaagtgtggcataagacacattatcctgcatacctaaaggcaagtgaaacttacaatatagctctcgctcgcgtcgtatatcgtgcaaatacttgcgacgtcgctgcctcagcacgttctgcagatatgaaatctgctcgcggtaaagaccctgaagcttgatcagcttcgtttcggcaatctttactgcctctgcgcgtgtaaagacgccagcgtgtctacaagggagaagaaaaaattaaaatttccttaaaaaatagtgctacgaataaatcaaatcttacttcaaaggatcatcatcctccgaatcgatactctcatggtcagattcgtaaaactcaatgtcctgggcggtgttcctgagacagggcggatctgcatcgttgctggaactatcggaagcataatccaaaatgcgacgtcgcttgcgagagctctccacaacatgtcctatggaattgcggtgatcctgagtgactagaagtgaggaaaattagatttcagctcggtttatagtcagcaagacataccaaatggcgtcacgtggggtgagaccacatcgatttcatcatcatcgcgttcgatctttttcacctctggctttatgtcctccacattaatgtgcgatgagaggctgtgcagcagggtctcgttggtctccacccggctgcgaatgcggcccacattcatgtgcgtcttctgcagctgcgtctgccggttgtgctcgaagcagagggtcgtcaggatcagctccttcttgttgtcatacttggccaccgcgttgatgcacttcctgccgttcgagtagacgtgcgagcactgtcggaagttggagcgcgggtcgcgcaggatgtgtcggatgcaatactcgtagccctcgatccgcatcaggctgcactcgtaggtgggattggcgcagtacttaatcttgaccagctcgctgtggatctgctcccgcagctggtgctccttgtccggagtgcagggcgtgccggtgaagcgggcgcactgccgcaattggtttggcgaaaagctggacatcgtcctttcaagatttttgccgctttttagaaattgttctctgatttttcagacgaagcgaaatgaaataaaatgctgtggaaacagtgtgaccacagcaaagtagagcataaataccccacacgttgtcacgcttgccaaccagtcagcatcgccatgaaccaaaagagggtatcccacctcccatgttgagtttctatatttaaaaatatcttaagattaaggttaaatttgataaaaatgctgtctaagttggcatctaaaaccaattggagatttattaggttatgaaattcgtttctttctctaacaatattattactctaataaacatagcttagagcctgaggatttatggtttaatggggaaaatggcaaaatgggtggtagttgtcgaactccgatggcaaatcgtctgcttcgcttaaaatgagctggatctgggccattcgtatgccatagcgcaacttgtagtccactgcatccagttgcgggatgcacctccggttgataaggagcaggaaactctgactgatctccatgacttcctccgccctgaggatggaccagtccgacatgtccacatttaggttctgggctctcaagcagatcatgatccggttgtggtccgtttgacccgtgggcaaccagatgcgcgcctgaggcgcaaatggtacatcgctgacatggacgagcttgatgcgcatgtcatgccacgagttgctaatcgcggcaacacagtccgacaggaatacctttgaaaatccgtcttcgcaccggatcactcggtggccacgaactacgtctgagctatcgaaggacgggacgggaccccccggcatggccatgactctgtcagtcaccatgtacgccagctgggcctcgacctcctgccacctttcgttaagcagacggccgtcttcgtggagctcgtccaccagggccatcgtcaggttgtcactctttgccaaattgggcttcgcagccataggaggacttgtattcttgggtccctttgccttcttgtgggcactagcctccttggagccctttgcctttttgggttcaagtt

SEQ ID NO: 26726 - DNA, 1968 bp, DROSOPHILA
tttatttcatttcgcttcgtctgaaaaatcagagaacaatttctaaaaagcggcaaaaatcttgaaaggacgatgtccagcttttcgccaaaccaattgcggcagtgcgcccgcttcaccggcacgccctgcactccggacaaggagcaccagctgcgggagcagatccacagcgagctggtcaagattaagtactgcgccaatcccacctacgagtgcagcctgatgcggatcgagggctacgagtattgcatccgacacatcctgcgcgacccgcgctccaacttccgacagtgctcgcacgtctactcgaacggcaggaagtgcatcaacgcggtggccaagtatgacaacaagaaggagctgatcctgacgaccctctgcttcgagcacaaccggcagacgcagctgcagaagacgcacatgaatgtgggccgcattcgcagccgggtggagaccaacgagaccctgctgcacagcctctcatcgcacattaatgtggaggacataaagccagaggtgaaaaagatcgaacgcgatgatgatgaaatcgatgtggtctcaccccacgtgacgccatttgtcactcaggatcaccgcaattccataggacatgttgtggagagctctcgcaagcgacgtcgcattttggattatgcttccgatagttccagcaacgatgcagatccgccctgtctcaggaacaccgcccaggacattgagttttacgaatctgaccatgagagtatcgattcggaggatgatgatcctttgaaacacgctggcgtctttacacgcgcagaggcagtaaagattgccgaaacgaagctgatcaagcttcagggtctttaccgcgagcagatttcatatctgcagaacgtgctgaggcagcgacgtcgcaagtatttgcacgatatacgacgcgagcgagagctatattgcagcattcacgatcagctaaaggacacgccacacgagcgaaagctgtacgagcagctaaaggcgctgaatagctatcatcgacgccagggcgtcgaggcggtgctctacaagaaactgaaggagaagcgagctcgcgacgccttgtacgcagccaagtcgtcgagcaacccgaagtgcgtcttcaccgaaggcggtgtcaagtgtggtgagcgaacgctgccctgctgcaagcactgccgcaagcacattctggaggataagcgccaggtgctgttccgagcctgcggcgtggagcggagtggggtggtctgccaggagccagtggctagcattctcgaagactccagttgcgtactgcacctgaccgtggcgccggctaagcgccagtatatacaaaagttttatgaagttcccagcactccgccggtagaaagtattttcgcagcaggccgtggtctcgataactttgtcggagaagacccacggaatgagccgcagccggagggggatgacctcttggattttgccaatggtatattcgattttgaccttgacggagttgacgatctggcaaactccctcgacgatgattactccatgttcctggacatggacagtgacctgggcttagccattgaagatgacggtgtggagagcgatcctgtagacttaggcctcgaggaggagggcgatggcgggtccaacgactcagttggtccagctgaaagtcaggctcaagataacctcatcgcagacaactttgagttagaagaaccatccgtgcaagacaataacgaacttaactttgatatcgacgagtcggagagcaatgtgaacgaaaaatgcgaatcggagaccgaggaggaggagacccagtccaccagcttgattagcaccataaaaaaggaggaggaggacccctcggataagctgtatacgagtcaagccctcaacgtgaccaccgcacatggcgaagacaacaagggcgacgtgaagcccagggagtacgccccaaacagatcttaa

SEQ ID NO: 26727 - protein, 631 aa, DROSOPHILA
MSSFSPNQLRQCARFTGTPCTPDKEHQLREQIHSELVKIKYCANPTYECSLMRIEGYEYCIRHILRDPRSNFRQCSHVYSNGRKCINAVAKYDNKKELILTTLCFEHNRQTQLQKTHMNVGRIRSRVETNETLLHSLSSHINVEDIKPEVKKIERDDDEIDVVSPHVTPFVTQDHRNSIGHVVESSRKRRRILDYASDSSSNDADPPCLRNTAQDIEFYESDHESIDSEDDDPLKHAGVFTRAEAVKIAETKLIKLQGLYREQISYLQNVLRQRRRKYLHDIRRERELYCSIHDQLKDTPHERKLYEQLKALNSYHRRQGVEAVLYKKLKEKRARDALYAAKSSSNPKCVFTEGGVKCGERTLPCCKHCRKHILEDKRQVLFRACGVERSGVVCQEPVASILEDSSCVLHLTVAPAKRQYIQKFYEVPSTPPVESIFAAGRGLDNFVGEDPRNEPQPEGDDLLDFANGIFDFDLDGVDDLANSLDDDYSMFLDMDSDLGLAIEDDGVESDPVDLGLEEEGDGGSNDSVGPAESQAQDNLIADNFELEEPSVQDNNELNFDIDESESNVNEKCESETEEEETQSTSLISTIKKEEEDPSDKLYTSQALNVTTAHGEDNKGDVKPREYAPNRS

SEQ ID NO: 26728 - DNA, 4054 bp, DROSOPHILA
cacattttgatttgtagtctctgttggaggagtgtgtatatgataacgaaataaagaacagtcaaatatgatcgtgtggattttaattccaatcgtttaacttcatagggtgatttaattttagtagattataaggaatttgttttgagaaataaaacaatctaagaactaacaataaatattggaaattgtatcatttttgattaggtaatatatgtaaatctgttttcatttcgcaatctcccgctttatgcttgtgatatgggagataccgatggtatctactgcattttcatcaatgtaactgttacttggtaaaaattgtatatgtatttagaatataaatattatatgcaatgcgttccacatttacaaggcagttatccatgattgcggagtaagatttttgaacaaattggaaaaatatacaaccgaaactagtttaaaatggttttctgcttcgcggaacatgcaactgacttatagatctgaaacgcactgcacaactgctcgggggatttgctccaatacttgagctttacatatatatgcctagttttttttgttgttgtatttttaatgataggattattggactaacagtaagatcagctagattttgcttttgagatgcagatacatgttcgtaatatataattttccaatcgatacgccattacgaaactaagtcttaacagggctataaaatcaatccagatattcatatgtataggccaagagtttagttttggttagtgctacatgagttggaacaatttgatttagtttttgttgttggatagtatgcattctaacaaaacatttcagagtcaacgcaaataatataactagatctatgaattcgatgcggaatttcaagcattttagatttatgtttatacaatttgagtaatacatagatgcatataaggatcttatcctttactacttagcgattattattgaatacaaattttttgtgtttattatttaatattaaacgtgaaaagtggtacgcttacattcaaagacattttcatcgttttgcaaaaaacatttataaaccgttcatatgtttcgagattcaatatcaagaacgagggaccatggcaagctttatgagttgatagttgagttgatagagtgagtgttgtgtgtgtgggatctttctgcacttgaatttgaattgactcttgaagaaatgtcgtctaattgaccctttccgaagtgttggcagcggctgctatgtaaatctgcttatgttcttgaacttggcttagtccaagaacgggttttgtcatacaggtcgcgaatggtgggtatgttggggatgttggtgtgaatgtggatgcggctgggtgacactgctgatgctgtggttactgctgctggtgctcgctccgcctccaccaccgccgcccgccttttgccttgtgggtggcggcggtggcggtgcctgtctcatgcgctgctgcaggatgcgcggcaactgtggatgcgccttgtgctgagctggtggtgcgggtggtggcgctggcctctgatggtagtggttagccgattgcgactgttgctgttgttgctgctgcacttgttggtgcttccccatcgaggaggcagcggatgaggagccagaggctcctgatgtggagctagttgaggcgtgggaagtggtcgagccagtggccagttttgtgggcagtcctccgctggctgccggcgaggccatggccctggaattcacaactcccgcactcccagctccggcagtatctgtcatcttaggcaaggctactggcgcataggagccatcgtcctcttcgtcggagctcaaggaattcgcatccgatggagtacgggacctcgagggcggcgacagtgcgtcctgctcttgcaggaacacacggaatccctgtatcgactcgtttagcgcccacagctgggacagcagcgacagatccaactgcctcagaccgtacatctcccgtcgcagaatggccaactggttgtcgatggtcgacgaggtggctccagtgctgctcgagctgttagtgggtgtgtgaacagccccagcgctgtgggtgctggaagcgcgactgtgcacagattcccgatcactgagcgactcctgcgtggacgaaagactaccgtgccgctggctgtgtccgtgtccattgtagctacgatttcgtgatgccgccgacgaggaggtggaggggcccaggtatagttctccggcggctacggtcagtgcgttaacactggacgccggcgaggctgtgcggggatgggggccaatggccacaggagccgccgtagcggcgctcagactttttggcagtggcggcagacccgtcaagtgcggctgggcatcgttgctgctgttctccatcatttgataaagcttactatgtctctacggtttcttcttactgctgatcctgatcctcacgggtatttagtaactagaactataacgcgggcttcttaatgcacgttgaacttccagctctggcggcacatggggcactgtttgttcaacggttgcaggttcagccacttgacgatgcagtgcatgtggaagcaatgagagcatacaccccacaccagcgggcagtcgtcaccgggcagagcgcactccgggcaggtgctctcgaaggacatgcgacagataccgcagttctcgtcattcgctatccaacgccaagttgcaactcccgtccatgacttgattgtcactttcattttgcgcacatttgtctcacacggcaattgtctggtttgtcgccgctttgcgttgcacggaatacggctcctttggccaatgaagcgggtgtttttcgaccgtttccgaatgttttttgcaaaatattgccttttttctttagttaggctgctgaaaataggtcgataggtccgattatcgattggccgattggacttagagatggacgctgtgtagatggagttaagccgtcggacaagcagtgcgacttgggatgacctgttatagtaaacgatatatttttatttattgtatattagtatagtattgattattgaatattgtaacaaagtacatttgatgtgttcttagtgatatttattgatcatagacatgggcatttgtaagcagttcatagagctatcgattttatatatacatctaccgtactttaaaaagatatcgatccttggcgggagtattcaactttggtttgtttataagaaatcatagataaagtactatttgaaacaatcaggtgaattaaaaacctttctgctatagttaaaataagtcattccttgtcggataagtaatagttgaacagtagtattttcaatatcaaggccacgttctcgaagccgctgggccatcaattacaattttcggcaatgacaggtcggaacccaggtcagatctttaatcagcaatgcgagcgaatcgtgtctgaaacaacttccgaaagcttatgctcatgctccatcggattggacgaggctttaggggggtgctgccttgtgttgttttgttgtcgggggctgatggagttgttgtctccggtttattcgcattcagttagccgacgattgttgaacccgacagacgtgcgcgcagctcgatcgatcgatcgtcgagctttacccgtttttcccactgtgttttttcgacaatttcgcgtgcaaagcgtgatcattattgctcaaaaattgcttttgtgttttgtccaagtgtgacgcagtttttagcaaaggttctgtggaactgcgaacgagatcagcatataataaaaaaaacccttgtgagtgaaaagaaagtgcctgcgaaacggagttgatttagagttgtgtactaatcgaaaggtgccgctgcgaagtgaacgatcttgtgagagtgaaattaaatcaaaacacaaaaagtgaagttcaacagcagagcgttgtttaagaacctgtaattgaaaacgcacttgaatacacacacccatacaggcaagaataatattaaaaataagcccaataatgcgccatacaacacgttgttgaccctgag

SEQ ID NO: 26729 - DNA, 1950 bp, DROSOPHILA
aatactatactaatatacaataaataaaaatatatcgtttactataacaggtcatcccaagtcgcactgcttgtccgacggcttaactccatctacacagcgtccatctctaagtccaatcggccaatcgataatcggacctatcgacctattttcagcagcctaactaaagaaaaaaggcaatattttgcaaaaaacattcggaaacggtcgaaaaacacccgcttcattggccaaaggagccgtattccgtgcaacgcaaagcggcgacaaaccagacaattgccgtgtgagacaaatgtgcgcaaaatgaaagtgacaatcaagtcatggacgggagttgcaacttggcgttggatagcgaatgacgagaactgcggtatctgtcgcatgtccttcgagagcacctgcccggagtgcgctctgcccggtgacgactgcccgctggtgtggggtgtatgctctcattgcttccacatgcactgcatcgtcaagtggctgaacctgcaaccgttgaacaaacagtgccccatgtgccgccagagctggaagttcatgatggagaacagcagcaacgatgcccagccgcacttgacgggtctgccgccactgccaaaaagtctgagcgccgctacggcggctcctgtggccattggcccccatccccgcacagcctcgccggcgtccagtgttaacgcactgaccgtagccgccggagaactatacctgggcccctccacctcctcgtcggcggcatcacgaaatcgtagctacaatggacacggacacagccagcggcacggtagtctttcgtccacgcaggagtcgctcagtgatcgggaatctgtgcacagtcgcgcttccagcacccacagcgctggggctgttcacacacccactaacagctcgagcagcactggagccacctcgtcgaccatcgacaaccagttggccattctgcgacgggagatgtacggtctgaggcagttggatctgtcgctgctgtcccagctgtgggcgctaaacgagtcgatacagggattccgtgtgttcctgcaagagcaggacgcactgtcgccgccctcgaggtcccgtactccatcggatgcgaattccttgagctccgacgaagaggacgatggctcctatgcgccagtagccttgcctaagatgacagatactgccggagctgggagtgcgggagttgtgaattccagggccatggcctcgccggcagccagcggaggactgcccacaaaactggccactggctcgaccacttcccacgcctcaactagctccacatcaggagcctctggctcctcatccgctgcctcctcgatggggaagcaccaacaagtgcagcagcaacaacagcaacagtcgcaatcggctaaccactaccatcagaggccagcgccaccacccgcaccaccagctcagcacaaggcgcatccacagttgccgcgcatcctgcagcagcgcatgagacaggcaccgccaccgccgccacccacaaggcaaaaggcgggcggcggtggtggaggcggagcgagcaccagcagcagtaaccacagcatcagcagtgtcacccagccgcatccacattcacaccaacatccccaacatacccaccattcgcgacctgtatgacaaaacccgttcttggactaagccaagttcaagaacataagcagatttacatagcagccgctgccaacacttcggaaagggtcaattagacgacatttcttcaagagtcaattcaaattcaagtgcagaaagatcccacacacacaacactcactctatcaactcaactatcaactcataaagcttgccatggtccctcgttcttgatattgaatctcgaaacatatgaacggtttataaatgttttttgcaaaacgatgaaaatgtctttgaatgtaagcgtaccacttttcacgt

SEQ ID NO: 26730 - protein, 447 aa, DROSOPHILA
MKVTIKSWTGVATWRWIANDENCGICRMSFESTCPECALPGDDCPLVWGVCSHCFHMHCIVKWLNLQPLNKQCPMCRQSWKFMMENSSNDAQPHLTGLPPLPKSLSAATAAPVAIGPHPRTASPASSVNALTVAAGELYLGPSTSSSAASRNRSYNGHGHSQRHGSLSSTQESLSDRESVHSRASSTHSAGAVHTPTNSSSSTGATSSTIDNQLAILRREMYGLRQLDLSLLSQLWALNESIQGFRVFLQEQDALSPPSRSRTPSDANSLSSDEEDDGSYAPVALPKMTDTAGAGSAGVVNSRAMASPAASGGLPTKLATGSTTSHASTSSTSGASGSSSAASSMGKHQQVQQQQQQQSQSANHYHQRPAPPPAPPAQHKAHPQLPRILQQRMRQAPPPPPPTRQKAGGGGGGGASTSSSNHSISSVTQPHPHSHQHPQHTHHSRPV

SEQ ID NO: 26731 - DNA, 3305 bp, DROSOPHILA
ctgtttaattagacgtttgttttaagtcgcaacttttacctaattctaggttaataggcgaatcacatcttaaacagagggatatattaaataatgagttcagtcatagaacggcttagatctcttcgtcggtgatatacactgataaacaattgggagcgggtggaagattgcattagtcaatcgaatgatctcaaacttgccttagccaaccatttcaggcctggaaagtactgtaatgcaagtacttgtattagtcagtgtcagtgactaattccttccatactcctttcaataggttcattcctagccagttactagctcacgttggtctaaaaatcttcttaaaagcaagcccataaaaagagaggttgctcggatgacaggacattgggcattttttactaatctagtctatattcgatttagtccatcagtaaatgaaagattaaattagggtcattccaatgatgttgaagaacatcaaagtctttaaggatatgggactatttaacaaacgcttagttaaattcaaataggtttctaataatccgattctccaaaatattgttcatgttggtaaatttaaatgtaataaatagtaaaagataagttcaaaataagctatgtcatttgtcaacatttccgtaactcttttttgtaacaatatataaattttgcatgaacattttatggtaatgacaccatttaaattgtgcaaaatagctcgatataaaaaacattaattctacaactaaaaaaaattacctatgcggaccgcttcaataaaaatgtcttcctagctaataaatattttaataaagcgaaataaaaatatgacattgcattttcctagttaaatatttttcgtcacaaaagatgacatcagaacatttttatggcgatggtgcgatcgtcactagtttttagtaaataatgaaaaatttaaatccaggagcaggatatgaattaaggaaggagaaaagtcattttacttaagtcaacagcatttattttggtccagcttagggctggtcggtctggccagcagaaccacgttttccaaagtcacatccctgggaacatagaacttaagttctgcttgatatccgtgggatcgtagatgctccagtcgtccataatccagaacccgcttgcactgttggccaatttgttcgcgctcctggcgagttagacgctgcgtgttcgtctcggtgagctgaaagtcagccgattccatggccttacgccgctctcggcttaagcccgtgccacaaactgcccaactgaccattttggttaggataacgaactcccgtggtccaattccagcttcctgaagaaacttgcgtcccacgtaggagcgccaggagcagcgatgatgacaacacagggcgatgagaacgtagtccgagctggcatttccatcaccgagtatacatctcagggtcaagtctgtagctgctccacagaggtgcttcgaaaaagccaccgttcgttgggttttctttagctccggcagagcagaaagcttaagatcagcgatatcagcacggatacgttgcaccacctccctgttggccaacttgttgtccttcttgtgccgcagggacattcgatcgatgaggaccacctgtgagtgactcaacttctgttcctgcaatacggtggccaaaaagtaggccaattgtccctttccggctccgaattctatatagctcgtgtgatccatcaactggtgatcgtgttccaggatgcccagcaagctagtggtctgggtgagctggcgtagcgtttcctggccgtagtccttgcgactaagttcctcctttagggattcgtgctccagctgcagttcctgtatgctggaattgatgtgcttgtcatacagattcttaactttgtcgatcagactgtagaactcttcatccgccagttcgtgcagttttatttgattgaatttgttcaaatcttcgtctgtttccttaagattgtctccagaattcactccttttacaatgtagggcagtgaactttcctgatccctggcattgcaaatggtcaagtgtttggctagttttcttttaaacacggtatgtttgtgatcaagcgggcagggaatacgttcctggaaggaatcttctctagctttttcatcgcaagttgcagtggtggctgccgatgaggcatgggctccacaaaactcactgcccttgtttgcagtcatcttgcagcggcgctttttgcgtaacacccagtaggagcaagtggtggttaccggcttctccgccttgacagtggtcatcgtctctttcacaggttccattcgttacttttattttcaaaataaattcctcccaattcggaactcgtgccaggcagtgtgaccaaggctggcacactagataacactattaccaacttttcacaaaaatgttttaactatggtcttaaatatgtttacacttcttacattgaatattttaataagttttttaataaaaaactcaaattgagcttgatttttcaaaataatagtttatttaatttacgcgaatgccaaacgccgatagttagctttgaaattcagggctggtcgagtgcaaacgtcctcagagctggtaacactgcaaaaaaaacgaagccgcgctgaatacttttgccaacaataaacgcagaaaaccaactgagaagcgaaacaagaagactatcaacatcatttaacaagccatagttataatccgctatgtaagtatcccggggcagatgggacaaaccatcggaaatggcgtaactggcagcggcatgtgcgccggcattttgcattgttagcaccacgctcgagttgtgggtgaaatactaatgtactgtgttctctgcagggctcttgtgaaaccgaaatcggagctgaccccggaggagctggcgcggcaggaggaggaggagtttaacaccggcccgctgtccgtgctcacgcagtccgtgaagaacaacacccaggtgctcatcaactgccgcaacaacaagaagctgctgggcagggtaaaggccttcgatcggcactgcaacatggtactggaaaacgtgaaggagatgtggacggagctgccgcggaccggtaagggcaagaagaaggtgaagcccgtgaacaaggatcggttcatatcgaagatgttcctgcgaggcgattctgtcatcctggtcctaaggaatcccctggccacggcggccggcaagtagtctaccatagcgatagcgtacagcaaccaatatccatcaacttcagttaataaatccgtaaatca

SEQ ID NO: 26732 - DNA, 1305 bp, DROSOPHILA
atgaccactgtcaaggcggagaagccggtaaccaccacttgctcctactgggtgttacgcaaaaagcgccgctgcaagatgactgcaaacaagggcagtgagttttgtggagcccatgcctcatcggcagccaccactgcaacttgcgatgaaaaagctagagaagattccttccaggaacgtattccctgcccgcttgatcacaaacataccgtgtttaaaagaaaactagccaaacacttgaccatttgcaatgccagggatcaggaaagttcactgccctacattgtaaaaggagtgaattctggagacaatcttaaggaaacagacgaagatttgaacaaattcaatcaaataaaactgcacgaactggcggatgaagagttctacagtctgatcgacaaagttaagaatctgtatgacaagcacatcaattccagcatacaggaactgcagctggagcacgaatccctaaaggaggaacttagtcgcaaggactacggccaggaaacgctacgccagctcacccagaccactagcttgctgggcatcctggaacacgatcaccagttgatggatcacacgagctatatagaattcggagccggaaagggacaattggcctactttttggccaccgtattgcaggaacagaagttgagtcactcacaggtggtcctcatcgatcgaatgtccctgcggcacaagaaggacaacaagttggccaacagggaggtggtgcaacgtatccgtgctgatatcgctgatcttaagctttctgctctgccggagctaaagaaaacccaacgaacggtggctttttcgaagcacctctgtggagcagctacagacttgaccctgagatgtatactcggtgatggaaatgccagctcggactacgttctcatcgccctgtgttgtcatcatcgctgctcctggcgctcctacgtgggacgcaagtttcttcaggaagctggaattggaccacgggagttcgttatcctaaccaaaatggtcagttgggcagtttgtggcacgggcttaagccgagagcggcgtaaggccatggaatcggctgactttcagctcaccgagacgaacacgcagcgtctaactcgccaggagcgcgaacaaattggccaacagtgcaagcgggttctggattatggacgactggagcatctacgatcccacggatatcaagcagaacttaagttctatgttcccagggatgtgactttggaaaacgtggttctgctggccagaccgaccagccctaagctggaccaaaataaatgctgttga

SEQ ID NO: 26733 - protein, 434 aa, DROSOPHILA
MTTVKAEKPVTTTCSYWVLRKKRRCKMTANKGSEFCGAHASSAATTATCDEKAREDSFQERIPCPLDHKHTVFKRKLAKHLTICNARDQESSLPYIVKGVNSGDNLKETDEDLNKFNQIKLHELADEEFYSLIDKVKNLYDKHINSSIQELQLEHESLKEELSRKDYGQETLRQLTQTTSLLGILEHDHQLMDHTSYIEFGAGKGQLAYFLATVLQEQKLSHSQVVLIDRMSLRHKKDNKLANREVVQRIRADIADLKLSALPELKKTQRTVAFSKHLCGAATDLTLRCILGDGNASSDYVLIALCCHHRCSWRSYVGRKFLQEAGIGPREFVILTKMVSWAVCGTGLSRERRKAMESADFQLTETNTQRLTRQEREQIGQQCKRVLDYGRLEHLRSHGYQAELKFYVPRDVTLENVVLLARPTSPKLDQNKCC

SEQ ID NO: 26734 - DNA, 2226 bp, DROSOPHILA
gttctgcacgatctcattggccagcttggatattttggggaaatagtattccgacaatacctgctttactttttcttgctctgctctgtatgcactattgtgttcagcagttaagatttcccttctttcttcgaatctgagaacgtccacaacgcggttcctgcaatgccagaactgtgtggctgggaacctccgggatatctcatcctgtacctttgcgagcgtgcgaaaatcgcaatggaaagcgtttacgccccttgggacgattatgtctactgccaaccaaaaggcgggttctttgatccgcttctgcttgttggggtggcttgacccgctgatgggcacttgcctagtattctttttccaccatgctcctcacaaagctggcagcatacgcatatctttcatggtactattccacctcttgcgccagcgccagagttgacggcaagaacagctgagaacagcacatctgtgagactacgcttgagtcccgaaaccaacacacaatgtgcatcttcgcggaagttttcacagaggccctttgactttattagtcaacaatgtaagtttttgccgacttcatcgtaatattgaagtaaagacatgctgccttgtctcagcgtatccaactcgctcgattacatgaactggacgtttgtcgctgtatgcgacttataatcgcgtcaaagttaagtactgtgccgaaagaagccagaacaaacatacgattcatgtgcgcctgcaaactcgggcaagcattgatggcatccaatttgccatcaagcatacgccaagtgagccatcgcaacagagagggtcatcggagaaatgttaaactagagcgaacagcttacgtaagtgatgggatttaaatgccggaaaaacttaaatggcaagcttaacgccgtatcacgtagcatccatattaattgcaacgtgtagtcgggtataaatagctcactacctgccacagccgatcattcagcactactcgacaagatgaacgtattcaatggtttcttgctagtcttcctgggcctggccctcagctctgtggatgcacagatagcaacacgccaggaaacctcggaggacaaggcttgtggtccccacgcctactacaattacgcccggcacacttgcctgccattctaggaacctttccaaagtgtcctatgcctaaagaaataaaacgttaaggtactaaatgtaccagaaataaatacgcgatgtttaagttaaatgggaaaagagggtgcagcataaaaagagtggacattacattaatggtaattctatccttttgggagatgcttaagaagaagatcatttacaatacttcttactgttcagaaccatcgatttaggttaagaaaataactagatttcttattatgaatgaattggtaagctcaatgggccattatttgaacgaccttcagcagctacctcatccacaccatgactccgaggatgtgttggcaaggacgtggaagagctttcttgaatgcacaactttatgccccttcctttcactgcttcgctaattaattcgcccctaagaagaacggtttcccagtcccaggaagccgcatcataaaccaacttgttatggcttattaattttgcatgcagccgcgactgcagtcaggccaacgtcatgtaaacatgtgcaggattccactggctcctgcctgtgagagggggtcctgtgctcgcaactgagaactcgagcccggaaaagacagcctgatggggcctctcatcgggaaagttaaagcctgctcgaggcagatttattgcattttaatgcgggctctggattgcactcaattggttaactggccgacaaacacagatttaatttcaaatatttactattatctgcggggaatctttggacagcgaataaaacgttttttccgtgtgccgctggcataaaaattatatttactgactgaatgaaattttcctgctttattatttgttacgcttttacgtttaattcagtagcccatatttacttttcatttaatttcagttaaacttgcagattgccattgaaaatcaaattttttcgaaattggtgttcccactttgaattttggcttattttctaatttgcttttgtgaaaacagtattttaattgccaagtatacctcaattaaatacatttgcctgttgttccattttgccatatgcagagttaaccgaattattca

SEQ ID NO: 26735 - DNA, 226 bp, DROSOPHILA
agatgaacgtattcaatggtttcttgctagtcttcctgggcctggccctcagctctgtggatgcacagatagcaacacgccaggaaacctcggaggacaaggcttgtggtccccacgcctactacaattacgcccggcacacttgcctgccattctaggaacctttccaaagtgtcctatgcctaaagaaataaaacgttaaggtactaaatgtaccagaaataaa

SEQ ID NO: 26736 - protein, 51 aa, DROSOPHILA
MNVFNGFLLVFLGLALSSVDAQIATRQETSEDKACGPHAYYNYARHTCLPF

SEQ ID NO: 26737 - DNA, 12706 bp, DROSOPHILA
ccatatttccagtttggtgctattatctgtttgtaaattggcagcttgttggatagcgacaatttactgcgcgaacaaagtagccagtagtgcttcgccaccttagcacgtaggcgtgttctgatgtcagaacagaaattattgcatgcttttactcatttaaaatttttttttattatttctttttaaagcttatagggaactccagcaaccccttttcagcccatttttgagccctggctaacttaagttagcaatatctaaatttgtaacattattaatataaaaaaaaaagtcacagataacaaattaaaaaatgacatggtgggtaagtcagtgtcagctctccctctttcaaggagatcgaagaatgaggtccagccgattccttgaccactcagcctttcatgataacgactcgaatttggcttaaaatctctatgcagggtggtgttccgcatccgacgatgagtctcaaatcgcctgttctggaaaacctggatccttctgacttggctatcccaaggcataccgagatttagcattcttactttcagtcagatagggcctatgattccctttgtaattgtaaataaatcaccacggaaccgaaactggtgcttaggtgcccgcccataaatttgttatcctgaaattattttaaggcacataaaaatgcatcaaaagatgcatttcatcggcagtgtaggtgatatgaccttgaagaaaatcaacccgcaaagtaggcaatccaaaaggcagaaaatggtttctcttatttatttatcattcggttctatggtcttttcatgtcgaacgagtagcaatatcaaagtgaccaacattattgattaggattagtgtctgctaattgattacgatcgcattctattatcgtatcctgctcggatggcgttaattaaattactaaattgactcggttatacaaagcacagatgcacggtaagtaggtgtacaggtgtgtggggggggggggtggttgagtggggctggtgcgtgtgggattgggtcgtaaatcgtataaaaaacagtattatatgcataactagagtttggcagctgcgaatatcttcatccgaatatcttgtcgaagcaggtgtggcagtatggcttgtccttttgctccttgaaagtgcccttattcaactgcttcaggcagaaggcgcagacgaagtgttccgggtggaatttcttgaacatggccgtgatgcagcgtccggtgatgggtttggaacacccggcgcacagggatcctcgcttggcatggtagtgcgtctcgcagtacggcagtccctcgtgatcaaagaaggatcctccttggaagggctgtcggcagtcctgtaagtgaacaagtcaaaggtacataataaatattttgaacagatataatatagataaccagatgtcgttataccaaaagatggatgttcgttctaggcacactcagggttaatcgtttttagccagtactaaataattgaaagctaaccaactcattgccataaacatttttgggaaatgtttactgcgcctcaagatcacaaccgcactgtcctgatctttagttgtaagtgtgattatgtgtgcttcggaaatataggagaggtatgaggatgatgtattgtgggccaaatggcggtgcagcctccgtctggggctaattacgaccataaattagttgccatacagcatgacggaccagcaaaccgatcgagagccgacaacataatattcgctgtgcaaaattttacgcctggcctgaaagacctaattagaatttagtcgaatcgaaaaaaaaagtgatgaacggaagactttggtaccctgggacctggggaccactgtgcacggcgtcgagctaattggaaaacaaagattgtacatttcaaaaacaagatttgggggaaatttaaatatgataaatatatgaaaaaagtgcggccaagacatttgtttcttgctatttcttttttttcggggggggcttttggaaaaacatatcaacagcagcagcaggaacagcaacaattgtattcagacaataacattttgcgcacgcttttggccagcttccaaaaacatggggcattgaaggtgtggagaggtggcaggggacaatatcatccaaccggcaacagcgatcgaaacatggaacgaaggatcattgagaacgtgatatctgcggcggaaaagctattttcggttttcaccacctcatacaaatcaatcaatccataaacaacaggtgccatttcataattttccttttgttgatcatatgaaaggaagcccataagtggggcacagcaacaaaaataagccaaaaaatcaatatcgatatgaactaaaaataaaaaccaaatacatataaggcacgaattttcaacaatcaatggagaatttcagctatgtgtcttatgtatatatttaaagaggatttgcaattcctcattgcaatagcttagctatttatagacacatatgattaaaatagttagctctatttgagttaaattgacgaatcgacttaaatttagtcagtccaatcaattcaattagcacccgggggtgcccattaaagacaagcaataaacagtgcgaattttatgtccattatggacagatatatagccgagtaccaggcgaagcatataaatgctgactacaacgtcagcaacgaaaatagtctaggctggtaagaattattgctttccctaatcgaaaatcgaatccacaatattgtaatttgtttatcaaccggatagaaagcaacaaaagtcaagaacacacaactgcggaggtgggacagcaacagacacatgtgtcaaggccagcaaactgacactgaccttgacacgaggtctggttggttggttgggtgtttgggtgattgggtggctctgggtgggtggattccgcacgaaggtcgccgtcaccttgaaaagatgcgaacacttttccaccatcccacctcctgttcttgcttgctttagctggttgtttcgtttgttttttggtcgtgttttaatgtgtaattattaaaattttatttacaaaaacaaattacaatattgtgggtcattttcataaatgattttaaatttaaaaagtacctataaacttagcctacaaaaagagcatagaaaagttcaacaagtcgggggggtttagggtcaggctcaggggcagggacaggggcgttcaaaaagaccatcatagagggctgcttttcagggactcgcgactcatgttcacaccagcggcacctgccccccaaacggagcgggccagctggaaaagggttgggaaagggttatgctgctgctgctgctgctgctgcgcctgccactgatgttgctgttgttcatgctgtgctgtgttgctcctagacccgcaacgaaaatagccaagacgaacggcgggcagctgttttggccgcgagttctcctcctcatgacgctggtaataaaaaagtggcacgcagctagataccaaaatgtatctgaagccactgccgccgggtgctattttcgtttggctgctgaacttcagcaacaagtttgctgatgctgttgcttgtgaatctctcctactcctcctcgtcgacgcccacgcactgtggacagacgggcttgccctccatggcgtagaaggacttgccgcgaacggccttcttgcaatcctaaggggtatacgtgatcaggatgaacgattaaaatgggcaattatggtcagaaatagcgaggggaaaaggcaaggctcagatcttaaggctttgctgtcacatttagattccgaatgctaaatgaatgctagatgtctagtcaagatgtgtaaaattcatatagaggaatcaaatgtgtcagtggcaaagcccttgctactctactcctttcttcagtaaatgaaacgtaaatggcattaattctggttagcatatctatgtaagaggataacaacgtaccctgcagacgaagcaatccggatgccactgcgagttcagcgccgagatgtagttctccataatggcgcggttgcagccattgcacttcggggcaaacatctcgaagtagtcgttgcgacagtacggcttgccgtcacgctcatggaatccctcctcgccgaactgctggccgcactgggcgcagaagaagtgctccgtgtgccaggtcttgtccagcgccgttacgcacttgtccagaatggcgccgttgcagtaggcgcagcgcgggctgaacagattgtggtagtccggctcgcagtacgggaagccgtcgcgctcgaagaaattgcgggtgcccaactcctggctgcagtggttgcacgtgaagtgctccggatgccatgtcttgcccagggctgtgatcacctggcccacaatgggcttctcgcaggcattgcagcagcccttctgcacggtattgactccttggcgactcatattggcctgtagattgcctagcatagaatccaactgatcctcgcgactgtcctcgacgatggtcgtctcctcgatcgtctgggtgagatgtgcctgctggctacccttgtttggtctggcgtagtcggttaccgtctggtgctgcactgtcgacgagtgctgttgcggatgactgccgtttccgatgccgtttgttccgttgctaacctggaatgagggataacgattccaattagcatgctatatccttcggattctgttgcggtgggcttacgtcgatgtgcttgcctcgactgaatcaaaagttgtgtgagcgctagcacaaaaacttttgcttttagccgccactgccgacgaaaacgaacaaaaaaaaagaatcaaaatatcaaaaataatgtttctcttcctcttcgcacagattctcctcctgactgaactatatagctatatgtatgtgtgtgtgtgtgtatgtggacctcgttgcgcacgacgctctcctcatatgcaaagcatttttcttctacgttgacgtagttttcgttcattgccaaaaatacgaaagaacgttttccgatgaacgaacaacgaaaggagtgggcggccaagggggtttctctactgcctctgtgcggatcttgtctgtcgagtctccatttcaatatttaatttttcttttataaactctgcattttcattgggcgtgctcgggttctgcctgcttcggcctaactaagtagacgcctaattgagcgtcctctgaattgggaaaggggaggattcgcattgaaaaggtacgtatctactttaatgattagcaagctttacttaatgcaaccgtttatctactgctacctagttttatatttctcaatatgtttggataagcacagcagattataatttctttataattagtagacgctctggctcgttttctttgtgcgtttcgtcactacgtgaataatcactaaccctttcttattttgtatacatggataggaattctcaaacgaaattgaaagacagttaatttctctaaacacataaaatattcaagattcatttcgtgaaaacttcttaagccttaaacctttataaaaatagcatttattaaatagtgccgatcaatatttaaggcattgcattaaagacttgcaattgatgtggtgggtaatatttttacattccatttttttacattttacattccattttttttacaattccatttccatcgtactacttattaaaatgttgtatccacatggaatgactctatcgctgtggacagcagtctgcgtagtgacgaatcgcaccatttattagaatattgttattattccaaattaaatcgacccttcccgaaatgttatagtcagagattccattttggttgaatcaaggaagcctcaatgttatcaagatttatattcacgcccgcccctttcgaacgaaactccgctcctgtttcgcctgccgcacaaattttcattggcttcagcgtcgccgaggttttcttattctaatattttcattgcctattttaagacccaaatcgtacacagcgcagtcgaaccaccgaaatcgtcgtttggcatggagtataaaatgaacatcgaccggctggtcaacaggatttccccataaaaagcgcagccgaatgttcgttcggcacacgtttccagtcgtggccagtggacgggagaaaatctgggaaaaggtggggaattgagggattatgaaatgggggacaggaagctggcactgaggaaatctcgatcaatgaatgggacgggcaggaggtgaaatgaaaatgggcggaaaatggggatacgaatgcggttttgaacgccagatgattgtggcaatgaaagcgcaagcaatgaaatatacagaatataccagagacacattgaaacacccacagctaaatggatcgcttgggttatagaaatgaaagaaaatataataaaaaagcgctttcgaaaatagccatgcaaatgatttgcaatgaaaaactatagcaaaagcggtgtgcgctgtggaaaacgcgttgacaagtgggtgagggggtgggggggtggatgggggtgggtgggcgactaactgtgcgttttgggtgtgtttgtgtgggtaggaaaagcgccgggaaaatccgacgggccgtgtgcaatattgtttatatccgaatatatttgtattttattttttcccccgctcttctccacgcgtacagaaaaagaacgagggaccaagaggcttttctattttattttcatatttatcatatcaacaaaagtcacggacacgccttgtccccccgccctctgcccccttcaccgaccaccctcgcagttggcagaaaattgaaaatgatattaaataattaacaggcccgaccgagtatactttacttttcaacttttcgcatgcacgcctgccattcgtcaatgacattgaattgcaatttactcgaagtctaaagaatccattcaaccccgccccgcacgaatgtctgctaatttgactgcaatggccatcgaatcgattgccaacaaaatgaaagaagtgtgcaaaaatatttttcacttagtaattaattaataattaatgcaatccgaatgcctcggcgacaaactgacaattcgcggcattccctgccgacatcttgcaatttcaaggcatttcaagggtcaaatctcagatggggatattttctaaacatttagaaaatgttagaaaacatttgaaaagaatcgctactaactgtcacattaagtatgggaataaagcaataaattgctttgagttaagccacaagaatttagatgctatctagctattgtataatagtaactattcaagtggtatatcaacagagaaatataggaataagtagcattcatttgcctttactgacatttttcagttactttccaaagatcgatgcatttcattaacgaactaagtcttgacccaaattcattcgtatgaaagaaaggagcagacgcaccgcaaaatatttaactagatcataaaaaacaaaacgaaaaagtggcgtaaaaaggccaaataaatgcgaacgacatctgctgaaatacatcatccgtataggcgtttcgttcggagatgtcagaaagttctaaaaacaaatgtcggacatatgaaggaaggcgaatggccacatcgccataaaagaaaagcaggctaatccaatccaatccaattgaacggaaacaatattttcttgcttgtatatcctgagaagatgtgcagtgcatgaaagcatgaaaaaataccttttttgtttactcgattgccacccaaaaattgattgatgccctaatgaggcaccgatatagaatataaaataaacgtggccatgtgtaaatgctaatctggggaaaaacttaaacttaaaatgtcttggcgccgtgtgcaataaatcgtgtgacagtccctcgccatcataatcagacttcattagcccaatcaatttatgtggcccattaaagtatgccccgaaatatccaccttcgcattgcgttggcagatgtcaaagtcaagatctttctccgctgctcttcgacttctcgaagggatcgtcctcaatggatagcatggggatctatggatcggcggtgtcattagattcgctcggttgccttgcgtcagacgatttgcgatgacaaatagattcattttatggtctttattacaattcacaaccaaaccgagcatttggggcgtctcttgctaaaaatagcaaaatacatagtagaaaatcagaaggatcgggtgggtggtggcacgggggtcgaaagacttcgaccatatgcaatttgtttaggcgcttttatagtatccctacgacaggtgaagacagtgaaaacatttgcgctctttacaaaatacttttcataaaaatctacattcaaagaggcttggtatgcgaatgttaataaacactatagattggaattataatttttttggaaactgttttcatttttaattgaaagaataccgctttgaaaacaattgacggtgatgcctagtcaaatataaaaatctttctgccaatacacaattataaaccaataataaaatatttacatatcgatattacaaaaccttccaaatagtcttaaaaacaaagaagttaaaggtttgaatagactgaaaatcgagcatcttaacccagtgcccaagagatatactatatttattaaaaattatttatcagaaggaagatccctatagagtataaagtatattcttgattatgatcactagctaagacgatctagctgtccgtccgtatgaactttaagatcttcggaactataagagctggaaaactgagatacagactctatcacactctatcactgttactgttggtgtttctttagcttatttatctacgttccaaagatgtttcaaatggcgttatctgcttgctaaagcaatcggtttgctgcttgcagatatttatataatagttgaggaatactttctttcttacttttaaaatataatattgctaatgctttggaaaacaaaaagcacaatccattttaatttttttaatttaagctgtagaagcgatatgttttacagattaacaatgtatagtcatatcataaaccaagttgaattatttcattgtaataactcaatacagcaagtatagcatatttctgtgttttgtaaaataaatatatagcatatattcgttcaaattttagtgcaatatttgttcattcattgaatacgagatatatcctcgtagatcatgtcatacagaagatattgtgggatatatatcacatatctttcatatgagaaattgtggaggaattacagtttatacagaattttatcaatatctaagctaacagttctcaatgatgaaaaggacttaccttgaagtcggaaagtgaagccatcagatcatccagttccttggtggcctgcgacgtataggcctgatgcacctgttgtcccggaacagcatgattgggcgtataagaatccttctgctgcacaatttgctcctcgacagtgccaactgaaatgggacaaacattttagttcacaatcaaataattgagttagctggtatttacatacctggtccatccggacccgtcaacttctccgtcttcgtttcccgaacggtgatggtgacatgtcgtcccggcgtcggagatttatgcgcagatctaaataaatataaggtcagagttaataccttcataatcaattatttctcttttgagctgcttacccgttaggaacagcatagatgtgagcattgtccagttctttcagcaggctgtccactgaaggacgctcctccacggtggcataactattcatcgtattgtatttcgagactggagtactgtagttgaccggtacatcgatttctaaggagtcaataaaaacccaattaatgccatacagaaacattttgaacaaagcgaattcgattaacaagtcgttactaaagcaaaacaaagtatgttcgtttctgtgttcataattctgtttaaaaggtagtataggattttgtggctaattaaagagtgcaataaattactcaagctaatgtacaaaccaattttacaaagaaaccggtagctatgtacatatatacagacagactaattaactttttaaacttagctcaactgaatagttatataaaattaaaatgcagtaatccgatcactatatccccaataagattggatttttccttactctgcagatcctgcagcaaggagtccagttctgagagtcctgtgcttgcacccgccgcctgacgtggcaacgatccctggttagcgtatcccggagtcgttgaggagccattaaaatcatgtccagccgttggggagcgtgtctctacgctgtagtgctcttgatactacaagaaagtggaaatattcgaatcagtattgatttcaagcaaactattatagtatacactcaccacctggggctgggctttgcccctgagacttccataacctggagtgttgtccacaaactgctgttgctgcagagcttgatgtttgggctggacagttccatattgcggctgaggttgctgcggctggcctggcacactgttttgcaggtcggctaatagagcatctaaaacgaaaaaagattgaaacattaatatatatcacgaacgaacttctaataggtttcgctattccaccaatgagtctatcttttgttctgtttttaagatatgacgctttctttttgataacacggcacttaagtcttaaatcgttttattttgtgactcttgtttgtattacacattaaattttgagaaaccaatacccagattatcgtagtccccatagttggccatggcacttcttcttccggtatttcgcaggtattttctatttaaattccaaacttgaagcacctgtcactgcacctctgacgcatagcccgttgttaactaaacggagatccattcgttgccttcgtttgctggcacatatctccagcaaaagtttctgataacattttgtttgttttcttttgtcttgagcgcgatatcgcgcaatacctataattgctatatgggtcttctttctggtttgtgtctagggtaaattgaaattgagcaaaggaaaaagcttgttttgagtttaaagaaagacccatttttatccactttttacgtataataggggtggaaaccttttaggaccaactgttacggcacagtcctaattagattctgtgtgcttaatttcgaagtccatgcagtgaatttatatacttttgtaggttcgaaaacacttcattctacatgtcatgtcaggagactttattaagttatatcaaaacattttgataattttttgaagatcgacaatgactctgattttgtaacacctgcccaatgagcagctgtgcttgaacttgacccgtggcccccgtcgaattacacttttcagcgactacattattaaccctttatcgcccacactccatttactcccattgaacaaacttacccagacgtcgctcgaactcgcccactttgaaacagtcgctgaggggcgaactgtggaacgacgatgatatcagttttgaagacatttcacgcactaaatttggccagaatcgatggaatcgaaatgtattgcttgattgtcactcgtatgccgatatgcaaaattgtcggtttgtctggaccactataaacggtagtttagtgaaatatttttaccggcacagcagcaacaacaacagccaaaccgaaagttcagttgccaactgaccaaattaaagcaccgaaaactcaatcaattcggggccaaacaaagtcaggccaaaagacacccacactgcagcccaaaactagcgaaacaccgagtatgagggtgattatatacatacatatatatatatatatatatctttatatacaaatatatcacatacatagttggagagcgggggacctacatctacacacaatttttgattcagtttaggtgggacgaacttgtcgaacgggctaaaaatcgcaccaagtcaagaaatatcgcatctacacgatgccataatatcttttagtgtgttagtatttctttaatgtaccgtcccatgaaaacatatttgatcaaaataatgttgtttgcattcctctcgcctctaatttagccaagatcaatagcggggaagggaagtagctaagtaaacataataatagcgcatgaaaaatcgagaaaaacgtcaataatttgtagatgggatacatccacagagaaaaataatagcattaattacaacagcccttccataatttgtagccacatttagccaaacaaataactgttttaatataattggttatgtttaaaatatactaaaaagggataaaattaaaatcaagataaacgaacttgggaatagttctaatactatcataaaatctatcttctaagcgtaaaacaaagaataagaatttgattagtataaaaacatggagtgcagatcttgaaatggtttatttatgtatatacctagtaacaaatgatttggaagttgtttttttttttgttgttcgtgcagaaagcattagattgagggtgcttaagctgtctttgaggcgtgccgaaagtatctgttggatgtctcgtatcatccgctgtcatacaatcgcacttaacgccatttacttgacccacccac

SEQ ID NO: 26738 - DNA, 1793 bp, DROSOPHILA
tggtccagacaaaccgacaattttgcatatcggcatacgagtgacaatcaagcaatacatttcgattccatcgattctggccaaatttagtgcgtgaaatgtcttcaaaactgatatcatcgtcgttccacagttcgcccctcagcgactgtttcaaagtgggcgagttcgagcgacgtctggatgctctattagccgacctgcaaaacagtgtgccaggccagccgcagcaacctcagccgcaatatggaactgtccagcccaaacatcaagctctgcagcaacagcagtttgtggacaacactccaggttatggaagtctcaggggcaaagcccagccccaggtgtatcaagagcactacagcgtagagacacgctccccaacggctggacatgattttaatggctcctcaacgactccgggatacgctaaccagggatcgttgccacgtcaggcggcgggtgcaagcacaggactctcagaactggactccttgctgcaggatctgcagaaaatcgatgtaccggtcaactacagtactccagtctcgaaatacaatacgatgaatagttatgccaccgtggaggagcgtccttcagtggacagcctgctgaaagaactggacaatgctcacatctatgctgttcctaacggatctgcgcataaatctccgacgccgggacgacatgtcaccatcaccgttcgggaaacgaagacggagaagttgacgggtccggatggaccagttggcactgtcgaggagcaaattgtgcagcagaaggattcttatacgcccaatcatgctgttccgggacaacaggtgcatcaggcctatacgtcgcaggccaccaaggaactggatgatctgatggcttcactttccgacttcaagatgaacgaaaactacgtcaacgtagaagaaaaatgctttgcatatgaggagagcgtcgtgcgcaacgagtcgccaaggagtcaataccgtgcagaagggctgctgcaatgcctgcgagaagcccattgtgggccaggtgatcacagccctgggcaagacatggcatccggagcacttcacgtgcaaccactgcagccaggagttgggcacccgcaatttcttcgagcgcgacggcttcccgtactgcgagccggactaccacaatctgttcagcccgcgctgcgcctactgcaacggcgccattctggacaagtgcgtaacggcgctggacaagacctggcacacggagcacttcttctgcgcccagtgcggccagcagttcggcgaggagggattccatgagcgtgacggcaagccgtactgtcgcaacgactacttcgagatgtttgccccgaagtgcaatggctgcaaccgcgccattatggagaactacatctcggcgctgaactcgcagtggcatccggattgcttcgtctgcagggactgccgacagcccttccaaggaggatccttctttgatcacgagggactgccgtactgcgagacgcactaccatgccaagcgaggatccctgtgcgccgggtgttccaaacccatcaccggacgctgcatcacggccatgttcaagaaattccacccggaacacttcgtctgcgccttctgcctgaagcagttgaataagggcactttcaaggagcaaaaggacaagccatactgccacacctgcttcgacaagatattcggatgaagatattcgcagctgccaaactctagttatgcatataatactgttttttatacgatttacgacccaatcccacacgcaccagccccactcaa

SEQ ID NO: 26739 - protein, 398 aa, DROSOPHILA
MSSKLISSSFHSSPLSDCFKVGEFERRLDALLADLQNSVPGQPQQPQPQYGTVQPKHQALQQQQFVDNTPGYGSLRGKAQPQVYQEHYSVETRSPTAGHDFNGSSTTPGYANQGSLPRQAAGASTGLSELDSLLQDLQKIDVPVNYSTPVSKYNTMNSYATVEERPSVDSLLKELDNAHIYAVPNGSAHKSPTPGRHVTITVRETKTEKLTGPDGPVGTVEEQIVQQKDSYTPNHAVPGQQVHQAYTSQATKELDDLMASLSDFKMNENYVNVEEKCFAYEESVVRNESPRSQYRAEGLLQCLREAHCGPGDHSPGQDMASGALHVQPLQPGVGHPQFLRARRLPVLRAGLPQSVQPALRLLQRRHSGQVRNGAGQDLAHGALLLRPVRPAVRRGGIP

SEQ ID NO: 26740 - DNA, 2450 bp, DROSOPHILA
actacctgatccaacaacattaagtccttatatttaatagatactttttaagcccactatgtttttattatttagattgagacattaaaaaacgtaaaaatcaacaaatgccgtctttaattgcaattactttatgtgtttgaaatgggaggcacccattgagtccatcaaagagcaaagacatgagcacaaaaattttcttgggtattcccttttacccttcatttcttatacccgtcacgcttccacccatacaaattttaggcgtacaaaaaatgaccagagaactgcagcccgcatacaaaaaatgacctgcggccgatcgttgactgtgcgtccactcacccatacggctcttgcgcagcaggcctcgggtggtttttttactcgtaacaaaaacgcaacgtcggtaaaacactcgagtattttgtgttgccgcaagtagggtgtcaaaaaaaacggggtgcctagagtaccgagtgtttatcgggtggacgtagagtgcgagtggcgggctgcagttctttgatacaccccttttacgatactttttaaggaatagtatactctcttaatatacgagaaacgactatttggaagcactacataattttactgaaccatcaacgggtatatataccaaagattttacatcttgaacgacctttgcctttatcaacaccttttaatttacaactctacaacaattttcgtaggcatgggcgatggtcttttcctaaaaagttactaacaagtctaacatagatttcaatcaaattttgtgggatagcttcttcagagacaatctcactttaaggaagtgctttaaaaacaaatcctcctgtatttgctgataagtttatttttaacaaattagctttggtttcattgtctatagttctttatgccttagattttgatttcatacacataatagtataaccactgtctctggaagatcttcttatattttgtattaaaatgccaaagccctctaaacaggactctatctcgttgtaagaataggttgaccaaacgaactcaatttatttagtattgtttatgttttagaaaatccagtaactcagtttttttggaagatgaccaattcgaaaatctagaggaagagtttctgcataatgaatgcattagtttaccctccgacttaacgaggtaagtaatttacgttatagtaaataccgctaaaaaaaactaagtttcaatagagtacaaagtgttattttggactacaagcagttcaaagcggctcgcacaattcagcgttatattcacggatggctagttcgagaaaatttccgaaaacttcagaagtctgcgattattattcaaaaatggtggcgccgttttgaggctcagaaaaatttgctttatgtggccgaaagcgctttgcagtcggctgttttggcccattacgacaagtctgctaccctgattcagacgctctatcgcggatggtggtcgcgaaaacatatctttgacctaaccatgctcaagagcgtgcagataatgttggcaaaggacctgattcactctttggtcaattacttgcacgcaacgaaaaattctgaaatgcttccaggcatttacacgatacgggactcgaggtaagtgcttggtcattcggttttataggtcaaaaaactattcaaatgaacaactattagtgaatatgggaatatgcaaatcattaaatattctgatcctatacatttttctagcatatgtctggaaacattggaggaactgatggcaacatttggctttcgattctataacgctaatgcttgctacaaaatgaaggaaacgttgtcaatggtggcacagagccgaaagacgtttacggccacatcctatttcacggatgtaccatatcccgggtttaatgatcgaggattttgtggccctcggcagaattctgccatgaccttgaatgccaaagatccagaacattatgaattgattcacatattcctgtccggtagtagaaaaattggcatgacaacggctaagctcgaacagaaaatagccaacattgcagaagaaaatcgtaagttcgtgttgcgacttaaacgtgtgttaaaagctattggtttctttttttttttttaatttacaggcttaaatatgtttataaagagggacaacaagaaaaagagttttattaaaaggatttatcttgacatgaagaactggcattactcaaatggagatccaattcttcccatcagcttgtttaaaaatagtgagatgcctgcggtcctggaaagtgccaagaaaactctggaatcaatttttggtgaactggagccgtgtgtttgtccaacgaacaaagaaatatctttccttttaaattctcttaatgattcttaaggagttaataatctttgtatattatatatcgttgtaaaccttacgaatatttcacaata

SEQ ID NO: 26741 - DNA, 339 bp, DROSOPHILA
aggactctatctcaaaatccagtaactcagtttttttggaagatgaccaattcgaaaatctagaggaagagtttctgcataatgaatgcattagtttaccctccgacttaacgagagtacaaagtgttattttggactacaagcagttcaaagcggctcgcacaattcagcgttatattcacggatggctagttcgagaaaatttccgaaaacttcagaagtctgcgattattattcaaaaatggtggcgccgttttgaggctcagaaaaatttgctttatgtggccgaaagcgctttgcagtcggctgttttggcccattacgacaagtctgctaccc

SEQ ID NO: 26742 - protein, 108 aa, DROSOPHILA
KSSNSVFLEDDQFENLEEEFLHNECISLPSDLTRVQSVILDYKQFKAARTIQRYIHGWLVRENFRKLQKSAIIIQKWWRRFEAQKNLLYVAESALQSAVLAHYDKSAT

SEQ ID NO: 26743 - DNA, 2779 bp, DROSOPHILA
tttttcgatatataacattctatgcctttggttagtcatctgaacttgaaattagcaagttattagcgtttaatacggttcatttacagaggtgaaaagtcttaagtattagatttcgtattagtatatatgggattacgttataacttaaacttagcagtggttttgaccattatttctatgttgtaatacagtttaaaattaggctagaccagctcctcaattgtctgcgctatccagtcgtcataggccgaaacttttgtgtaaattccaggaaacatggcgtttgcgcatccaaatccccaggacacaatgccgtagagctttagacggccatctatagatgtgacaagtggaccgcccgaatctccctggcagctatctcttcctcccgcctgagttcccgcgcagaacatggtgttggtcacggtgccagctccgaaatagtttctggcacactggttctgatctctcagatggacaacggtgtagcgaagacgcttttccggctgcatttgtgagatcgacgtgctgccccagccgcttacaaaaagctgtgcggtcggcataatgatgtccttactggtggccaagcttatgggtcgtatatcctgactatagacaaggggttgctgcagctgaacaatggcaatgtcattgttcatcctcgtggggtcatggaactcaggatgcggaatgatctttttgacgcgaatatagctgccgcccttcgtccaatcgctagatccggctcgaatcacgtaatattgcggtttactgtactccagcacacagtgagcagcagtcaagatgatgttgggcgaaatgatggttccaccgcatgcatgccgggtgcccaactgcagggatacttggtgcggaaagaaggtgatgtgcgtctcccagccgccgacaatgcggccatcctgttcgacatccgtggagttctgggcagccgacgtacagattagccagagagctactgccagtctgaaatccaagctcgtcattttctctttgattgcccgtgactgtgatggaaatcactgtggttcaggtcttttataagggaactccaagacacacggcttatcttatcggcggacccaactcttttggtggcccctgaccttctcggactatctttcgggatttatagatatttatggatagatggcttgggacaaattaaacagatggcggaggtcaagggtgctgctagtgtctaggcttttgctcttccaatcatctttccatggccgtcacctgctccttgaggtaatccaagtggttgacactgtcctgcatcacatcgtactggtagcccacgtgctgcagaatcagcgtcatcttctgcagattctggtggctgtaatccgagaccacgtccacttgggtgaagttcttcagggtttggtgcataatctgtgggcgaaactgctaaagtagtatttattattcaagggattaaagtctcagcatacctcattgctcttggaacctcggactacttgtcgggccacagaacctattgaacgccacgaaagaaaaagagttcatatcgattttgctgggatatactcgtattaactcacccaaattatttgcattctcacccacgcggacacacaatcgcttcttagactcgtcgaataaatgccgagcacttgaactggtcgcagaggccattttatttatgattaaactttgtttaaatgctaataaactcgaaaaatgtaaacaaagtcaaggtaaaacagctgagatagattgggtgtccattaacagcagtgtgaccaagtgtaccacaaggtacgagttaaaacattgcgttggccaacgggttgaaacccttgctagactattagcggtgaccgaaaccctggaatatggagacatctcacatggaggaaatttgtagagtttacaaacaatgttgtagacattaaacgctgcttttcggaataaaattcctaaattcaattcatcgagttggaaaacgtacccttaatttaaatctaaatctcatttgttggaaataaaatgaattctttacttcgatattttaaattttgcaatataattgtttttaaattcaatttaccttattttagggaatactttatgttcatatttctgtcgaagttgccaattggatgatttttctttctaataggcaattcttcgaaagaaatcttccccacttgctgaatgatccttggagcctctctgcattccaggatcccgtcgccaggatgctgaagtcgcgacacactgtcgacagtgtgaaatgcactgaacctgacccctcagttcatcctggctctcattcggattatacgtagatttcccccccaaaaaaaaaaaaaactattcagaattccatgctggctggcgccaaaaggcgtgtcgctaattgtccctaaacgtcggcattaggcgccaactttcaaaacaggaagtaagttgtaggagttggggctccgcctgcgttggttcgttctcccacattttggccacttagttgccacatcgtagctaataataaaggctaattaagcgattctgtgccaacacctgtagttcatttcgaaccaaccatctccagctcccctaatgacaataaattgccgctaaatgtcagcaataggcatcttcatctccatcggcatcacgaaaagataacgatttcactccaggttcgactagagcgcttctaattaatttatgattttcctcaccgcattaatctccctcgtatggcggcgtctcgagaaaa

SEQ ID NO: 26744 - DNA, 712 bp, DROSOPHILA
gacacccaatctatctcagctgttttaccttgactttgtttacatttttcgagtttattagcatttaaacaaagtttaatcataaataaaatggcctctgcgaccagttcaagtgctcggcatttattcgacgagtctaagaagcgattgtgtgtccgcgtgggtgagaatgcaaataatttgggttctgtggcccgacaagtagtccgaggttccaagagcaatgaggtatgctgagactttaatcccttgaataataaatactactttagcagtttcgcccacagattatgcaccaaaccctgaagaacttcacccaagtggacgtggtctcggattacagccaccagaatctgcagaagatgacgctgattctgcagcacgtgggctaccagtacgatgtgatgcaggacagtgtcaaccacttggattacctcaaggagcaggtgacggccatggaaagatgattggaagagcaaaagcctagacactagcagcacccttgacctccgccatctgtttaatttgtcccaagccatctatccataaatatctataaatcccgaaagatagtccgagaaggtcaggggccaccaaaagagttgggtccgccgataagataagccgtgtgtcttggagttcccttataaaagacctgaaccacagtgatttccatcacagtcacgggcaatcaaagagaaaatgacgagct

SEQ ID NO: 26745 - protein, 48 aa, DROSOPHILA
MASATSSSARHLFDESKKRLCVRVGENANNLGSVARQVVRGSKSNEVC

SEQ ID NO: 26746 - DNA, 2833 bp, DROSOPHILA
aaaatttagcaacaaacacagtgtaagttggtccaacatacttgctatattcctagggaatccatcgtatcatgtacttataacaaacccaatacgagcaattaaatttcaatataatggataatcacatttttaattgcacacacattcaacgatttaaattacctctttttaatttgataactgacttattaattaataatataaacaattgaatatacgtggagatgcgggtggcaatcgcatgtatagttattttatggattcttttctttgttatatacccgatactagaatatcgtaccctaatattagttattaatatgcatccaaaataaaaaaaaacaatcttattctttacaacggcttttatgactttgttaatatttcttgccttaaacaattgaatatagcaaaaattcggctacaataatctgtttccattctaaactcatatcggcatcgattgattttgggtgccaccgccaattcatcaatgactccagtatcgtagtacttgtccagaaatatctcaccagaagcggtcacaatattgtaatattgcaaaatacaggtcacataacacttgtgggaccttttcacgctagtcaaatccacatttgcaggccagtcacctagaattgattcggctatatcttcgtctattccttgattatgggggcacggatcgttagaatcggcaattctctagaagaggagtcttatgttaagtttttccgaacaactgcatcaagaataaagtgttgaacttacaaattgaatttccaaaataaaaataatacaagccagatgcggtacaagtcttagagacattttttcaggcatcaaactagttgaagatatcataggaaactaaataccaaatcgcataaattgaatcgcattttactgtcatgatgaaataaatcacttaccattttaacacaaaagaaataaattcattaaaagtatagaatgctatctgattataacaaactgtataatacaaaataattaactaaactatttcccccactcactttaactgatcacaaaataaacggaaattgttgatatttctggaagctacccgtttattttcacatcattcagcgaactccatcacctacggatggtactgtccatcttcgatctctccatgctcagattgagcggccagcgccagacgctgtgcctcctgttggcgtccaatggccgcgtgctcggcagcgatccgctcgaaggcgctcaggtgcttctgggtggcatgtgcaacggcggcgctggcatggggggcatttgctagtgcctacaaagttgtggaagacaatgcatcattacaaacaatttggagccacacctgtgcacggcacactcacaacttggcctggcgtgtggttggcatgctcttgcgcaatccgattgtaggccgcgaagtgcctttgcttggctgcctggacggcggcgctgtcctccagtttgtggctaagctgaggatggaaaccatgctcatccgccacatactgtacggtgcgcacctggttctttgggtccacataggagaaagcaccgcggatcacacccgatccatcggacacctcggtatgctggcgatccacatggccgggagcacggccagcttggtagctgaacacatacggacttgctggaaccttcggttccggggtgaccagatgggacacatcggccgcagcgactgccagcaaacaaacgaccttgacatgcagacaggaagagttatatgtagttgagtaacatctgatatagtcgctcacttaccaaaactataaacatggttgctggattgtgttgcctctctactcaagttgcgattggtaactggcggtgacttggacaacacttcggtattcgcagttcgtaagagccaaaaactggtattcgaggtgccgagatgcgcattttatatgccactacgatcggctaatccacgaatccgaaacttgtttttacattttgcattcataaacaaggtaatttgacattaaagttgaattaacaaattgtttttcgatatataacattctatgcctttggttagtcatctgaacttgaaattagcaagttattagcgtttaatacggttcatttacagaggtgaaaagtcttaagtattagatttcgtattagtatatatgggattacgttataacttaaacttagcagtggttttgaccattatttctatgttgtaatacagtttaaaattaggctagaccagctcctcaattgtctgcgctatccagtcgtcataggccgaaacttttgtgtaaattccaggaaacatggcgtttgcgcatccaaatccccaggacacaatgccgtagagctttagacggccatctatagatgtgacaagtggaccgcccgaatctccctggcagctatctcttcctcccgcctgagttcccgcgcagaacatggtgttggtcacggtgccagctccgaaatagtttctggcacactggttctgatctctcagatggacaacggtgtagcgaagacgcttttccggctgcatttgtgagatcgacgtgctgccccagccgcttacaaaaagctgtgcggtcggcataatgatgtccttactggtggccaagcttatgggtcgtatatcctgactatagacaaggggttgctgcagctgaacaatggcaatgtcattgttcatcctcgtggggtcatggaactcaggatgcggaatgatctttttgacgcgaatatagctgccgcccttcgtccaatcgctagatccggctcgaatcacgtaatattgcggtttactgtactccag

SEQ ID NO: 26747 - DNA, 699 bp, DROSOPHILA
caacacaatccagcaaccatgtttatagttttggtcgtttgtttgctggcagtcgctgcggccgatgtgtcccatctggtcaccccggaaccgaaggttccagcaagtccgtatgtgttcagctaccaagctggccgtgctcccggccatgtggatcgccagcataccgaggtgtccgatggatcgggtgtgatccgcggtgctttctcctatgtggacccaaagaaccaggtgcgcaccgtacagtatgtggcggatgagcatggtttccatcctcagcttagccacaaactggaggacagcgccgccgtccaggcagccaagcaaaggcacttcgcggcctacaatcggattgcgcaagagcatgccaaccacacgccaggccaagttgcactagcaaatgccccccatgccagcgccgccgttgcacatgccacccagaagcacctgagcgccttcgagcggatcgctgccgagcacgcggccattggacgccaacaggaggcacagcgtctggcgctggccgctcaatctgagcatggagagatcgaagatggacagtaccatccgtaggtgatggagttcgctgaatgatgtgaaaataaacgggtagcttccagaaatatcaacaatttccgtttattttgtgatcagttaaagtgagtgggggaaatagtttagttaattattttgtattat

SEQ ID NO: 26748 - protein, 184 aa, DROSOPHILA
MFIVLVVCLLAVAAADVSHLVTPEPKVPASPYVFSYQAGRAPGHVDRQHTEVSDGSGVIRGAFSYVDPKNQVRTVQYVADEHGFHPQLSHKLEDSAAVQAAKQRHFAAYNRIAQEHANHTPGQVALANAPHASAAVAHATQKHLSAFERIAAEHAAIGRQQEAQRLALAAQSEHGEIEDGQYHP

SEQ ID NO: 26749 - DNA, 2834 bp, DROSOPHILA
tgcatggcatgccgtggaaatggggacctgcctccaattctggaccccatggcggacccgcctggaatggcggagaagagtccaccgacaatatagtcatccattcgaaaaacagcggcaagtggcgttactaaatttatccaagtggcagaggcgtgaccacaaccaagtcaagctggattttacagtaaatttgtgaataattttacaactactttgcttcgcaattgattttcgtcgaacagtactcgatttgtatgctaatacttcattcatggtcacactcacttatatatagtcactttaattgtgcacctttttatctatgacatttaaatataaccctttactatactgtatgtaatagagccaaaatatttaaacgagattaaaagcctaatattgcaaatatgaatatgaagatacagtttatacggcttttgaaattgtttcctgaatctaactaatattgcaatcgaatgaacaaaccgaaataatctacgaaattataagctattgattgatattgattttattgataagtatgcaaacgagcttatgggaatttttcaattctgatcgtcataacaatatcagcacgtgttttataataattttttcagaatgttgcaaatcgcagcgcacccaacttttcagtttctatggcatatctgcgtacttttggcctggctaaaaagcgttcttgatttgacacagttccccccactctctcgatccgtctaaatcgagagtgaattggcaagccggtgacgaagtgcctctgtcgctcaaccgcaagtaaacaaaacaaacccgtcggtggcaattcccggtagactgcaccgctgacctcctccgtcttatctgttattgcgcgagagtcactgtcactgagaaccgatctcatagagtatatagaacgaatacggcgcgatgagccgatatttttatgggatagtataaatagctggcatcgcacttggcattggcatagtcaatgcaaaatgggctcgaacactggagcttggattctactgggcctgctggccggcatcgcctctctgtctagcggtgaatatatagatatactttgtatgtgcagatagaaaaaaaataaattgtatttttatagctgcgaatatacagcgaaatgaggaccagacgattcttcagaacaatggaaacaccttcctatcaaacggagccgggcaaatcattcgtggacccgatggcaaaacagtattgatcggatccgatgggcgcaggatcatcacggatgccgactccagcgaagaggacagctcgcacgattatggtcacggtgggagctataacaatgttatcatcaatggtggctcgggatccagcgtaattcatggcgatggacatagcttcattgttggagatgcgagtcatggaagttacatgaacagcaatggacgcagtattaggatcataaatggtgccatcgaactcaatgatcacggccaggtgtacacattcaggccaaaagcagcaggcattaacgaaaaggaaaccgtcaccatcaacggacaaccggctcaggtggagtactccaatggtgatatagtcatcgaactggccgatcatacggtgattgccaagataggtggacgcacatttctgggcgatcgcgaatccttcgacaatcgggataaattagaggcggaggcaaagaactatgccgatcgtatccagcaagaggtgcacgccaatctccagaaaaccatggctgatattcaaagggatcttcagaattccctgggaaatattttctattagaagccaagtaatcaatcgtacacgagtcgctcgaaataaagcgcctttgcagcaattgtcttgactttaattgtcttatctatggtttacaagctaagatgttctaaaagatacatatctagtgtgtaatccaagtacaacagaccccagacatgaggcgtctttgggcataatcttcccatttgaccggcctgaggccacaaacgtgtgggtggttaggtcaattaatgggaaatgacgcccggcaaatgtgattgattagcgggaaactcaccgtataggcagcttatggggcggctaaatctaatgcttagtatcgcctaacagactaggtttgtatgggcgtgtggcgattggaatacaattaccgagcttgcggcggtgtttatgaacacttcttggtatttaaatgacggaatttcccaacgaatcttcgtaaataagaccaaggtctcttattctttatatttgtgttttccaagctaacttaataaattcttaattaatggccttgatcttttgtcagccacaaattgtctaattgcattgctgtatacatttgcttgtttatgaaaaatgcttttaattgaattagggtgggtcgaacgaaatttctgcttattttgtatttctaaatcgagatttgaaattaaatttccatcgatgttaaatcttaaatttctatatcaggttgacagttatatatttaataaactgctacaaatttgttaagtgagaatgctatagtcgacttgggcaaatcgatagaaatttacaagacaaataaaaatatataaaaagttttagttttgggcggcttgtcggcgtaagagggatcgttcagaatgtgtaaggttgatctagagcttgatttgcaacccatagtcagtacaaaccaagtatcttatctgtgtccttgttgtccatttcgaagattgattcgctgccatttcccattttcaaattcaatgtcaattctgttaatatgagcggaatgaacgcagtggatggatatgtggggtgaacttttt

SEQ ID NO: 26750 - DNA, 773 bp, DROSOPHILA
caaaatgggctcgaacactggagcttggattctactgggcctgctggccggcatcgcctctctgtctagcgctgcgaatatacagcgaaatgaggaccagacgattcttcagaacaatggaaacaccttcctatcaaacggagccgggcaaatcattcgtggacccgatggcaaaacagtattgatcggatccgatgggcgcaggatcatcacggatgccgactccagcgaagaggacagctcgcacgattatggtcacggtgggagctataacaatgttatcatcaatggtggctcgggatccagcgtaattcatggcgatggacatagcttcattgttggagatgcgagtcatggaagttacatgaacagcaatggacgcagtattaggatcataaatggtgccatcgaactcaatgatcacggccaggtgtacacattcaggccaaaagcagcaggcattaacgaaaaggaaaccgtcaccatcaacggacaaccggctcaggtggagtactccaatggtgatatagtcatcgaactggccgatcatacggtgattgccaagataggtggacgcacatttctgggcgatcgcgaatccttcgacaatcgggataaattagaggcggaggcaaagaactatgccgatcgtatccagcaagaggtgcacgccaatctccagaaaaccatggctgatattcaaagggatcttcagaattccctgggaaatattttctattagaagccaagtaatcaatcgtacacgagtcgct

SEQ ID NO: 26751 - protein, 245 aa, DROSOPHILA
MGSNTGAWILLGLLAGIASLSSAANIQRNEDQTILQNNGNTFLSNGAGQIIRGPDGKTVLIGSDGRRIITDADSSEEDSSHDYGHGGSYNNVIINGGSGSSVIHGDGHSFIVGDASHGSYMNSNGRSIRIINGAIELNDHGQVYTFRPKAAGINEKETVTINGQPAQVEYSNGDIVIELADHTVIAKIGGRTFLGDRESFDNRDKLEAEAKNYADRIQQEVHANLQKTMADIQRDLQNSLGNIFY

SEQ ID NO: 26752 - DNA, 21222 bp, DROSOPHILA
ctgagaggccagttgctgctccatgaattccacgctgaagtccaaaaatcgcatgcgcagcggccgagtgagtttatcgggtgctgcagtgttcacgttcctatagattacaatagagtagagtagagttagcaatgcaatcgaatcgtattatgttttatgctgcacatgtaccatttcttgccctcgtaggcagcgaaatgttccttgagcatttccaaagtttgcaacttatttggcacatcgttgctggcgaaaaagcatcggttcatttcgagcacaaccttggtcatcagactgcgagtgcgatctacgatgctttcggtgtccagagcggattgctcgtgctcctggtaaatggcatcccacgcttgcagatctgcgcagctagatattaacgatttttaatattcgttatcatgttaactatgcctgctgcttacctcaagtcggcaaagatttgtttaatggcttcctcgtaggcctgtttcacctttggtcccacaccctcgtggcgtttaaatgcggcttccgaatcctccattgaaataatttgttagtaaattcaaattgtaaacaaaacaaaacaatgccacattggtgtgaccagttgcaagtttctgcaaaacaccaggccgatagaaattatagagtatggtgacaaccctgttattggtttttttttgaggtatttccactagctcttattactcataagtcccttgtaacataagtgatgttgaaaatataaatatatttcattcagcggtatggtgagaatatgtgccttttacattacaatgtcaaacaaaatgaataaataccaccgaacagtatttttaagaataagtgttaaaccaccgttttcaaccatcatatatcgatagtccaggtatcgatgacagggtgatacgccattttccaattcctctctaacttttgtgcattttaactcagctctagtgtgtttgtgctatacatattttgaataatattttaccagccagtgtttagtggcggacaaaatcgtgttgaataccaattgaaagttaagtgattaagttcggtggcatcaaagtcttcgtagctgaaggaaaacaaaggcatcccgataggtgagtttttcttctacagtttttttttatcttttgcctggggaaacgcgaatgaaaagcgaatttgcgaggcaaataaaccaggctaaaagcaatgtgtgtgtgtgttgtgtggtcttgtgttttcctgaatacatttctaagaaaaagattcgccaatacatgccgattttttatagcaatatagtgtgatttttaactacacccccaaaatcgttcttttggcttcggcgcttgagttttacagtttttcttcctttcattttattacaaccaccagggcacacagaaatattcctagctctctctcgctctgccgccctgttctctctgcctctctcgcttgctcgcacgcatgccggcttttacttaaagtacagagtcgcatagttgttgtttttataattggcccatcgctttagtcgcttgttttgtttttcacatttgctgttttttcttttcttttcgtttcgttgcttccctttttcttttatctccacgcggttacaccggtgcataaatttcattataattcgctgagataaaatcaaaacaaaatagtttcgttgttccgaaagcaaaactcccacgctacaagacgagttcaacgctcgttggctttttacaaataaggaaaaggcctaacctatattttattcatagtttttagcatcaatcgatgaggtacgtagaaaacggagaggcagaggaaatggcgaagagaggctaatgagagagaaaaatacaaatggaagctaactgttgttgtttcgcttgttggttgggtgcagcttattaccacctacttgcctcccccctctcttcattgctcctcttcttttctctttgcccccctccccctcattaacccattggcatttgcagctttttaacaacagctctcttcttcttccgtctgcaaatcttctcagcaattctgcaacttttgcttttcgttctttggcgattgtgacgaatctcctttgtctctgtttagatttccagttttgcgaaaaaattcgcttttatttgccttttttggccgaggtatttttcgtttgtttctagcgtttatttcgagtgaagcaattccaaagatatttcgcggctatttgcacgcgttcgttgacattgaactgaattctcacgtaaatgtgttgagttccaaattggtcagcaaacaaattgtaaatagtattgcttaaaaatttaaatatatattatattaacaaatcaataggcatgacttgttgaaaatctcagttgtttgctcaattctttttacaaaatttctatgacaccaaatttgacttgtaagatatttcagagacacacctaaatagttcgttttgtttattctcttggtatttgttgctccatggaactaaagagtcagtcacctatactattctacccgcagatttctggcactttcaaattaacaagttaacatattaaaatcatgttcatattgtttgttagttttaacacacagtaaaaaaaagaataaattataagaataatatatgcaataattatagttaaataccatgtttaaaaaactttgcttctcataagttttttgcacataaggaaaagtatctttcagtcattacattctgcagtaaaatgtttgaaaatatggtcataatttatgctcatttttcaagcgtaattaagttggtgaataagttaacgtctttaacttctatagtttttttcctgcagttggtaaggttgcttctttaacaaatacgcaagtatacagagcgattaaaatttcgtattgcttcacaatttaaaaatagttttacacactcgaaaattattgtaatttttattactctatgttccacgatatattctttgcagctgatttatcgaggtttgcaatttgtcatcgttaaataaagaacatgacaagtaagtatcgctaaatttttgttaaattcaagatgcgaagaaatcaaatatttaaatgtaatatttattattcatgtgtattggcctaaattcgctgctatagtgtaaatacatatgtatatatatctcgcatttcatattgtcattggtagctttgcgctgcagaataaaaaatgtatgttgcttgccatgttttcaatgcaatcatcgcagcatgggcaaacgaaataaataacaaaaaatatatatattattgtgaagttgcaattgtatagtaattggttgtcggatgtaggtcgctttgatgttgctgatttcccacatgaatctctttcctgttacaaataagtgccacaaacatctcgcttatgttgcgctgcccgcatatatacaaaggtgaattcctagaaactatcatctgtttatatgggttaactctgctatgctggttggttacccagagaaatgtgtatttttttagctcacaagtggccattccttccattcgctggtaaaatcttctaccgcctcaatcgaaatttgcaaaacatgttccactcgatgattttcgatggcttttgtctcaaatgacagacgaaaaaatgctgctgaaaagaagaagcacaaatatttttatgcaaatcactgaaagaaataaaaacgatggaaaaaattgccttaaacacgttttgtgttcaagcgagttttattgattttcaaaccttgacggggttcggttattgctattgctgccgggcaattcttatatttccaattaattagccaaggatggattggattgtcgagagatgcagttgacaaacgcagaagtagataaagccaaagcaataagggaaataatgaagaatggagttgtgggggaaggggctacgagaattggagtgggaagactggaaagtacttttcaatcgaagccttttaataatgcaacaacttcaggggttgcctagcccgattgtgaaaagggtggggagtgcactgaaaaatattttcctttttttctctcagaaatcacatgagttgagaaatgtaaaagttgtgtatgcattgattacgttgtactaatgatttgctgattcatatgggtttttatttatggtttttgtcttgtcttgattgataagtcactaagtttttctctttgtgcaccacccaaagaaaagtcgaactatagcaatcagactgtggaagttggtcgagaaacataaatggacgactgaagagagaagccagccgagcaggacagagcggactagaatagaataccacgggatagactcgcctggcggagcagcaaccactacatggcacacgccataagcacattagttattagcgcagggaccagctgaactccctacccctcacccccgcctgcctgcgatttgtgggggtcacacgcgatgtgaagtggggggaaaggtgggtgggtgggtggttggcttcagttcagttgagttgagtcgggctgctcgctaagcacgctgacatgtccataaaagccttgaagtggacaggccacaaagcacaaacaggacacacacacacacacacacgcagcgcgggggtgatgagaattgtcaattgtatgcatttccgcccgtggtgcccaactttcgtggccatatcctcaacctgattccttcctgtgtttcggtttttttccccttttccctcctttttttttcctttttggttagacatgacgtccattagctgtttttccgctaaattatagagttgaaacgcatacacccaacgcccaattacgctggcaaaatgcacggcaggatgtgggaggagaaaggacggctttaggcgtgaacacacacacacactcacactcacatgtgtggagcgatacaaacgtgacttgaattccttcaaattaaatattaccaatcatatacttatattgactgcttgtttcaatctattttaaaacatgttgtttctgcaaagggcgggacaagacagtcaacaaaactaagaaaatggcttacaacattggaaaattgctttgttacactttaattcatatacgccgaatgacgcaaaatgttaaatgctttttcgggatctgatcattttagaaaatttatcccataaaactgttttattttgataaatgtcgcgataaatgacacgctagaacaacgtcctttaagtttattgaatttcacacacctgtaaaacgcacacgtgtcattttgattagcatttcataatgcaatttagaaaataattataataattattattgttccaactaaaagagcttcacattcacaaggcttcagctgttttttgggctatttgcatacagctttcacttagctgaaattaaccttttctcggcttttgttttttgcattttgctgggtagccacaaaccgcgttttcatgtggcttgccacgtcccgctggacataaactctccagcggttccccttttgcctttattgccattgttgttgctgtctttgcgtttttgtggtcagaaagcccacctgcgtattagtgtattggcccgaggggggatatatgtatgtacaaaaaaaaaaaaagaaaaaaagggggagagaggggtgttacaaaagttccaagcactcacctggccgagcaacttaaattattgtcgtttattgttgctgttgggtggcattttgggggtggtcgcaagcgaagaagagggtggcttgtgggctggttggctggctggacgcgtgtgcgctgtcaaaagctatttgaacaggatgtggacagcaatcaaatgattttcacataattgtgtacctgtcatttatgtcactttcaggaatgcgagcagcctgctaactttctccggccagctcctaccgttcgttttgctcctgggaagctgttaggtggcaaatttgtggctggaaaagttcttctatcgctcgtctaaccaacacacacacacacacacacacacacactcacgcaaactgcaatcagaaggtgctgataaaaacggaagcaatcttcggtccttttcgatttttaaattgctattccgctcctgagggtttccaattgttaatggtgcggtccaagtagtgctctgtcgcaggaattaccctataattagtttgccaacccgttgggaacggctgttaatactcccagtgcttcattagttattactttggctggccccgttctttatgtggcacatgtgccgtgggttgggtaggttcatcttgaaaggactggagttttgaaattattgcaatttgcctgaataatccatgtccatgcgatgcacatgcaaagcagaagtagccttgatgcattgaaggcaccgtctaatgccacgtcatcgtgggccgcccccttaatgatatttgtccaggtcagcgcaatttgttgcatttcacaggcatttagttcgagggactggaccggaccgaaacgtatatggcgattgctctatcaatagttaaacgatttgctatcttagacaaacgggttccgcctcttattgcctcaacttcgccagccctcccactccgccgaggatccgtttatttagcccttaaaatatgcataatgtgaaaacatcagctgaagttccctagcaaaaggcatatatgtacctgcaagaaactgcagtccccttgcgccatttaaaagccctggttattagactaatgtcgaacttaaaatccaatacccagtcctcccacacacacacatgcatagaaaattactatacaatttgtgggactactatatgatatagtatgtataaataccttgcggttggaggaggaggaggaggaggacccaattttatataatgaatccatatctcacatatgtagagttccaatagaaaactgcactttccttccatgatagcaatattttgtatccgtatatagggtattcgcccccatttcgtacataggaacttatctattctatggtcagtgtagtgcttctgttatggtcagtccagtacaattatcctggttgcctagcatccggtgtccaaaagcagtaacttcccctgttttcggtattgtcacttgatttgtacgatttctattggccgacgatttccgctgtctatataccgatcctatagcttccgattggtcagcccttaggcattaaatagttggcttttccggtataaatagccccggttctggtaaatcgagttcattagttttcgtacaggactctcgggcggtgctaactgcactggctctattcatttgattggatcctcagatccatggttttatagagctatacaaaaaaaatcaagtctgtgaatgtgagaagcagatctacaagatctttgccaaaaataataatattagtgaaaccttgtgatatttttacaaacaaaaaaaggtaacttggtgacaataggcactattcatacttaaacagtgcagcaatttctcatttcaatactgattgtcacttggaaatcaatattcctggtagaattctgttcaatccaatggccaaatgctttcaattaggattgcatcaccatccaaaggcctgatcaacttcgatttgaaggtggctaccacttctttaagatcttcccactcacacttcaaataatgtactactacaccacctgtacttcaagtcgagtcaaattttgagccctcgaaaaattcatttaatctgccgaagctgctgtttgctcattgttatttcgaaaagatttttgacaacttaacagcagcttggacaattggcgttttgacatgtgaaaccacaatgaaatgaaccgacgtttgaactaatttcgactcaacgaagtgtgaatactctgcattcagactctttacttttaagaatgaccaacaaatatttcttttgatacttgatatgatacaaattgccatttccacttaaatcaataggtatttgtgcaaaagccgagatactcagttttagggaatatatagaaataaaaaaaacctcaggtccctggaaataatgagggatttcaacttattgccgtgggcgttccgcacaaaggccaacaattgttgtatccaactgtaacccactgccccgagagctccctttctataaatttataatttttcgttacaatttgtattgttgctgctatgcatgttggcttgctcaattatgccagcatatatacatatatcatacatatgcagtgctacacaagaatattttttatagaaatactatatatagggggtttcgttggagcgttggctgtctggcatttccgcttactgggcttttaggggcctgtagtgcggcacagggcgtatacttgatgattgatgcctcccaaattggaagtgcaacgcgcgcgggccaccgagatgaattgcagccaagtgcagctgcggcacgaaccagatcgaataggcacagagcttagctctgaaatggaaactgaattaaattgttattcaattgcggtgggcaaaaaaaaaaaataacgaaaaaaaacgacaacaaacctgcgactcacctcatgccttctctgaatctgttcatcagtgatgccaggtcttcaaaaggccattattaatacgccagtttgaaagatatagcaattgtatcatagatattccgcagattggcttaaacaattagcttgtagtttcttatgtaaactttctagccagccaaatcatctagtagctaagctgacaactctgttcggcccacagcgatttacagatgccgagagttgttgactcgaggcagtggcagttcgattttatgtgtcagttgaaccgaaactggccaaagatcaacatagttggctaaacaattgcgagattaatcgaattccgaattccgcctttccaattgcagagagactgagaatgaagcgtgaaatgaacgatgaaggggagggaccacaggaccagaagcgcaatcgccgcaacgaggagaccgttcgcatactgattccgagcagtgtaagttaattacaactaagttaatataagtgtaatgcccaatggccatcattaacgaactgcaaaatattatctatcttttataattcaacagattgctggggctgtcattggcaaaggaggacagcacattcagaagatgaggactcaggtactataatagacatatgaacatgacatagtcagctcaaaaaaaaaagatagacaaacaaaccgcataattcactattgaagcgtctagtattatttacaattatgttttatttgttgcaccacaacttagaaacttacaagcgaaaataatcaaatcgaatccatgtccccagtgaatcccgaaagcgtctgcctctgtcattgtgtgcctctctagcgaactctgtctccctctctctgttcacctctttctcaattctctcgccttgtctctggcagccgtccaattctccagctcgagtttaagctgggaaattccaaaaaaaaaaaaaaacaacaaaaaaacgtaaagaaaaccaacaccgaatccaaaaagagaaccctgtcttgtgtgtctcggtatggtccctgaaatttcccttctctactgctcactctcacttccccactatatatctctctctctctcgatcgatcgatctctatgtaggcggcggtcctggagaaacccaaatccaagtcgaaaaccaacacgcttctcactaactcgggtccttgcactcggctaacgctctttctctcatgctatctcttactttctctgtttggctaccaccgtatttcgcaaatctctgtttctctttatttatcgtttcgttactgaaagcaaaagaaacatttgaaatttgctacaattgtaggggaatttaatccatgatgcttggatgcaatatgtaatatatactaaaggcgctttatttaatcaaaacctggacaaaaattcggttttttgtataactcaataagaaaagaacatgaaaataaaacgataaatttacaccgctaattaaccttttaactaaatgaacaattttctctctctctcttctctctctctctctattcttgcgtacaccccatatgtaaccaacaaatcgactttgatttcgatttcgatttgaacaaaccaatatatatataaatatatatatatataccaaactgtcgtcggttcgcacgtccaacaaatatcttcaaccgctcatctgaatcgaatcaaattgaaccgaaccgaaccgaactttatcgatcgaatcgaacctccaactaccaaccaatcaaacgcccgcccgcccgcaccatcactctgcaccgctggtccatggtctctggtctatatgtcccacccgggtactggggtaacctcggatctatatctgtatccgtatctgaacccgaatttgaatctgaaactggcccggcccgatgtcgaaacccgaatcgaattgaaaatcgaattgcaccccctgttgccgtgcacattatgctacaaaatctggctacaaacgcctatatatatctatctatatatatatattctaatatctgtatatatacgcgtgcgaatccccatttccatgtgccatgtgggtttgtatctgtgtgggtgaccttcccccctccctatgtgaaatgcctttttatatatatatgaaaatgaaaacggcgaaacaatcaaccgatatacgattacttataccaaatcgcccgtccatcgaccaaccgcccgcctatctgattgcccgcccgcccgtccatcgaccgaaaccgaaaccgaaaccgatactgaacgttcgaacgcccgcccgcccatcaatcgcccgcccgcctgcctgaccgtacgcccgcccgcccgtgtctccaaatatgtgtgaataatgtggggcgcagtataaagccactgtgtctgtcgacgattcccaaggccccgaacggtaaaccacaaaaaaactttaaccttttaccaattactagattataatcgcatctcttcaatgcatatcctatactcgtatattgtgtggaaccccaaaagcaccgagccgagtggtactcgtgtttcgtgcttaaatatagccttagcccatctatagatctctctgtatgtcctgtatgcgctagctgtacccatttataaataagtacatgaacattgtgatgtgtccttccccacaacccgaaagcaaaaaaaaaaaaaaaagaatgtaaaacgaaaagtatatcaggcactaggtgtcccgatccgtatttgtagtagtattgcaaccaagcttgccgcaatctaactagctccgtctcttgatctcgctctccggctaatcctaatcctaatcgcatactaatccgcaaacgcacctcaagtaccccgattaactatccatcccaaaatgcacggcctatggttattttcaccgaaatcggaattaagcccagagccaagggccaatccatccgctggcctgagatcatccatttgtccatatcgaaaaatcccagcaagcgtcttgtgtgtccttgtgtggtattgttgtacatggcaatagggacagaatctcacttgctcgctcgccctcttgttctctctctctatctcaccgaatctctctgccaaagtttgttccatggaccccaaaaataaaccagaaagaaataaaaagaacacaatgtctagaccttaaataattttcaattaatgttctactctaatatgcgtttcccctcacttctttctcttttttcgccaacactcactataaaaaaaaacaatttctatgcacgtttaatcgctcgaacagaaccatccaaatatcggcggatatagagtccacattggagattatcaccgaaatgctgaaatactttgaggaggtaagccaacattgccattgcatctgtgctccagattgataacgcatcccttatatattcgttctttcaacagcgcgacgaggactttgatgtgcgtctacttatacaccagagcttggccggctgcgtcattggcaaaggtggacaaaagatcaaggagatccgcgatgtgagtaaccttgatttcatcaagtgtattagattacatagaattgggtttttaagacctctatcatggtaataagtttatatgagtatatattattagctacggttgtattttattgttgttttcacatagaatggctttataattataatgttacaattttatatcgatcgtgtaattttcatacgagccaattattacattgcgttccgagcagaactttgttgtgggaaaacgacagccaatggacagacaacggacatacgactattacacgacctgtcacatattgatgtccccgatcccaaggctcttgctgattacatatttagctcaagtatttccgctatttctgatgtaattcccagttgtgccttcgcatgtgcggcgttcacacggctctacactatactatccatgccatataatgccagtgtcctgcggtcggtcaactgacatagccagccagccatgacaaatgaaggctaacttaattgggcctattacgagcgaatagtggaaacgagaggcgtaggacatacatacatgcgaaggagggagtatagcaggtcaggacgtgaggaagcccgcattgttagtgggaatttgtgacatgtttttgacgatcccgaacgtttgcggcggcagtcacgtgaagccgaaacccgtcaacataactttgcgcttggttaaatcgaaaactttatgcgagttatgctgctgcgccgtggcctggcctcctatagatcctccgttctccgaccgcacaggtccttgcaccgtggcaacgacagtagaatgcatttccatcaatgagcgtttggaatggcgttcagttggggaatctgttgctgacgtctgtgccaaggctttcataacgcacttgtcactttggcagccggctcttcactggcaaattccaaagggcaggtgggttgtgaaaatgcttcccggacacgccaaacgcttttcaattgcgcaattcgcaatgtgagaggctggctgctgtggcattgggatgattggggtcgattccgaagtgtgggctgcgatggtgtgaatcaattggcgaactctcgccttttctcgcacctgcatgggcgcttttttgtttttttttttttaccatccgcaatttggcttggctcattaattagcgacgagaggggctggggtgcattttaattggaacgctgtcctgcccaagccgccttggattaaaagtgccttctactttctgttaagttcttttccgttctgctcttgcatattcatatttttgcgctgctgcgctgttttctatggaggtcaacaagtccgcggcggcaaacaaaaagcttacgtcttattcgtgtattcctacagcatcatcatggcctcctttctgttctgttgcttaagttgctgtgtattggtattatgaatttcttagatgagactcgcggctccttcgcagcagcatccttgcagctgccgtctgccgctttgatggtcacagcagatgatcagaatgggaagaatccttagtttgtgctagcatgtgtttgcctgttttctctgcatttttaccttcttttccccttttttttttttttttttttttttttttttttttttttttttttttttttttttttttgaatatggtcccctttcgtttgcgtcttggctgagaaaaggaagtcgtcctacttagcaatggtcacaactggccctgcaagcagctgtttcctttccatttggccttatccttctgccgtttcccgctcccgcgagtttctgacaaagccggttttcctgtgctcatctctgcgctttggggttatcataattacttccccaggttgggttctccatcctacctacatctatcaagttgaactgcagcttagctgccttagattagattatttttaaaacatattcccccgaatctcggtatccagaattgtcgcattccttgggacatgtgttgcggatacatggaccccatatatttataggctcacacggttcatagacaactgtttcgtgtttcatgttgtagctgcccattaaaatgttgtcctgtgccaaggaggcaggagaggaggcatctgtcagggtctcacaataatgagcgacagctgcttcaacttcgactccaccaggcatgctgatcctgcagccgtcgtcatccattgtgcatggatggatgtgtgtgtgtgtgcgtaaatccgaaatgccctaaaatgcatttgaggaggattgagcgtgccattggcttttgttccagcccgcttgcctgctttgccgtctggttgcctgcggcttacatttgttgcttgctgttcgtcttaatgaatgccaaacaggtgctacctacacacgcataacataccactcggcactgggatacagggtgcttcatttctattcgatctgaatgtattactgtagaaccaatatataatgttttgctatcaatgttatttgcgcttagtattcgatgattcttgcctttcacgttctttgttggcgcctaaaaatgctactaaattggagctctaaattccagccccgtttctctgcaatttaattttgaaagttaatgacattaaatgcgagtgccgagcacaaccttgtatagctttcagaaaatggtaagaaagaagggggcacccttttcgtaggcattccttgaattgcggcagctgaagcgaacgacgagtcctgcgccagcgacatctggtttcctgatagtttttcgttttatttttcttcttttttttggcagccagcgcgatttgtcgcttgggtttgagttggctctgggctccctttgatcatttgattaataagttcctagagggaactttttcttcagtggggcaaacggagagcggcggcagtggaatttcgtcaatatccggttcctttttcgctgcgctgtgctcggcatcaaattagtagtttgatgcttccttccgactcgtttgccgcatccttgactgctcaacattctcccgatggttttgtgtaccctaacaccaacagaaatatgcagtagctacaatactactgtgttagcattcacatagatatgcatatatgaaaaacaaagtacaagtagaagatctagattttgttgccaagaatttggcttaaagtttaaacgtacaccacgtgaatatgtaacttatatatccatatccttacggtgagcgtggtgcttcaaatacgttcgtttcctcttttggtttgcttgtatttccgtgtgtgcataagaacgtaaaagttttttaattgcagttgtcgtaagtgaattttgattgccattagcagtccttctttgcgaaagacggcgctccccatcttcatgctctttctgctggcagctcttaagcgcattactaagccagctgaaatcctttaatggaagactatcctatcccgtatatatgtagtgaatgctgcacatatgattcgatggatgccacttctatcatttctgttcttgcttatcaattgtaggcgatttgttgttttcccttatttccactcgaaaacttgccaatatacacatatgtacatagttatggcgtgttgttggattatgctcataacattggctttcgtttttatttattttttttccccatctgcgcatgcgttttgaaaaaaaaataaactttctatgccgcaacggagggtgttatagttttttatgagctgtttgtacagcaataaagttgcgaatttagttgggcaagaaatttgacacgatagtctattctttctataagtgtcctcctaattattatccttgtattgaaacttttcgatgtgagagagataaaaagcaagatatagttttcactatcaagagtatgcaaacttcgagttgttgaagatgttatcctttcaatttttattcctttttatatatgtattttttttgaattgagagctgaatacaccggttccgtttcgttgccagcgggagctgagaagcagctgtcccagcagcctgcgtttcctttttggcctgccgtgacacacacacaacaacaacagcagcaaatgccgtagccgcaggacgaagggaagaagcagagcgacctctgccgcagtcgctgcttctgctcggtatgtgtgtgtgtgtgtgcgtgtattcccgtgtacatattcctttctgcctttcatgacagtgtgtgaactcggtgtctgtgtgtgcgagtgttttcattttttttttctctgcctgcgtcttcttctccttacatggcaactggcaatcgttgaacccaattagttcgacattggcgctggtcgggaacggtcctcgtgctcctgcttctgctcctgttcctgtgccagctctcgcagagtccttaaactcgcgaaatatagaaaaaaaaaactaagccaaagtaaataaaatatgtgcgcgctaaaagtgaacattttaaaaggtatacaacaaagtgtaattttaatatcaagtgttataaacaatacaggaaagctataaaacaaactggtgaaataaaactaacacttagtgtgtgccccccgctcaatggcatttagtaaagttctatacataatcaactatttagaccagtggcgccaccaaacgacagtttgtggaaacttttgtggccccccgttgggcgccaaaaatattaaatttagtgcatggttatgtgttggagttagcttgcttctttttatagctgagagccattagtttagctttttacattatattagcatttcatgcgaagtccaaaagtatgctatatttcgtgatccacacgcacacagctataaagataaaacaagcagagcagcagatacagtccgttgtcatgtttaaatttaataatttttgattcactgaatgaccactgacatggaacatggtcgtcctgtgtgctcatacactacactgtgtgactcaacgctattcccctggccattgaacaggccccaattgtggggcaaaaggctgccgctgggtgcggggggtatacttcagaattttgatgtcgccattgttgtctggagcacacgcaacgagttttgtcgccagggagagggacactagggggagcaacatgacgcagcctttggtcattgccacaccacactcacagcacgcaatgggcttaggaatgatgcaatcatcagacgcgcacaggcacaaataaaaatgggaaacgcgggcaggcgacaggggacaattacgaactgtggaaagggtccagaggaaacgggggattcgaagcggaagcgggcctccaaactcatacactcttcacacactcggaaatcagtgcgagcctcttgttcgtcccctcctaagtggctatcaaatttccccatttacacttccgccgcagacagggaaaaggaaggcaagtcgaggagctggagatggagagatatcggagaggatatcaaatatgtagggggggcaagcacttcctgccactttacatgcagagcagagcaaacagctgccccgaatcctgaatcgctgtggcagcgcaggtagaaaactatgtatgtccaacatctgccgcgtcgttgcttcatgctgattaggagcgattgcccgctgtgccaggatgcaggacacacacacacacacttgtgaatagtttcgggtcaggacccaggggcaatgtcatggccaaattgatttaggttcggcctttactggaccttgaccaggatttgccgcgctcagtgtgtgtccttttgttctaaattctgggaaaatgtaatacctagccatggaatatgcagtttttaaaatggcaacgatgatacatttttgtttcgtcgattttctaggaaaatatgactaatacagaaaagtgcaaataaagaacaagtgctaggtacctgaaattaattattttaaaatcctaaaatgctagctatatcctagaatagaatggcatagttttacttaatatactaatttatttcattttattgcattttacagcgcatcggctgccgctttttgaaggtcttctcgaatgtggcaccacagagcacagatcgagtggtgcagaccgttggcaagcagagccaggtcatcgaagcggttcgtgaggtgatcacacttacacgggacactcccatcaagggggcgatacataactatgatcctatgaactttgaccgcgtatatgccgatgagtacggtggctatggcactggaagtggcagtacccgtccaagtcagcggggaaacaatcgtaacggaggaggcgctggaggtgttgccggcggcgcagccggtggcaatggtggaggattcaatgctggcggtgcacgcggcaatgctggcggacgtggcggagctgatcgctttggcggcgccgctggtggagctgtggccggtgctggaatggggcagcgcgacaatccgttcattaatccgtgggccaatggcggtggcggtgatgtagatggttttggcaacaacgctggtggtgctggtggatttgccggtaacagctttggcggtggcgccggtggaccattcggaggtggtagctttggcaacaacggtttcggaggtggacccagcgactttggcggaaattccggaaactttggacaggcccagggcactaacagtctgccaagccttggtagcttcagccagaaccagggtggcactagcagcctgcccagcttgggcagctttggtcagaatccaggcggacccggtggattgggtaacggactgagtggcggtgctaatggcggcgttggaaccctgggtggtgctaatggagccggtggctttaatgctgtcggtggagctaacggtgggccgaatggcagcccaaatgccgcgacaaatgtgcctcagggtcatgatcccaacaacagcacacaggtcaccattccaaaagaggtgggcgcatatattttcatgatttatagaatttaactaatatagtgttcgttgtgtttcagctggctggtgccatcattggtaagggaggtggccgcatccgtcgcatccgcaacgagtccagtgcgtacatcaccatcgacgagcccctgccaaactcgaacgatcgtatcatcaccatctcgggcacgccgaagcaaatacaaatggcccagtatctgctgcaacagaggttggtgtcgcaatctgaataagaagtatgcacatcctatcatttgtctaaccacccatccccacaataacactctaacacaaaaaaaaaaaaaaacgcgtgattaatttggaaggaaaggtgtctgctgtgcgtcccggtcccgagtgttaaaatatgtgcttgatcgtaactccatccaaactcgatattaactaaccgattggtcctcctgggagtgcattccgtatggaagactagtgattttgttgtttggtctttggtaataacaataaatcccttgtcttcttacggcgtgcatttgtgctcttcattctatcgatggttaaccaataaaactaaacacggcattggaaactacctaactaaacgtgtcacaattcatccttgtcccagctcgcaaaaaaaaaaaaaataataatcatccatcgtgtataactatttcacccaaaaacgaactccccagtaccctcccatcccactacatccacatccacattcatttagctgtatctgctgttcattaaaaagttcattaattatgttttcctttggcttgctgccatcctgccgccaactctttccattgcagcgtacacgagaatggcaggcgaaacatttaagtgggcaaggacttgaacagctacaacagcaatagcaacaccattcgacaaaacaacaaattcaacaactacaataaccatcgagaattgctgcgtttcacgtttaaatttaaatgtactaaaaggaagaactggcgaacgcccagggcaagagagcatcctccaaatacgaaagaaatttatgtatttcttcactaaatttaagtgaatattatacgccccaaatggataagaaactggaaccgagttgccccaaccatcagcgcctgcatccccccattcatcctcgtcgtcaccagtttgcaatttgggggaaagtcaacattaaaactctgtatgataagaagaatgaacaaataaagtaaacataaacttgatatacccagtcgatgtttgcattgggtatatgtttgtataatagggttttattcacattgtaaacgcttaaacaaaaacattaaacattttaaatcaaagtcatatgtataagataaagttcatgcataaggggcaacgttgcgtttatgtaataaattattaagcattattcggtagatgtacaaattaattaagagctgatttcagggttggtattactaggcatctcttaggtctaatgattagagtctagagtatttacaagttcagcgtgctgccgcctttgaatcaaatgattgagcaaaattatagttcatcatcagtgctcgtcgccatgatcagattatgttgtgattggcattggccattggccagattgctggatcgccgggttttccattagcacctgtattatggattttgtgatgtggtaaacgtttgttaggtttccacttaagtgtagactataattaatattgcatttcgtttgtgtttgcgtagagtgcctcctgtcccacatgtccagaaaaccatgccatccatgccagcgttcggtctagcgacttaattccgcttggacgagttgattaaatatttacaacagtgcgtcaacaaatgcttctcgccggacgaggatgaggagttgttattgttgtggtgatgatggtgctgtggtccgcccaattcacgcgtgtatatatccagaccgtactgaccctcctcggggaaactgcgggtatggtagtagaagaagggaaacatggcgggttgattggaatgaggagctattaaattttccatttccctgtgcactcacttaatgatgaacgtgacaatgtcgtccagcgtgctgtgagtcacatacttggccagcttcttctcctcgatgccattcttatgcagcgtggccataaaatctgtcagcggacgcgacatgcgaaattgcaggtccaggctgcgtccggcgaagataagaggatcctgcaagcaaacaaggca

SEQ ID NO: 26753 - DNA, 2015 bp, DROSOPHILA
cagccagtgtttagtggcggacaaaatcgtgttgaataccaattgaaagttaagtgattaagttcggtggcatcaaagtcttcgtagctgaaggaaaacaaaggcatcccgatagagagactgagaatgaagcgtgaaatgaacgatgaaggggagggaccacaggaccagaagcgcaatcgccgcaacgaggagaccgttcgcatactgattccgagcagtattgctggggctgtcattggcaaaggaggacagcacattcagaagatgaggactcagtataaagccactgtgtctgtcgacgattcccaaggccccgaacgaaccatccaaatatcggcggatatagagtccacattggagattatcaccgaaatgctgaaatactttgaggagcgcgacgaggactttgatgtgcgtctacttatacaccagagcttggccggctgcgtcattggcaaaggtggacaaaagatcaaggagatccgcgatcgcatcggctgccgctttttgaaggtcttctcgaatgtggcaccacagagcacagatcgagtggtgcagaccgttggcaagcagagccaggtcatcgaagcggttcgtgaggtgatcacacttacacgggacactcccatcaagggggcgatacataactatgatcctatgaactttgaccgcgtatatgccgatgagtacggtggctatggcactggaagtggcagtacccgtccaagtcagcggggaaacaatcgtaacggaggaggcgctggaggtgttgccggcggcgcagccggtggcaatggtggaggattcaatgctggcggtgcacgcggcaatgctggcggacgtggcggagctgatcgctttggcggcgccgctggtggagctgtggccggtgctggaatggggcagcgcgacaatccgttcattaatccgtgggccaatggcggtggcggtgatgtagatggttttggcaacaacgctggtggtgctggtggatttgccggtaacagctttggcggtggcgccggtggaccattcggaggtggtagctttggcaacaacggtttcggaggtggacccagcgactttggcggaaattccggaaactttggacaggcccagggcactaacagtctgccaagccttggtagcttcagccagaaccagggtggcactagcagcctgcccagcttgggcagctttggtcagaatccaggcggacccggtggattgggtaacggactgagtggcggtgctaatggcggcgttggaaccctgggtggtgctaatggagccggtggctttaatgctgtcggtggagctaacggtgggccgaatggcagcccaaatgccgcgacaaatgtgcctcagggtcatgatcccaacaacagcacacaggtcaccattccaaaagactggctggtgccatcattggtaagggaggtggccgcatccgtcgcatccgcaacgagtccagtgcgtacatcaccatcgacgagcccctgccaaactcgaacgatcgtatcatcaccatctcgggcacgccgaagcaaatacaaatggcccagtatctgctgcaacagaggttggtgtcgcaatctgaataacgtacacgagaatggcaggcgaaacatttaagtgggcaaggacttgaacagctacaacagcaatagcaacaccattcgacaaaacaacaaattcaacaactacaataaccatcgagaattgctgcgtttcacgtttaaatttaaatgtactaaaaggaagaactggcgaacgcccagggcaagagagcatcctccaaatacgaaagaaatttatgtatttcttcactaaatttaagtgaatattatacgccccaaatggataagaaactggaaccgagttgccccaaccatcagcgcctgcatccccccattcatcctcgtcgtcaccagtttgcaatttgggggaaagtcaacattaaaactctgtatgataagaagaatgaacaaataaagtaaacataaacttga

SEQ ID NO: 26754 - protein, 499 aa, DROSOPHILA
MNDEGEGPQDQKRNRRNEETVRILIPSSIAGAVIGKGGQHIQKMRTQYKATVSVDDSQGPERTIQISADIESTLEIITEMLKYFEERDEDFDVRLLIHQSLAGCVIGKGGQKIKEIRDRIGCRFLKVFSNVAPQSTDRVVQTVGKQSQVIEAVREVITLTRDTPIKGAIHNYDPMNFDRVYADEYGGYGTGSGSTRPSQRGNNRNGGGAGGVAGGAAGGNGGGFNAGGARGNAGGRGGADRFGGAAGGAVAGAGMGQRDNPFINPWANGGGGDVDGFGNNAGGAGGFAGNSFGGGAGGPFGGGSFGNNGFGGGPSDFGGNSGNFGQAQGTNSLPSLGSFSQNQGGTSSLPSLGSFGQNPGGPGGLGNGLSGGANGGVGTLGGANGAGGFNAVGGANGGPNGSPNAATNVPQGHDPNNSTQVTIPKDWLVPSLVREVAASVASATSPVRTSPSTSPCQTRTIVSSPSRARRSKYKWPSICCNRGWCRNLNNVHENGRRNI

SEQ ID NO: 26755 - DNA, 19648 bp, DROSOPHILA
aaaattccgtttaattaagcaaataattcttaatttttacctttaaagtcaaaaatttaacttttttcacagtgtctaaacacttttttgacaaactgtatgtgtactgcaactatttatgaataataacaatgaaaatatggtttattttaaatattttacgatatttgattatagtgttttagattgcattgggaaattagggtctgtgaaaatcaagaggtcataatggaagatatcgccctgtaatagtttaaatacatctgtcatctcttttattgcggctttactatttttgttgttacgaaaaactcaaatttttttaaacagtttactcgtcaattttcctttgtcagagtaagagtctatgtctctaaaatgtacttgcttagtttcaacttcctagcatttatagttcttgagatcgaggcggtttacacagattgacgaatggggtaaaacggctaatgtaatcataccttgtgcgtttcagatatcagttttaaattctaattcatttgtaaattgaagagctccaacagactgaaatgaaatgattacaaattaaggatttcatttattttactttaaataaaattaaatttaaatttaaatatttatttttctttttgtaacattttaggtcacggtgcgcatgacaaagtgttgtgaaacgttggtttgagtacttattagtctaactatggagcatttatgtgggcagttttatggaatcacggcctaaaataaaaagataatatgaaatatattactttagagttccaatcaacccaataatgtttaatgcggaggtagttcagtatagtgatatgtgcacaaattaatgcgcagacgctcctgaaacgaaccgtcgttggcaaaagttttcgatttaacgacattatgagacgaaaaagcttttctctctagcagttcatcgaatcaaacgcggccgcaaaatcttgttagtcagtattgaattcgattttcaagaaaacagacgttctaaaaatttcggtatctagctgtgtgtttcgtgttctcccagctcgttaaaaacatatacatatagctttttaaatactcttataagcattttgaacaaacatttatcagatctcctgaagtttaaaatattgttattcgcaattgaaaagaacacatcaagtataggtatcaaattggatttaatatacatacatatgtactcacttatgtatttttatatatatgtatatttatataagtttacgtatctataatacctgatacaattctgggtcaacacagattctaatatatacatgagtatacacatatacatatatttgatatatgtatggtctcttactgtgtatatgccaactaatattaaatacttttttcgcgcgtataacgattgcatattgtaaagttaatatatatattcacacgcttcacttatatcttaaaaggacatttatacaacatcagtatgtaccccattttgtgcctttgttcagttacgcagtaaatataaatatatgacacttaaaaattttgtaattgttattgcacaatatacatacatcttacaaattactcttgatatctacaagaaagtttaaaacatacctaaatacttacgagttatgataaatgctttttttttaattttaaaaaagtgtttcacattctatatatcgtccctcctagtccgaaaaatgggtttagtaaaacatttctgaaggtctcatccaaatagtatatttaattcgcgtacatagcgcgtgtttatatgatttaatgaaaaagtataatttgcaacaagtaatttccaagaccctgaaatatccttgctaaaaggggtggggcgttttaccattaagctcatcaaaaaaagcttcaacgcatgtaacctgcaaaggatacatacctacatatatatgtacgtatatatataactgcttcccagatacattctcataatcaggattttcttttttaagaaattaaccaaaaacacctgtcgctttttttaattgattgaaatatgtcaatgagagttaaatatatctggtttaaaacaaagataataaagttttgatcacaaattttaaacttttcgtaacatttgacttgacaatattatattataagtatgttatttcaaaattgcgagggtgcaattaagggtctacatataccttttccagggaaacacttctttttcatggtgattgggtctagttttaaaaaaacacgtacaacaaactaaaaactaacagtaccgctgttaccggatatggcaaaaaacaaacctcacggagaggtataaaacaagagagaacgtgacagtagttcatcgactatttaacaacccgacagaaatgtgcaaaataaaagaataaataaaaataatgaaacaaaaaaacaaaacactttgtaaatgtgtgggcaaaatcgaaataaaagatttcaagactgaaagaagcaaattatttttcaaaaaaattggagttacagttttaggcggattaaatgtctggttctcaagaaaacaaatttgcatgctttatcccatgcctgtcgtccgtatcaacgctgttaccgctgaaactataataactggaaagtaaaacgaaaaaataatttccattttttattcctttactcaatacgtaatataggttaatagtaatgattgttgctgctcttgatcagctggctatcacactagcttcgttgaaaagtatgtaacttgcagaacgacgcgtttccgagcgtttaaactatatatagtcttcaccaggatcaatagccgagtcgaattttcatgtccgtctatctgtatgaactccacgatctcaggaactataaaagctagaaagttaagattgtgccatgccctttttaagttttcgtttattttttttcaaaaaattgttgaaattgttttgccaattttaatcggtacgccagaaaaatgtttaatattctcgttcatacttccactagctgagtaacaattatctgatagtcgaaaagctttactatagcgttttctcttgttttaattctgcaatggattcgtattttttcagggccatagtttaatttgatattgaaaacgccactgagtggttgatatgcatatcgatgtaaggcccgtttacactgcactaaccgcggagttatggttttacatatgtagatacctttgctattttgatgtgcatggggaacagttaagtgtagctttggtaaggagttgacccctatgtttaataatcgagtttattacatttttcgtctatcgaatgtcatgtcatctctaggcaacaacaaggtatcagattcaacgtttgagataggataatacattttcagacatttttcaatttgtgcccccgcacatgttgtttcttgcgaagtatggtgttttttcgtatgatttcatgatcacatgaaaaaacttcaaccaccaaaatcttcaaaatggaggtcgagttttctagtttaagcaacgtgctttaagagaactcacttgaattaccaactcaataagaaacctgcggctgtttaaaataacataacccttatattattacaaaccatttaaaatttgaagaactatatgtagattgctggtctgttttgcatcgactccactgagtaatatagaattttaaaattggaatagcgagacattcttttaattttaccgatatgtgtttctatgaaataagttacctaatctgtgctctgaatacttctgaattacattggcgagctttactttacgagcttcatgcccgatcttatacagagaagaatgcaagtttatactatgatggccgggggattctcaaatacatgcagtacccctttggataccatagaaccaacgctgtctgaaacttttgaaccagctagtgattactttataacaaaataatatttagagaaggcccatggtacctaaatggtacaacaatgtatgtatgtttgtacgttgtaagcaattttttgtataatttttgtaaaactgatttattatcttatatttaaaaatcgtttagaaaacaagaaataaaactcctgaaaagtgaaatctgtagagcagttgaagatctttagtcgcaatagattttcttaagtgtgccatcgcgatggctgcaccagcagcctgtacgcgtttttcggacaattacgacatcaaagaagagttgggaaagtaagtttaacaaactcaaggttaataaatttattataataacccgtctattaacatttcagaggagcattctcaattgtgaaaagatgtgtccaaaagtcaactggctttgaatttgctgcaaaaattatcaatacaaaaaaattaactgccagaggtaaggctttctgtgttctatgtaggttataaatcacatatgtacgcatttatgctatgcacacgcatgtagggaaactaagtgctgtttttaggtaattcgtcgagtacagtaaaagggtatactagatccttgatccttggaaagtatgtatattcttgatcaggatcaatagccgagtccgtctctccgtatggtcgtcgagatctcagaaactatacaagctagaaggcatacagattttagaaacaaatacgcagcgcaagtttgttgacccatgttgccacatgcgccacgccctcacttttgaaaaatgtgttgatattttttcacatttgtattggtcttgtaaatttctatcgatttgctcaaaaaaaagtttgccacgcccattctaacgccctttaacttctatcgatttgcttaaaagccgccaaccggtcacgtccacactttggaccaatttttaaacttttttcttattttattccccaatatctatcgttatcctagaaaaatgatgaaatttcgcgttcccattcacactagctgagtaactggtatctgatgccgttttttcaacggcgatatggcatatcgtaagaaatcagtagtaaacattgactgtcaaaaagttttcctgtaaaatgtactttctttttgctaagtacgcttttggaagggaccattctttttgtgtaatatcttcgtcgtccctatctatttgccacacaagtatcaaatagttctacagtaattaagttgtatttcttggtgttgtgctatttagtaattaataaatttttactgccaagacgtggccaaaataattttggaatagcagtattggcaaagtgtgtaatttacaaaaaatatattaaataacttttaagaagtttgagcatgacagctgggacaaattttgggcttagagagaaccatttgcttgctcgccaaaaacctcttattaacatatttgtacacatgcatgtatgcatataagagatgcttataatatatatatatatatattttttttttttgcttttagactttcaaaaactggaacgtgaagcaaggatctgcagaaagttacaccatcccaacataggtatgcaacgtgtatataaatataatttacttacttattctttaaagatacgtttttctgaagatgtatgatctacataaaagtagacgaacatggcctaatatcactttgaacatctactatacataatttttatatgtacattcaatcacggcttagaccccagtagtgttgatgacttgcaatgtgatcctgataaaggatggtttgacgtccacggtaacacaacgaagaaaaaaataaaatagagtttagtagatatatcaatccgcatctgcaagcaacattccattcctcgccctccctactctccaataacaaatcttccaagtaatttataattataataattataaaaacttgcagaacagcaaaaaccgaactcatgcaatagactttcctctcactaaaagcgtaacctaacaaaacagttatttacacggacagttcaaatctagaaacatcacttcctccagcgtcaccgacaaaatatataatatgttcaaaatgtattttataaacatatatttttatagcctttaaggcttataatcattgtcatccgtaaaaaaaaaacattaaatacaaatgtatacaactaataaattgttaatatgtacaatttcagtgcggctacatgacagtatacaggaggagaactatcactaccttgtttttgacctgtaagcattaacctgcatagactccttaccaaatatttaaattgcctatccccaaaagtgttttaaaaatatgagtttctaacaaatgcttgtaaatgtggcaatgactcgactattgtttattgagattcatacttcatccttttccctccgttcgttcatactataatatgaatatgaatcaaattttaaagccgcaatataatatatataatataatatgaatcaagttttagccgcaatatatttttgttatattagagatgtgttttctgctgtcgcaacttaaatataacctaaatttaaatttagagcttcaatcgcaaaatttgactatgcctacatacatttgcagtgtaaccggtggtgaactttttgaagatatcgttgcacgcgaattttattcagaagctgatgcatcacattgtattcaacaaatattggaatcggtcaatcactgccaccaaaatggtgtggtgcaccgagatctgaaaccagagaatttactattagctagtaaggctaagggtgcagcagtgaaactcgctgactttggtctagccattgaagttcaaggcgatcatcaggcttggtttggatttgccggcacaccaggatatctgtctcctgaggtattgaaaaaggagccctatgggaaatcggtagacatatgggcatgtggtaagcaattataattgttgtaacatttgcatgcacatgcatgccaaacggcagtcggttacacagttcaacaactattttatttttcctcaggagttattctttacatacttcttgtcggttatccacccttttgggatgaagatcagcaccgactgtactcgcagataaaagcgggagcttatgatgtacggaaactataataatttatgtggattcattatatttaaatataactttattttagtatccgtctccagaatgggatacggttactccagaagctaaaaatcttattaatcaaatgctaaccgttaatccaaataaacgaataactgcagctgaggctttaaaacatccgtggatttgtgtaagtgcagactaatttttctcttaggtttacataaagataatgaaaaaacattgttacagcaacgcgaacgtgtggcttccgttgtgcatcgccaagaaaccgtagactgtctcaagaaatttaatgcgcggcgcaagctaaagggagccatacttacgacaatgttggcgaccagaaatttttcgagtatgtaacttaacttaattaatcttgaccacatcaatatacttggcgtcaacacaaaaatatacaaaaagaataataaaaacgctatggccgatttcgttgacaattatatacccgttattcagcttgtaggattgatataaatatatttaacttcgtataaaaaataccctttactcgtagagtaaaaaggtagactatattgtttgaaaagtatgtaacaagcagaaagaagcgtttccgagcataaatagaataatattctcgatcaggatcaatagtagagtcgatctggaactgtccgtccgtatgaacgttgagatcttaggaactataaaaacaagaaggttgagattacgcaacctttattgatccatataaacactctaacgaccacaaaccgtacaaaactgcgacgcccaaacttttgaaaaatgtgtagatattttttcacatttgtattagtcttgtaaattttttatcgatttgcagaaaaaattgagacctcgttcatacggacatggccagatcgagtcgggtattgatcctgatcgagaatatacagttgcggtaacaaaatagcaccataagcacattttgtgtttgtcccagcgtttctccattttctgaaactttttcaaaaaaaataattgttaaaacaaaaaaaaccttcaaatttaggcggtaacaaaaatataactgttcctcgtagtttgctaaaactaaccaaaaaaataaaaaaataattcaacaaatggattatatcttaagaactatgtttaaagaatcttaatatttggttgcgggaccgcgcatcgccctggcatagagtccaccaagtcctggcctagcttttgaggaataaaaatgaccagaccccaaagatcgtcgttattattgggtttggcttcagaaacctatttttgacgtccgcccaaaggttttcgattggattcaagtcgggtgactgagcaggccagttcattccttgaatcgatttctgctttgaccactttcgagctttcttgctcgtgtgttttgagtcgttatcctgttgaaatgtccaaaccaacggcatttcatcctcggcatatggcagcatcacattttccaggatatctgtgtaaatgtgctgatccatgatgccttgaatccaatggatcggacctactacattgtatgaaaagcacgcccataccatgatgtttgatcccccatgctttaccgccttaaaggtgaagccgaggattatattcagttcgcggtggtagccgaacataagacctagagccattcccaccaaacaacacaattttggacattgagggctttcttcgccgtgtttcgttcttttcgacaaacagcactgctttgcggatcattttgcttgaacaaccgacaatgcgaccaatttcagcgtaggttttaccttcagagatcacgtttttaatcaaatttcttttttcgacggtacaatgctttccgtgacccatgactagagaatttttggtcttcgtttggaaaaaattcagttaaaacctttaatacaactccttatttcaaaatttttcgaaaaaaacccaaagcaatcactcctattattttaatcagcaaatacgtggtcagtgctatttttgttaccgcctcatttcgcgcacttttgcagcaagtgcccaccaaaaaaaagaaccgttacattgagagactaaaaatttcttgctcagagagccaacatatggtacttattattcatgcaatctgactttaaaaaatataaacatttaataattttttttaggaaatatacttttcacctgcagtagtgctattattttagcggcagctgtatacactttatatggtcggaaacgcttccttttactccacgagtaacgggtataataattaattaaaaaaaaaaacaacaaaaacaaaacatgcacgtacatattaaggtttaattaaatattataagatttaaactgattttaactaaaagtgtatttaatttacaggcagaagtatgataactaaaaaaggtgaaggatcacaggtcaaagaatcaaccgattcatctagcactactcttgaagacgatgacataaaaggtaagtaaataaaatatgtatttaacgttcatttatagtaaccaaataagtgaagacatagtagatcaggattcactatcaaccactatagctttagaacaagacatgggtttttagtgtaacgtagttacatagttttcattggaagaggctttgtgatcatattggaagtttaatattctgtaaagtggtgtccccattcattaagatatagttgctgttatatatttacattatttatttatttattttatggcaactttaggctgcatgtgatttattattattacattttaacaaatcaacttaaattgaagcattgtttacaatttcttattaaaggaatccataaatttcctcaagcttacgaaaaccaggtagtttccctaaaactagtggaaattaccagttttaacacattaattgtaaacctcatacttaaatgtatcgttaatataattttatctaatttttaaattggtgttagtattgtattttttgcacgtcttcgcttagacatacatataccaaataataaagtcaatagaaagttttgcacttttatattgtacaagaatttgaaaaatatacgatatacttctctttactttcattcccatactttcattactacttctcatcgttataattctttaatttaatgcaacaaaatgtaccttcgttttgatcttaagtgttataattcggtatacacgagttttttttcaaaaatcaaaagtgcttatatattataagatttcataagcttcggcttgagtaattggttccattcctgttttttatataacattttattatacccgttactcgtagagtaaaaaagtatactacattcgttgacaagtacgtaacacgcagaaggaagcgtttccgaccatataatgtatattattcttggtcaggatcaatagccgaatcgatttggccatgtctgtctgtccgtatggacgtcgagatctcaggaactataaaacccatgttgccacgcccactataacgctcagaaaccacacaaaactgccacgcccacattgaaacattgttggatactttttcataattttattagtcacattccatatgaccgttttaagacataatttgtatattatttgaaaagacgaaattatagttaaaaatatattgaaaatggtcttagtactggtatttttaaaacgaagaaaatatggaattaaagctaaaattacggttttagactttataaaaaactagttttatgctgaattgtcggtataaaaatattgtattacaaatattttgaagttgaagaatgtagtaaaaaacagtgtttcgagtttgtttgaattgtaaaaaagttaatccgccatatttttgccttttttaaagccaataatatgcaaacggattcctgttttacatttatttcaaccattaacattggggatttcaaatgcgtattttgaatttattataagttacaaccaaacttcattgcattaacttaataacagaaattgtatggtttaaactaaatcacaaaaacaaacacatttcattattttaacgtagaggaaatattgggacaattgcattttcaaatatgacatttttgtacatttttttcctagaagataaaaaaggaaccgttgatcgcagtactacagtcgtatcaaaagagcctgaaggtaaatgctaacatgaattttggattatttgataaaacaattttttttttgcatatttataattaaaatatacatttatttatccaattattcttagagaaagcagtacttataaatatatatatgttagtatacagtgcagggtataaaatactttataaaactaattaatcgaataataagttagtttagaatatatcgcaaattagagttacttagaaaatatcgcattgctgccagcgtgacattactttcacagtttatgcactttttgtcaattataaacagattagatcatatttaaaagattggtatctatttccatttcttatattggtttttatttcagctttgaatcttctccatttggattgagacttcaatgcaacaatatgtttaatattattaacataattttgtcgttactacaaatattattttttcaaatttaatacaagatagcagatattgaaagtaatttttataccctttactcatagagtaaaatgagtaacagccaaaggaagcgtttccgaccatataaaggaactatgaaagcaagaaggttgcgattaagaatacttgaggatctgtgccaatttgatgacccaagttgccacggccattctaacgctcacaagttgcccgaaactgacacgcccacatttttgaaaaatatttcgatttttcttcctttattatttaatcatcagcagaactagtttacagatgtgctccattagattccttgacaaacgtttccgaccatataaagtatacgtaatcagaatcaacagccaagtcgatctggccatgtccgtatgaacgcgtcgatctcagtaactataaatgctagaaggatcagactttagatatatatgacgcagagcaagtttattaacccatgttgcctcgcacactataacaccctgaatcatttttggatagtttttcataattttattagtcttgtgaatttctatcgatttgccaaacaactttttgccccgcccactctaccgctctaaaacttcccaaaatgccacgccggcatttttaagaaatgatttcatttttttgtggattaaatcagtttagaaaatttctatcgatatgcctaaaacattttgtctactgacgcctaaaaatagcccaaatatatcccatccacaccttagagtagtaaaattaattttttccctcattttcgatcaatattcccttaaaatgttgaaaattgtcggagtaacgggtatctaatagtcggggaagtcgacttaagcgtttatctcttattttctcataaaatagatattttgacatacatttattatcaaatatatatatacatatatattagatattagatattatttcaattaattttccgacctgttcctgggagatttagatcaaacgagataatatatcgtcggaaaactagtgtacacacaattagaaaacttgaccacctgtactttcttcactgcgttgcaagcttctgactaaaatcaatatatgcattggaagggtataaaaaaaagagcgctatgctccagttcctctgctaccagtcactctatctgagtacaagcgagtgaagaaaccaataaataataaatgaaaacaataaaataaaatcaaattgtttctgcgcgtgcgcgacatttttagccattgtgttagtcttcgagtagtggaaataatttctatacccatcgtaagcgaaacataaatttgtatcccaaattataaacagtaattttaataattaataaaaacaatttagaagaataaatatttatataaaaaaaatcaccattacaggcttgcaaatttctgtctatctgcaaggatatgaagagatttttattttaaagaaggcagagtgctatatatagtgggattcttcgattattagatagttactggaaggcgaacgagaaatttcatagttttttgggcatatcgatagacatttacaaaactagtagaaaagtataaaaatatgttttaatagtgtgggtgtggtagttttgggcagcgtctacgtctctggaatctgcttgcctaatctcaactttctatattttattcttcctgagatctcgaccttaacaaggatggacagacggacggacagaaagacatggcccgatcaacgtggacctgatcaaggtggtcggaaactctttcttctatgcgatgcaattttttcaacgcatctaatatactctactttagtcgacgagtaacgagtataattatttctatatgtatttctatggtatttctatagtcaaatacagtataatgtgcttaattgcctcaacacttaactgcacattacagataagtgcccaatcatacgccaaactgcgcatgaccgtttacatagtttgtttacaaaccaatttttcgaaattggtaaaacaaagcgaaatatcgggcttacaatcaaagacaaactatacataagcgaacaagttaaggataatgttaacaaagagagctttgcagttaaatacaattgtgatctttcaacaataaaccgcatcatacgtaaggggagagtgacacacaacaatcggccacaacagcggaacttaaatgcaagcgccaacggaaaggaaagcacgctttggtagagagcctgaattgttacggtaccttgacgacaaaagagataacaagtgatcttctgaatgagcacactgaagatggaaggtcagcatagcgacgatgacgatgagaatagcggtgatgaagaaccaaagctgccaactgtcaaagaaggttttgatgctatcaagactctggaacaattaggaatggtgtataattgttctgggttacttagagagcttcgaaaaattgaggaaaagatattgataataagggtaaagaacgttgttcaaaaaaatatatcagattagtattttaagtaatagggaacaataaattccatacatgaatgtatacaaaaatgtgaactatatctgaattgcgtgcatataaaagtgcatttttaagataattgcacatttttttgagttaaacatggtgaggcagttaagaacatattatactttatttaaaaaattaaagtgaattatacgctttattgcatcttgttgcatattaaatgctaaatcgggtctttttgttgaagaatgggtatatccatcaaattagactggagctatgtatgaattaaatgtttattcacaaaaacactattgccgttcgtagactttttattacatatttctaaccatttccattttatttgcatcacaaaatgtattttttatttcctattttatttaaatcatttccaatttgtataaaacattgatttttatacaaataaaaaatgtgcgttttagatataaggatactgtgtcctgcaaaaacttatcagcaaaatataggaaactcgcagtgctcttcaggtatgtatgtataccaagtgagttccaaaatcaaagaattttaagcttaacgtaacatcaaattttatgacggttgtaaaagtgtgaagttaatccataagaatttaaatatagtgttgtcctctgctaagaaagaaaaaagtatgtacatctggtttcaattcagaaagcacttgcaaaatccaagaatccgagcataaggaagagagattgatatagtcgagttccccgactattagatacccgttactcagctggaagttaaacgagaaaattaaatatttcttggaatatcggtgaaaattggggcaaaaaattattaaatgaaaaaaattaagaattgttcaaaagcgtgggcgtgacagttttgggtggtttgtggtcgttagagcgcatgtgaacatttatttggcaaaacatatcaaaccattttcaaaaatgtgggcgtagcagttttgggcgttagttagtataggcttggcagcattagaaaaaaactttggctgtaatagtttgaggcgttcatacgtgcaggcggacggacagacagtcagtttgtcagtcagacggccagtttggcctttgctaatgatcctgatcagaaatatatatatattatatggcggtaacgcttccttttgccttttacatacctttcaacgaatctcgtatatatatatatgtaaattataattatatataatacgtaatatacgtaaattataatttataatcgcttgcttgtataaataaatgcatgccaaccatagtttatccatatgcaacgcctttatatttaagatggtaaatttataatacaaactggaaaacaaactttgtgtgttttgttaccaattacgcttccttttttcctttcctttttttgtttgtgtacacctacccgggcccattttgggagtttttaccgttcaagtagaattttcctggaactgcctggcttttaattcactttaaatcttcgagtatttggacacaagggcttatatgtgtgcctactgatataccttgctggccctataaatatatttgacctgctttggtaggaatcaaaggagaatgtaggcgtggtagtgggcgtataaaaaatgttggcatatcgatagaaattggtaagacaaatgtttgggtgtgcgataatctcaactttctagcttttatagatccttagatcgaggcgttaatacagacagacaaacggacttggcaagtcgactcggctagtgactaagattatatggtcggttcgcgttcttttacctgttacgtactttttaacgaatctgttatacctttctaatcaacgagtaacgggtattaaaatttattacaagcaatgcagcaattgttttactttgtaagggaaggaaaacaataataatgaaaaaaataataataagaaatgtttataaactaaaatctattttatatattaatgttagccctattaggattgctaaaacaaaataaggataaaacatagatttacaaatgattatattattaatttataatgttaaaaaataaataaaacagttaacctttttaccaacaaagcagctagacgacaagaaataataaagataactgagcagttgattgaagcaattaacagtggcgactttgatggatacacgtaagtcaaaagtgaataatagaatgtacacacataaataaagtaaaggatcgataattaaaatgtaaatacttatttacaataaaaagttacttataaaaaaaaaaaagttaaatcaaaactccccaaaggtacaaataaaaatttctgtttcaaaaagatatctagaaagtaaactactaaaactaaactacgtcattcaaatttattacatatttaatggtttcccagtcatttcatatggacttatattttttattacatacaatgtttttatacccttgcagagggtatattgatttcgttcagaagtttaaaacgaagtaaaaaagtcatttggtgaaagtgaatatatactttttcagtattaacagtctgacatgatcgactcagctaatgatgcaataaacgcttccttctaatcgttgcacactttctgaaaaatatatatactttaaatatacgagtaacgattactaatatgaatatgagtaaattattaaaggaatcccttggtattttgtactcagataaatataaattgaactactaatagtaccggaacttaatactcaagtaaattataaattaatctagactttttgcataacttcttagcaaaatatgtgatccgcatctaactgcctttgagccggaagcactgggtaaccttgtagaaggaattgattttcataaattttattttgaaaatggtaagttctaaaaggcatttttcgcataatcttggctattcaaatctcattccagttcttggtaaaaactgcaaagctataaacacaaccattttaaatcctcatgtgcacttacttggtgaagaagccgcttgcattgcctatgtgagacttacgcagtacattgataagtaagttcctgaactatagaaacaatatccataaaaacttatttattacgcaggcaaggacatgcacatacccatcagtccgaggagacgcgagtctggcacaaacgcgataacaaatggcagaatgttcattttcatcgaagtgcatctgccaaaataagcggagcaactacattcgattttataccccaaaaatagtgggcattaatcaatggaatataaactgtcattatgcacatgttaatgaaagtgctacatttatgtttagagaacgcaatagtttattgcgaataaagatgctagtgcaaattttattaatttatttaccttttgaaataaaactatctaaagcatatatcacattttagatatctcattgaaccacatttacttgagaaattaaagtagcaaacacaaatataaagatcaatcacaaatatttgttgtaagtgtcgtggtaccaattgtaagcttaaacgttctcaacggaagaatcaagtttattatttaactattattattattattaaaataaaattgacaactttgtatctattggaacatctaaaataaattccaataactttattgacgtctcaaaacaattgcaaacaatttagaacccttgagttatctactaggatacgaatatcatttggtttgcaaagtccgcttattctcgttcttaaaataaatacacacatataaagtttaataaaacgtgtgagtacatgcgtttacaaattactgaagttagcactatcaatatatgtaactgtaaagcattaggttattacaatgaaacatataccatttggaaaaattaagtacgtttaaaagaaaaaaggaacgaaaattagctaactgaaatataaatctaagtcccaataattgaaattatgcgactacttcgaattacttatatttacataaatatacttaggcattttatccaagttaaaaaatactttctgtatttcaccgtacatatttctttctgatgttgaacaaactttttatattttatgttttaatagaaatataactttgttcttattatttgaaaagatgtccaaggcttaaaaagtaatcctttttttgttcatagaattttaaattcccttttgttctagaaattgattgcttgtcttaaaaaaatgcatgaggggagccaaagaattatgtttaattagtatcatagttgaaaatataaattcaatccaatatccatgtaccaaaagtaattccaatcaatccattgttaagctaacagacgtaacataatcaacggagttggtatcagtatattaacttgatcttttccaatagatgccgaatagctttttgattttttacaactataacaatgctaaccgtgttgacaccgattaaaaatgtaaccgataaaaaattttaaatatcttcgaagaatttttaaagataataataaaaagaattcttgggacgctaatgcacaaacagcaggaaaaatacctatatctgtcaatagaaacattaagtataattacaaaggttattgtgtttcgctttatattgtgtttacaccttatgggcaaatagctaatttaaacaatgcgatatgataaacataacaaaaattatatttcttttttactaaatgaataattttgtggtatgagcataactgcgaaaataacttgtaacttaacttaatcattgtgaaatgattatacattttacctgatagtacatgttaaaaaaaaacttggacttaaacacatttaaaaagtttgccagatatattttaaagtaaaaaagattatactacggtctacaataagttgaactttagttgcatcccacggttttccataattactcatcaattcctttaccaatgcttgcagagtacttgattctttttgtctaatactattggtctatatacagttgcttaaattcaatttttaggacctaaatgtcttcacaaatcaattttaataataattacacgataacaattatacgaacaagctttggatacattatattgatcgaaaagctttcgctcctaaggtaaaagcctataaaataataaccgaaaataatttatgtttctcaaagtatatccaaataattataataaatttttttgttagtggatgtcctttatattttgagggaattcaaagcataatgcaattttaagcaaagtccattacacaaataattccaaatactaaaaaaaattactctatatatatgatttattaaatacaaataaatacttaaaatgaaaatcaattcccctgatcgcgtgcattttttaattctataggcaacgtctgcaatcaactggctccaactccaatcaactacttttatgtacaaaagttgtttagattacgagtcttgtttttttgaagacagacagtttcaaaactggatgttccggatagttttatagtgca

SEQ ID NO: 26756 - DNA, 3000 bp, DROSOPHILA
acgttctaaaaatttcggtatctagctgtgtgtttcgtgttctcccagctcgttaaaaacatatacatatagctttttaaatactcttataagcattttgaacaaacatttatcagatctcctgaagtttaaaatattgttattcgcaattgaaaagaacacatcaagtatagaaaacaagaaataaaactcctgaaaagtgaaatctgtagagcagttgaagatctttagtcgcaatagattttcttaagtgtgccatcgcgatggctgcaccagcagcctgtacgcgtttttcggacaattacgacatcaaagaagagttgggaaaaggagcattctcaattgtgaaaagatgtgtccaaaagtcaactggctttgaatttgctgcaaaaattatcaatacaaaaaaattaactgccagagactttcaaaaactggaacgtgaagcaaggatctgcagaaagttacaccatcccaacatagtgcggctacatgacagtatacaggaggagaactatcactaccttgtttttgaccttgtaaccggtggtgaactttttgaagatatcgttgcacgcgaattttattcagaagctgatgcatcacattgtattcaacaaatattggaatcggtcaatcactgccaccaaaatggtgtggtgcaccgagatctgaaaccagagaatttactattagctagtaaggctaagggtgcagcagtgaaactcgctgactttggtctagccattgaagttcaaggcgatcatcaggcttggtttggatttgccggcacaccaggatatctgtctcctgaggtattgaaaaaggagccctatgggaaatcggtagacatatgggcatgtggagttattctttacatacttcttgtcggttatccacccttttgggatgaagatcagcaccgactgtactcgcagataaaagcgggagcttatgattatccgtctccagaatgggatacggttactccagaagctaaaaatcttattaatcaaatgctaaccgttaatccaaataaacgaataactgcagctgaggctttaaaacatccgtggatttgtcaacgcgaacgtgtggcttccgttgtgcatcgccaagaaaccgtagactgtctcaagaaatttaatgcgcggcgcaagctaaagggagccatacttacgacaatgttggcgaccagaaatttttcgaaatttacaggcagaagtatgataactaaaaaaggtgaaggatcacaggtcaaagaatcaaccgattcatctagcactactcttgaagacgatgacataaaagcagctagacgacaagaaataataaagataactgagcagttgattgaagcaattaacagtggcgactttgatggatacaccaaaatatgtgatccgcatctaactgcctttgagccggaagcactgggtaaccttgtagaaggaattgattttcataaattttattttgaaaatgttcttggtaaaaactgcaaagctataaacacaaccattttaaatcctcatgtgcacttacttggtgaagaagccgcttgcattgcctatgtgagacttacgcagtacattgataagcaaggacatgcacatacccatcagtccgaggagacgcgagtctggcacaaacgcgataacaaatggcagaatgttcattttcatcgaagtgcatctgccaaaataagcggagcaactacattcgattttataccccaaaaatagtgggcattaatcaatggaatataaactgtcattatgcacatgttaatgaaagtgctacatttatgtttagagaacgcaatagtttattgcgaataaagatgctagtgcaaattttattaatttatttaccttttgaaataaaactatctaaagcatatatcacattttagatatctcattgaaccacatttacttgagaaattaaagtagcaaacacaaatataaagatcaatcacaaatatttgttgtaagtgtcgtggtaccaattgtaagcttaaacgttctcaacggaagaatcaagtttattatttaactattattattattattaaaataaaattgacaactttgtatctattggaacatctaaaataaattccaataactttattgacgtctcaaaacaattgcaaacaatttagaacccttgagttatctactaggatacgaatatcatttggtttgcaaagtccgcttattctcgttcttaaaataaatacacacatataaagtttaataaaacgtgtgagtacatgcgtttacaaattactgaagttagcactatcaatatatgtaactgtaaagcattaggttattacaatgaaacatataccatttggaaaaattaagtacgtttaaaagaaaaaaggaacgaaaattagctaactgaaatataaatctaagtcccaataattgaaattatgcgactacttcgaattacttatatttacataaatatacttaggcattttatccaagttaaaaaatactttctgtatttcaccgtacatatttctttctgatgttgaacaaactttttatattttatgttttaatagaaatataactttgttcttattatttgaaaagatgtccaaggcttaaaaagtaatcctttttttgttcatagaattttaaattcccttttgttctagaaattgattgcttgtcttaaaaaaatgcatgaggggagccaaagaattatgtttaattagtatcatagttgaaaatataaattcaatccaatatccatgtaccaaaagtaattccaatcaatccattgttaagctaacagacgtaacataatcaacggagttggtatcagtatattaacttgatcttttccaatagatgccgaatagctttttgattttttacaactataacaatgctaaccgtgttgacaccgattaaaaatgtaaccgataaaaaattttaaatatcttcgaagaatttttaaagataataataaaaa

SEQ ID NO: 26757 - protein, 493 aa, DROSOPHILA; identical to SEQ ID NO: 23337

SEQ ID NO: 26758 - DNA, 17312 bp, DROSOPHILA
gtagttcatcgactatttaacaacccgacagaaatgtgcaaaataaaagaataaataaaaataatgaaacaaaaaaacaaaacactttgtaaatgtgtgggcaaaatcgaaataaaagatttcaagactgaaagaagcaaattatttttcaaaaaaattggagttacagttttaggcggattaaatgtctggttctcaagaaaacaaatttgcatgctttatcccatgcctgtcgtccgtatcaacgctgttaccgctgaaactataataactggaaagtaaaacgaaaaaataatttccattttttattcctttactcaatacgtaatataggttaatagtaatgattgttgctgctcttgatcagctggctatcacactagcttcgttgaaaagtatgtaacttgcagaacgacgcgtttccgagcgtttaaactatatatagtcttcaccaggatcaatagccgagtcgaattttcatgtccgtctatctgtatgaactccacgatctcaggaactataaaagctagaaagttaagattgtgccatgccctttttaagttttcgtttattttttttcaaaaaattgttgaaattgttttgccaattttaatcggtacgccagaaaaatgtttaatattctcgttcatacttccactagctgagtaacaattatctgatagtcgaaaagctttactatagcgttttctcttgttttaattctgcaatggattcgtattttttcagggccatagtttaatttgatattgaaaacgccactgagtggttgatatgcatatcgatgtaaggcccgtttacactgcactaaccgcggagttatggttttacatatgtagatacctttgctattttgatgtgcatggggaacagttaagtgtagctttggtaaggagttgacccctatgtttaataatcgagtttattacatttttcgtctatcgaatgtcatgtcatctctaggcaacaacaaggtatcagattcaacgtttgagataggataatacattttcagacatttttcaatttgtgcccccgcacatgttgtttcttgcgaagtatggtgttttttcgtatgatttcatgatcacatgaaaaaacttcaaccaccaaaatcttcaaaatggaggtcgagttttctagtttaagcaacgtgctttaagagaactcacttgaattaccaactcaataagaaacctgcggctgtttaaaataacataacccttatattattacaaaccatttaaaatttgaagaactatatgtagattgctggtctgttttgcatcgactccactgagtaatatagaattttaaaattggaatagcgagacattcttttaattttaccgatatgtgtttctatgaaataagttacctaatctgtgctctgaatacttctgaattacattggcgagctttactttacgagcttcatgcccgatcttatacagagaagaatgcaagtttatactatgatggccgggggattctcaaatacatgcagtacccctttggataccatagaaccaacgctgtctgaaacttttgaaccagctagtgattactttataacaaaataatatttagagaaggcccatggtacctaaatggtacaacaatgtatgtatgtttgtacgttgtaagcaattttttgtataatttttgtaaaactgatttattatcttatatttaaaaatcgtttagaaaacaagaaataaaactcctgaaaagtgaaatctgtagagcagttgaagatctttagtcgcaatagattttcttaagtgtgccatcgcgatggctgcaccagcagcctgtacgcgtttttcggacaattacgacatcaaagaagagttgggaaagtaagtttaacaaactcaaggttaataaatttattataataacccgtctattaacatttcagaggagcattctcaattgtgaaaagatgtgtccaaaagtcaactggctttgaatttgctgcaaaaattatcaatacaaaaaaattaactgccagaggtaaggctttctgtgttctatgtaggttataaatcacatatgtacgcatttatgctatgcacacgcatgtagggaaactaagtgctgtttttaggtaattcgtcgagtacagtaaaagggtatactagatccttgatccttggaaagtatgtatattcttgatcaggatcaatagccgagtccgtctctccgtatggtcgtcgagatctcagaaactatacaagctagaaggcatacagattttagaaacaaatacgcagcgcaagtttgttgacccatgttgccacatgcgccacgccctcacttttgaaaaatgtgttgatattttttcacatttgtattggtcttgtaaatttctatcgatttgctcaaaaaaaagtttgccacgcccattctaacgccctttaacttctatcgatttgcttaaaagccgccaaccggtcacgtccacactttggaccaatttttaaacttttttcttattttattccccaatatctatcgttatcctagaaaaatgatgaaatttcgcgttcccattcacactagctgagtaactggtatctgatgccgttttttcaacggcgatatggcatatcgtaagaaatcagtagtaaacattgactgtcaaaaagttttcctgtaaaatgtactttctttttgctaagtacgcttttggaagggaccattctttttgtgtaatatcttcgtcgtccctatctatttgccacacaagtatcaaatagttctacagtaattaagttgtatttcttggtgttgtgctatttagtaattaataaatttttactgccaagacgtggccaaaataattttggaatagcagtattggcaaagtgtgtaatttacaaaaaatatattaaataacttttaagaagtttgagcatgacagctgggacaaattttgggcttagagagaaccatttgcttgctcgccaaaaacctcttattaacatatttgtacacatgcatgtatgcatataagagatgcttataatatatatatatatatattttttttttttgcttttagactttcaaaaactggaacgtgaagcaaggatctgcagaaagttacaccatcccaacataggtatgcaacgtgtatataaatataatttacttacttattctttaaagatacgtttttctgaagatgtatgatctacataaaagtagacgaacatggcctaatatcactttgaacatctactatacataatttttatatgtacattcaatcacggcttagaccccagtagtgttgatgacttgcaatgtgatcctgataaaggatggtttgacgtccacggtaacacaacgaagaaaaaaataaaatagagtttagtagatatatcaatccgcatctgcaagcaacattccattcctcgccctccctactctccaataacaaatcttccaagtaatttataattataataattataaaaacttgcagaacagcaaaaaccgaactcatgcaatagactttcctctcactaaaagcgtaacctaacaaaacagttatttacacggacagttcaaatctagaaacatcacttcctccagcgtcaccgacaaaatatataatatgttcaaaatgtattttataaacatatatttttatagcctttaaggcttataatcattgtcatccgtaaaaaaaaaacattaaatacaaatgtatacaactaataaattgttaatatgtacaatttcagtgcggctacatgacagtatacaggaggagaactatcactaccttgtttttgacctgtaagcattaacctgcatagactccttaccaaatatttaaattgcctatccccaaaagtgttttaaaaatatgagtttctaacaaatgcttgtaaatgtggcaatgactcgactattgtttattgagattcatacttcatccttttccctccgttcgttcatactataatatgaatatgaatcaaattttaaagccgcaatataatatatataatataatatgaatcaagttttagccgcaatatatttttgttatattagagatgtgttttctgctgtcgcaacttaaatataacctaaatttaaatttagagcttcaatcgcaaaatttgactatgcctacatacatttgcagtgtaaccggtggtgaactttttgaagatatcgttgcacgcgaattttattcagaagctgatgcatcacattgtattcaacaaatattggaatcggtcaatcactgccaccaaaatggtgtggtgcaccgagatctgaaaccagagaatttactattagctagtaaggctaagggtgcagcagtgaaactcgctgactttggtctagccattgaagttcaaggcgatcatcaggcttggtttggatttgccggcacaccaggatatctgtctcctgaggtattgaaaaaggagccctatgggaaatcggtagacatatgggcatgtggtaagcaattataattgttgtaacatttgcatgcacatgcatgccaaacggcagtcggttacacagttcaacaactattttatttttcctcaggagttattctttacatacttcttgtcggttatccacccttttgggatgaagatcagcaccgactgtactcgcagataaaagcgggagcttatgatgtacggaaactataataatttatgtggattcattatatttaaatataactttattttagtatccgtctccagaatgggatacggttactccagaagctaaaaatcttattaatcaaatgctaaccgttaatccaaataaacgaataactgcagctgaggctttaaaacatccgtggatttgtgtaagtgcagactaatttttctcttaggtttacataaagataatgaaaaaacattgttacagcaacgcgaacgtgtggcttccgttgtgcatcgccaagaaaccgtagactgtctcaagaaatttaatgcgcggcgcaagctaaagggagccatacttacgacaatgttggcgaccagaaatttttcgagtatgtaacttaacttaattaatcttgaccacatcaatatacttggcgtcaacacaaaaatatacaaaaagaataataaaaacgctatggccgatttcgttgacaattatatacccgttattcagcttgtaggattgatataaatatatttaacttcgtataaaaaataccctttactcgtagagtaaaaaggtagactatattgtttgaaaagtatgtaacaagcagaaagaagcgtttccgagcataaatagaataatattctcgatcaggatcaatagtagagtcgatctggaactgtccgtccgtatgaacgttgagatcttaggaactataaaaacaagaaggttgagattacgcaacctttattgatccatataaacactctaacgaccacaaaccgtacaaaactgcgacgcccaaacttttgaaaaatgtgtagatattttttcacatttgtattagtcttgtaaattttttatcgatttgcagaaaaaattgagacctcgttcatacggacatggccagatcgagtcgggtattgatcctgatcgagaatatacagttgcggtaacaaaatagcaccataagcacattttgtgtttgtcccagcgtttctccattttctgaaactttttcaaaaaaaataattgttaaaacaaaaaaaaccttcaaatttaggcggtaacaaaaatataactgttcctcgtagtttgctaaaactaaccaaaaaaataaaaaaataattcaacaaatggattatatcttaagaactatgtttaaagaatcttaatatttggttgcgggaccgcgcatcgccctggcatagagtccaccaagtcctggcctagcttttgaggaataaaaatgaccagaccccaaagatcgtcgttattattgggtttggcttcagaaacctatttttgacgtccgcccaaaggttttcgattggattcaagtcgggtgactgagcaggccagttcattccttgaatcgatttctgctttgaccactttcgagctttcttgctcgtgtgttttgagtcgttatcctgttgaaatgtccaaaccaacggcatttcatcctcggcatatggcagcatcacattttccaggatatctgtgtaaatgtgctgatccatgatgccttgaatccaatggatcggacctactacattgtatgaaaagcacgcccataccatgatgtttgatcccccatgctttaccgccttaaaggtgaagccgaggattatattcagttcgcggtggtagccgaacataagacctagagccattcccaccaaacaacacaattttggacattgagggctttcttcgccgtgtttcgttcttttcgacaaacagcactgctttgcggatcattttgcttgaacaaccgacaatgcgaccaatttcagcgtaggttttaccttcagagatcacgtttttaatcaaatttcttttttcgacggtacaatgctttccgtgacccatgactagagaatttttggtcttcgtttggaaaaaattcagttaaaacctttaatacaactccttatttcaaaatttttcgaaaaaaacccaaagcaatcactcctattattttaatcagcaaatacgtggtcagtgctatttttgttaccgcctcatttcgcgcacttttgcagcaagtgcccaccaaaaaaaagaaccgttacattgagagactaaaaatttcttgctcagagagccaacatatggtacttattattcatgcaatctgactttaaaaaatataaacatttaataattttttttaggaaatatacttttcacctgcagtagtgctattattttagcggcagctgtatacactttatatggtcggaaacgcttccttttactccacgagtaacgggtataataattaattaaaaaaaaaaacaacaaaaacaaaacatgcacgtacatattaaggtttaattaaatattataagatttaaactgattttaactaaaagtgtatttaatttacaggcagaagtatgataactaaaaaaggtgaaggatcacaggtcaaagaatcaaccgattcatctagcactactcttgaagacgatgacataaaaggtaagtaaataaaatatgtatttaacgttcatttatagtaaccaaataagtgaagacatagtagatcaggattcactatcaaccactatagctttagaacaagacatgggtttttagtgtaacgtagttacatagttttcattggaagaggctttgtgatcatattggaagtttaatattctgtaaagtggtgtccccattcattaagatatagttgctgttatatatttacattatttatttatttattttatggcaactttaggctgcatgtgatttattattattacattttaacaaatcaacttaaattgaagcattgtttacaatttcttattaaaggaatccataaatttcctcaagcttacgaaaaccaggtagtttccctaaaactagtggaaattaccagttttaacacattaattgtaaacctcatacttaaatgtatcgttaatataattttatctaatttttaaattggtgttagtattgtattttttgcacgtcttcgcttagacatacatataccaaataataaagtcaatagaaagttttgcacttttatattgtacaagaatttgaaaaatatacgatatacttctctttactttcattcccatactttcattactacttctcatcgttataattctttaatttaatgcaacaaaatgtaccttcgttttgatcttaagtgttataattcggtatacacgagttttttttcaaaaatcaaaagtgcttatatattataagatttcataagcttcggcttgagtaattggttccattcctgttttttatataacattttattatacccgttactcgtagagtaaaaaagtatactacattcgttgacaagtacgtaacacgcagaaggaagcgtttccgaccatataatgtatattattcttggtcaggatcaatagccgaatcgatttggccatgtctgtctgtccgtatggacgtcgagatctcaggaactataaaacccatgttgccacgcccactataacgctcagaaaccacacaaaactgccacgcccacattgaaacattgttggatactttttcataattttattagtcacattccatatgaccgttttaagacataatttgtatattatttgaaaagacgaaattatagttaaaaatatattgaaaatggtcttagtactggtatttttaaaacgaagaaaatatggaattaaagctaaaattacggttttagactttataaaaaactagttttatgctgaattgtcggtataaaaatattgtattacaaatattttgaagttgaagaatgtagtaaaaaacagtgtttcgagtttgtttgaattgtaaaaaagttaatccgccatatttttgccttttttaaagccaataatatgcaaacggattcctgttttacatttatttcaaccattaacattggggatttcaaatgcgtattttgaatttattataagttacaaccaaacttcattgcattaacttaataacagaaattgtatggtttaaactaaatcacaaaaacaaacacatttcattattttaacgtagaggaaatattgggacaattgcattttcaaatatgacatttttgtacatttttttcctagaagataaaaaaggaaccgttgatcgcagtactacagtcgtatcaaaagagcctgaaggtaaatgctaacatgaattttggattatttgataaaacaattttttttttgcatatttataattaaaatatacatttatttatccaattattcttagagaaagcagtacttataaatatatatatgttagtatacagtgcagggtataaaatactttataaaactaattaatcgaataataagttagtttagaatatatcgcaaattagagttacttagaaaatatcgcattgctgccagcgtgacattactttcacagtttatgcactttttgtcaattataaacagattagatcatatttaaaagattggtatctatttccatttcttatattggtttttatttcagctttgaatcttctccatttggattgagacttcaatgcaacaatatgtttaatattattaacataattttgtcgttactacaaatattattttttcaaatttaatacaagatagcagatattgaaagtaatttttataccctttactcatagagtaaaatgagtaacagccaaaggaagcgtttccgaccatataaaggaactatgaaagcaagaaggttgcgattaagaatacttgaggatctgtgccaatttgatgacccaagttgccacggccattctaacgctcacaagttgcccgaaactgacacgcccacatttttgaaaaatatttcgatttttcttcctttattatttaatcatcagcagaactagtttacagatgtgctccattagattccttgacaaacgtttccgaccatataaagtatacgtaatcagaatcaacagccaagtcgatctggccatgtccgtatgaacgcgtcgatctcagtaactataaatgctagaaggatcagactttagatatatatgacgcagagcaagtttattaacccatgttgcctcgcacactataacaccctgaatcatttttggatagtttttcataattttattagtcttgtgaatttctatcgatttgccaaacaactttttgccccgcccactctaccgctctaaaacttcccaaaatgccacgccggcatttttaagaaatgatttcatttttttgtggattaaatcagtttagaaaatttctatcgatatgcctaaaacattttgtctactgacgcctaaaaatagcccaaatatatcccatccacaccttagagtagtaaaattaattttttccctcattttcgatcaatattcccttaaaatgttgaaaattgtcggagtaacgggtatctaatagtcggggaagtcgacttaagcgtttatctcttattttctcataaaatagatattttgacatacatttattatcaaatatatatatacatatatattagatattagatattatttcaattaattttccgacctgttcctgggagatttagatcaaacgagataatatatcgtcggaaaactagtgtacacacaattagaaaacttgaccacctgtactttcttcactgcgttgcaagcttctgactaaaatcaatatatgcattggaagggtataaaaaaaagagcgctatgctccagttcctctgctaccagtcactctatctgagtacaagcgagtgaagaaaccaataaataataaatgaaaacaataaaataaaatcaaattgtttctgcgcgtgcgcgacatttttagccattgtgttagtcttcgagtagtggaaataatttctatacccatcgtaagcgaaacataaatttgtatcccaaattataaacagtaattttaataattaataaaaacaatttagaagaataaatatttatataaaaaaaatcaccattacaggcttgcaaatttctgtctatctgcaaggatatgaagagatttttattttaaagaaggcagagtgctatatatagtgggattcttcgattattagatagttactggaaggcgaacgagaaatttcatagttttttgggcatatcgatagacatttacaaaactagtagaaaagtataaaaatatgttttaatagtgtgggtgtggtagttttgggcagcgtctacgtctctggaatctgcttgcctaatctcaactttctatattttattcttcctgagatctcgaccttaacaaggatggacagacggacggacagaaagacatggcccgatcaacgtggacctgatcaaggtggtcggaaactctttcttctatgcgatgcaattttttcaacgcatctaatatactctactttagtcgacgagtaacgagtataattatttctatatgtatttctatggtatttctatagtcaaatacagtataatgtgcttaattgcctcaacacttaactgcacattacagataagtgcccaatcatacgccaaactgcgcatgaccgtttacatagtttgtttacaaaccaatttttcgaaattggtaaaacaaagcgaaatatcgggcttacaatcaaagacaaactatacataagcgaacaagttaaggataatgttaacaaagagagctttgcagttaaatacaattgtgatctttcaacaataaaccgcatcatacgtaaggggagagtgacacacaacaatcggccacaacagcggaacttaaatgcaagcgccaacggaaaggaaagcacgctttggtagagagcctgaattgttacggtaccttgacgacaaaagagataacaagtgatcttctgaatgagcacactgaagatggaaggtcagcatagcgacgatgacgatgagaatagcggtgatgaagaaccaaagctgccaactgtcaaagaaggttttgatgctatcaagactctggaacaattaggaatggtgtataattgttctgggttacttagagagcttcgaaaaattgaggaaaagatattgataataagggtaaagaacgttgttcaaaaaaatatatcagattagtattttaagtaatagggaacaataaattccatacatgaatgtatacaaaaatgtgaactatatctgaattgcgtgcatataaaagtgcatttttaagataattgcacatttttttgagttaaacatggtgaggcagttaagaacatattatactttatttaaaaaattaaagtgaattatacgctttattgcatcttgttgcatattaaatgctaaatcgggtctttttgttgaagaatgggtatatccatcaaattagactggagctatgtatgaattaaatgtttattcacaaaaacactattgccgttcgtagactttttattacatatttctaaccatttccattttatttgcatcacaaaatgtattttttatttcctattttatttaaatcatttccaatttgtataaaacattgatttttatacaaataaaaaatgtgcgttttagatataaggatactgtgtcctgcaaaaacttatcagcaaaatataggaaactcgcagtgctcttcaggtatgtatgtataccaagtgagttccaaaatcaaagaattttaagcttaacgtaacatcaaattttatgacggttgtaaaagtgtgaagttaatccataagaatttaaatatagtgttgtcctctgctaagaaagaaaaaagtatgtacatctggtttcaattcagaaagcacttgcaaaatccaagaatccgagcataaggaagagagattgatatagtcgagttccccgactattagatacccgttactcagctggaagttaaacgagaaaattaaatatttcttggaatatcggtgaaaattggggcaaaaaattattaaatgaaaaaaattaagaattgttcaaaagcgtgggcgtgacagttttgggtggtttgtggtcgttagagcgcatgtgaacatttatttggcaaaacatatcaaaccattttcaaaaatgtgggcgtagcagttttgggcgttagttagtataggcttggcagcattagaaaaaaactttggctgtaatagtttgaggcgttcatacgtgcaggcggacggacagacagtcagtttgtcagtcagacggccagtttggcctttgctaatgatcctgatcagaaatatatatatattatatggcggtaacgcttccttttgccttttacatacctttcaacgaatctcgtatatatatatatgtaaattataattatatataatacgtaatatacgtaaattataatttataatcgcttgcttgtataaataaatgcatgccaaccatagtttatccatatgcaacgcctttatatttaagatggtaaatttataatacaaactggaaaacaaactttgtgtgttttgttaccaattacgcttccttttttcctttcctttttttgtttgtgtacacctacccgggcccattttgggagtttttaccgttcaagtagaattttcctggaactgcctggcttttaattcactttaaatcttcgagtatttggacacaagggcttatatgtgtgcctactgatataccttgctggccctataaatatatttgacctgctttggtaggaatcaaaggagaatgtaggcgtggtagtgggcgtataaaaaatgttggcatatcgatagaaattggtaagacaaatgtttgggtgtgcgataatctcaactttctagcttttatagatccttagatcgaggcgttaatacagacagacaaacggacttggcaagtcgactcggctagtgactaagattatatggtcggttcgcgttcttttacctgttacgtactttttaacgaatctgttatacctttctaatcaacgagtaacgggtattaaaatttattacaagcaatgcagcaattgttttactttgtaagggaaggaaaacaataataatgaaaaaaataataataagaaatgtttataaactaaaatctattttatatattaatgttagccctattaggattgctaaaacaaaataaggataaaacatagatttacaaatgattatattattaatttataatgttaaaaaataaataaaacagttaacctttttaccaacaaagcagctagacgacaagaaataataaagataactgagcagttgattgaagcaattaacagtggcgactttgatggatacacgtaagtcaaaagtgaataatagaatgtacacacataaataaagtaaaggatcgataattaaaatgtaaatacttatttacaataaaaagttacttataaaaaaaaaaaagttaaatcaaaactccccaaaggtacaaataaaaatttctgtttcaaaaagatatctagaaagtaaactactaaaactaaactacgtcattcaaatttattacatatttaatggtttcccagtcatttcatatggacttatattttttattacatacaatgtttttatacccttgcagagggtatattgatttcgttcagaagtttaaaacgaagtaaaaaagtcatttggtgaaagtgaatatatactttttcagtattaacagtctgacatgatcgactcagctaatgatgcaataaacgcttccttctaatcgttgcacactttctgaaaaatatatatactttaaatatacgagtaacgattactaatatgaatatgagtaaattattaaaggaatcccttggtattttgtactcagataaatataaattgaactactaatagtaccggaacttaatactcaagtaaattataaattaatctagactttttgcataacttcttagcaaaatatgtgatccgcatctaactgcctttgagccggaagcactgggtaaccttgtagaaggaattgattttcataaattttattttgaaaatggtaagttctaaaaggcatttttcgcataatcttggctattcaaatctcattccagttcttggtaaaaactgcaaagctataaacacaaccattttaaatcctcatgtgcacttacttggtgaagaagccgcttgcattgcctatgtgagacttacgcagtacattgataagtaagttcctgaactatagaaacaatatccataaaaacttatttattacgcaggcaaggacatgcacatacccatcagtccgaggagacgcgagtctggcacaaacgcgataacaaatggcagaatgttcattttcatcgaagtgcatctgccaaaataagcggagcaactacattcgattttataccccaaaaatagtgggcattaatcaatggaatataaactgtcattatgcacatgttaatgaaagtgctacatttatgtttagagaacgcaatagtttattgcgaataaagatgctagtgcaaattttattaatttatttaccttttgaaataaaactatctaaagcatatatcacattttagatatctcattgaaccacatttacttgagaaattaaagtagcaaacacaaatataaagatcaatcacaaatatttgttgtaagtgtcgtggtaccaattgtaagcttaaacgttctcaacggaagaatcaagtttattatttaactattattattattattaaaataaaattgacaactttgtatctattggaacatctaaaataaattccaataactttattgacgtctcaaaacaattgcaaacaatttagaacccttgagttatctactaggatacgaatatcatttggtttgcaaagtccgcttattctcgttcttaaaataaatacacacatataaagtttaataaaacgtgtgagtacatgcgtttacaaattactgaagttagcactatcaatatatgtaactgtaaagcattaggttattacaatgaaacatataccatttggaaaaattaagtacgtttaaaagaaaaaaggaacgaaaattagctaactgaaatataaatctaagtcccaataattgaaattatgcgactacttcgaattacttatatttacataaatatacttaggcattttatccaagttaaaaaatactttctgtatttcaccgtacatatttctttctgatgttgaacaaactttttatattttatgttttaatagaaatataactttgttcttattatttgaaaagatgtccaaggcttaaaaagtaatcctttttttgttcatagaattttaaattcccttttgttctagaaattgattgcttgtcttaaaaaaatgcatgaggggagccaaagaattatgtttaattagtatcatagttgaaaatataaattcaatccaatatccatgtaccaaaagtaattccaatcaatccattgttaagctaacagacgtaacataatcaacggagttggtatcagtatattaacttgatcttttccaatagatgccgaatagctttttgattttttacaactataacaatgctaaccgtgttgacaccgattaaaaatgtaaccgataaaaaattttaaatatcttcgaagaatttttaaagataataataaaaagaattcttgggacgctaatgcacaaacagcaggaaaaatacctatatctgtcaatagaaacattaagtataattacaaaggttattgtgtttcgctttatattgtgtttacaccttatgggcaaatagctaatttaaacaatgcgatatgataaacataacaaaaattatatttcttttttactaaatgaataattttgtggtatgagcataactgcgaaaataacttgtaacttaacttaatcattgtgaaatgattatacattttacctgatagtacatgttaaaaaaaaacttggacttaaacacatttaaaaagtttgccagatatattttaaagtaaaaaagattatactacggtctacaataagttgaactttagttgcatcccacggttttccataattactcatcaattcctttaccaatgcttgcagagtacttgattctttttgtctaatactattggtctatatacagttgcttaaattcaatttttaggacctaaatgtcttcacaaatcaattttaataataattacacgataacaattatacgaacaagctttggatacattatattgatcgaaaagctttcgctcctaaggtaaaagcctataaaataataaccgaaaataatttatgtttctcaaagtatatccaaataattataataaatttttttgttagtggatgtcctttatattttgagggaattcaaagcataatgcaattttaagcaaagtccattacacaaataattccaaatactaaaaaaaattactctatatatatgatttattaaatacaaataaatacttaaaatgaaaatcaattcccctgatcgcgtgcattttttaattctataggcaacgtctgcaatcaactggctccaactccaatcaactacttttatgtacaaaagttgtttagattacgagtcttgtttttttgaagacagacagtttcaaaactggatgttccggatagttttatagtgca

SEQ ID NO: 26759 - DNA, 3468 bp, DROSOPHILA
ttcaacgtttgagataggataatacattttcagacatttttcaatttgtgcccccgcacatgttgtttcttgcgaagtatggtgttttttcgtatgatttcatgatcacatgaaaaaacttcaaccaccaaaatcttcaaaatggaggtcgagttttctagtttaagcaacgtgctttaagagaactcacttgaattaccaactcaataagaaacctgcggctgtttaaaataacataacccttatattattacaaaccatttaaaatttgaagaactatatgtagattgctggtctgttttgcatcgactccactgagtaatatagaattttaaaattggaatagcgagacattcttttaattttaccgatatgtgtttctatgaaataagttacctaatctgtgctctgaatacttctgaattacattggcgagctttactttacgagcttcatgcccgatcttatacagagaagaatgcaagtttatactatgatggccgggggattctcaaatacatgcagtacccctttggataccatagaaccaacgctgtctgaaacttttgaaccagctagtgattactttataacaaaataatatttagagaaggcccatggtacctaaatggtacaacaataaaacaagaaataaaactcctgaaaagtgaaatctgtagagcagttgaagatctttagtcgcaatagattttcttaagtgtgccatcgcgatggctgcaccagcagcctgtacgcgtttttcggacaattacgacatcaaagaagagttgggaaaaggagcattctcaattgtgaaaagatgtgtccaaaagtcaactggctttgaatttgctgcaaaaattatcaatacaaaaaaattaactgccagagactttcaaaaactggaacgtgaagcaaggatctgcagaaagttacaccatcccaacatagtgcggctacatgacagtatacaggaggagaactatcactaccttgtttttgaccttgtaaccggtggtgaactttttgaagatatcgttgcacgcgaattttattcagaagctgatgcatcacattgtattcaacaaatattggaatcggtcaatcactgccaccaaaatggtgtggtgcaccgagatctgaaaccagagaatttactattagctagtaaggctaagggtgcagcagtgaaactcgctgactttggtctagccattgaagttcaaggcgatcatcaggcttggtttggatttgccggcacaccaggatatctgtctcctgaggtattgaaaaaggagccctatgggaaatcggtagacatatgggcatgtggagttattctttacatacttcttgtcggttatccacccttttgggatgaagatcagcaccgactgtactcgcagataaaagcgggagcttatgattatccgtctccagaatgggatacggttactccagaagctaaaaatcttattaatcaaatgctaaccgttaatccaaataaacgaataactgcagctgaggctttaaaacatccgtggatttgtcaacgcgaacgtgtggcttccgttgtgcatcgccaagaaaccgtagactgtctcaagaaatttaatgcgcggcgcaagctaaagggagccatacttacgacaatgttggcgaccagaaatttttcgaaatttacaggcagaagtatgataactaaaaaaggtgaaggatcacaggtcaaagaatcaaccgattcatctagcactactcttgaagacgatgacataaaagcagctagacgacaagaaataataaagataactgagcagttgattgaagcaattaacagtggcgactttgatggatacaccaaaatatgtgatccgcatctaactgcctttgagccggaagcactgggtaaccttgtagaaggaattgattttcataaattttattttgaaaatgttcttggtaaaaactgcaaagctataaacacaaccattttaaatcctcatgtgcacttacttggtgaagaagccgcttgcattgcctatgtgagacttacgcagtacattgataagcaaggacatgcacatacccatcagtccgaggagacgcgagtctggcacaaacgcgataacaaatggcagaatgttcattttcatcgaagtgcatctgccaaaataagcggagcaactacattcgattttataccccaaaaatagtgggcattaatcaatggaatataaactgtcattatgcacatgttaatgaaagtgctacatttatgtttagagaacgcaatagtttattgcgaataaagatgctagtgcaaattttattaatttatttaccttttgaaataaaactatctaaagcatatatcacattttagatatctcattgaaccacatttacttgagaaattaaagtagcaaacacaaatataaagatcaatcacaaatatttgttgtaagtgtcgtggtaccaattgtaagcttaaacgttctcaacggaagaatcaagtttattatttaactattattattattattaaaataaaattgacaactttgtatctattggaacatctaaaataaattccaataactttattgacgtctcaaaacaattgcaaacaatttagaacccttgagttatctactaggatacgaatatcatttggtttgcaaagtccgcttattctcgttcttaaaataaatacacacatataaagtttaataaaacgtgtgagtacatgcgtttacaaattactgaagttagcactatcaatatatgtaactgtaaagcattaggttattacaatgaaacatataccatttggaaaaattaagtacgtttaaaagaaaaaaggaacgaaaattagctaactgaaatataaatctaagtcccaataattgaaattatgcgactacttcgaattacttatatttacataaatatacttaggcattttatccaagttaaaaaatactttctgtatttcaccgtacatatttctttctgatgttgaacaaactttttatattttatgttttaatagaaatataactttgttcttattatttgaaaagatgtccaaggcttaaaaagtaatcctttttttgttcatagaattttaaattcccttttgttctagaaattgattgcttgtcttaaaaaaatgcatgaggggagccaaagaattatgtttaattagtatcatagttgaaaatataaattcaatccaatatccatgtaccaaaagtaattccaatcaatccattgttaagctaacagacgtaacataatcaacggagttggtatcagtatattaacttgatcttttccaatagatgccgaatagctttttgattttttacaactataacaatgctaaccgtgttgacaccgattaaaaatgtaaccgataaaaaattttaaatatcttcgaagaatttttaaagataataataaaaa

SEQ ID NO: 26760 - protein, 493 aa, DROSOPHILA; identical to SEQ ID NO: 23337

SEQ ID NO: 26761 - DNA, 15239 bp, DROSOPHILA
atttgtatacatatacgtgtcttgccttagagctagttacaacaggattcctcccaaaaaaaaagcacaaaaaaccaactacaacatatgggttaaagtgaggaacatacaaaaaaaaaaaaagtagtaaattaattcttgtggtttgagaacataaaagtttcagttgttgtatatggtttcgatgaatgctgatactacgatgatcaatataaggtattcatagttttatatatataagctttttatatataatctttaatttgaagattgccttcatcatacgcttctcaactctctggttatgtacgccataaaaatccgacatttgcggagtttgtggatgatgccgttgccgttgttgaagtggaagttgatgcagccgctgaagttgttgcagctgctgtggtgttgttgaagctgttgttcagatgcagctgctgcaacttgagtgtctgctgatgcagttcttgttcagtcgttgacatattaaaactgaagtcgtgctgcggcgaagtgtggtgattattagtgttggtggtgtgttttctgctacaactgtcgggatcgctgtttccaacgacgccgctgctgcagttcttgctgtaattggtgctgctagctgcattgttggagaagttgctactgctagctgcattactggtgaaatttccgttgctgttggtgtaattgttgctgccagaaagatggttggtaaagttgctgctgccagccaaattactggcaaagtgtccactgtttgtggggttgctgtttgttgagttgttggtgaagttcccactgcttgtgggattgttgggaaagttgctaccgctaatggcaccgttactggtaaaagcgctaccgttgctgtaattgccagtaaaactattggattgattggaattattattgaagctattgttgttgcttatggcaagcaactgattgcccagagtgctactgctgccattgtggtgtgattggcgtgattgttgttgaaacggcggcgaagatggcatagtcaatggctgctgttgctgtgattgttgatcctgcggttgttgcaattgcaattgttcctgaagatagtgaagagcagcaactccattctgacgtattgtattgaagttaatgttattggtgttcgacgtgttaatgttattattgcttccatttggacttatattgtgagcagcaacattgcccaggcgttgttgttgtgtttgttgttgatggtattgctggtggtaaagtagcatgttgttgtcgttgccattaccattgccaatactattattggagctactggtgaagcccaacgcctgctgctgatgttgtagtagttgctgctgctgttgcggtgtcaattataagtaaggataatggtacttcctacggtacaatccgtcaagcaaatcggcaaagttttcgcctagattgataaaaggtgcgaaaacaaaaaaaaaaaaggttaaaaaaatttattagtataatgtttcaatagtgttttaagctatcatgcgtctataaaaacaagtatattagaaaaaaaaaaaacctaatatataactatcccttcattctggtagagccctgatttaactagcctaggtgagagagattaattaggtttagtattttttttttagagttttgtttgccttcttgatttagatggtgttgggttagtgtttattgttgtttgttttcttgtatttttgttacttttggtttactttagggattttgtagttttaattcaagctgaagttttgtaattgcgttatatttatttgtttttttttgattacaaaggatttcccactcgataagacacacgatttaagggttttcgtaattttcattcaacgtgccatgttttctgtttccatttcagtttggtggaactattgggatgggacagggacgtggattggtgttatcaaaataaattgatgactgatctgttgatggtctatttatgtgtgttgttatgttgtgactgatctgtgggcgtaagtcaaacactcacatacaaatattcaagtgcgttcaaagaacattagcaagcaaaatatgtcttatatagttgttgataaatatctagttggagatttaaataggtatttggtttagtttaactttttttagcgagaaacatttacgaactggataactttgatgaagtaacaggagttcgcagagcagacaaagcagaccgttaggggattttggattaaacgataatctaatgaaaaacacgaaacaaaattttcaaaacgaggggctctaagagatctcggttttagtttttataaggggtgaatattaagcacaagcaaacacaggttttgttagcagtttaactcttgggaaggccagcattagaaatttaaatttaattttagtttttttggttttttttttcattcaatttgagttcgaattgggtttgatctagaagtacaatttttttttggcagtttttcaattggaactgttccaaatagcgcccaagaagatgctcgaaaagaaaaaagcgttagagcaaatgccaaggagccaaaagtttagccttgtaactaaatccattttttttttagagagagagatggtttagtagctggatgatgacatgagagaaagtaataacgaaaaacatggcacgctttaaaaagaaaattcggcttattttttaagtatttttccattataaatatatatatatatattatatagattgatgagaaatttaaaaactgaaattgaatatttcttttccatcttctcaattatgtgggagcgcatgagtgtgcgtgtgttgtgtgtgtgtgtgtggcagtgtaggtgtgctctcttcttgatagactctacttatataaattatggactctgttatttgatctctcggctagatctgtcttaagggctctcaacaaataaaaagttctataattatttgcttttctgcggcagaaaaacaagaaactatgctagtttacgactaggagtagttaattagaaatataattatataaaaaaggaataattactatcgagaccaaagatagcatcgcatatagcatcgaataatgagcgtaatttttccatagctccgtctataatgaaaaataggaacaaaacgaaaaaaaaattgtacaacttggattagttgcggcgcatattgagttttttttgtagggttgcttggttttggatgaaatgagggaataaagattgtttttttttttttttttggtttatggagattatttaattattaagatcttgtcttttctttgttttttaacatttcttttgtcaacaacaatcaataaaaatgagatgagtcggtcgtttttccttctactgaaggaaggaaaagcgatcagttctgggttagtgctgtgagtagataaaagtacaatagagtatctacggcttggaaacaacaaatgcgaaatacaataagaaacacaaactacgggttgaacttgaagtcgggacaccggtaactaaagtcaagctaaaaaaaattaaaccaaactaaaaatgagtaatttaaatgcaaactgccttcggcgaagaattccgaagttctgagatactcttgctattgatcagggtaatcgttaacacctttttactatgaccattgtattgcaaggatatcgtattatacttttcaagcttaacacaacacaaaatgtttcgttctgtcagataataataaatacaataatttaggcatatgataggttattaatctttttcaaatattttccatttatgttttgaataaaatatgtttttttcccaaacatagcatttttatataaagattatatccaatttttttttagcatttcctaaatcactcaaagtaaaagaatgcaaatggtattttgataaaatggaaaacaacaacaacaaaaggccattaaaaatgtaagtaaatgtaaggttccaagtaaaataaatggagtgttagcaatatctacaaataagtttaaataattttgcacatttgttgcttggttttagtagaaatgattgtaaatttaattatataaatatataaaattgattccttaaatatccacactgaaacactgacacggaaaaaaatatacaaaataaatttagttttgcgattttttgattttcttttttttttttgtttgagagcactaggcagagatgagtaacaaaaaaaaaacagcttagcacacaattttcacttgaagaaaatgttattatgaaatacactggcaaaaaaagttaaaaaaaaatatttgttttcttttttgcactggaatcgataaaagggtgtatgggttcaaagagagagacatcaacatggttatggtttcgtgtctattttatcgttgatatttcgatccattcataaaaaaaaatatcacattaaaaaaatagaaaaaaaaagatggggatttatgagaggggttctgagaggttcgtttttagaggggtggttgtgtgacttttggcagcaccccgttatcgtttcggttgagtgcgcgcatacttaccatgcgcctttcacttctttctaatcactttcacagtgtctctgtctgtcacacagtcgtccgcctctctttgtctcttgtgcctgggtactgtaactgtaacgggaaatctgcactcgcgctcacgttcgcaccctcttgcacgcacgcgtgatagatggggaatggtgatatcctgccaactcctagttgcctttcaacagctaacgcactctcgttcacacacacaaacacacacacacacactcacacacaaggcagataagcaagatcaaaaataaaaaagaaaaacaaaaaaatagtggaaggagtatgggagaaaaacttcccgttgtaaagtatatgacatccagatgcatctggcattttccaacactgcattttttcaaattagcttgaacttgaaaaaaaataaaaaaaaattgcgattttggtttttggttttatgtttgttttgcttttcgccatttattatattcagtttctctggtcacacgttcgggattttgttttatatacttgatttttgttttgaaatgcttttaacgcactacaaactaaataattattaaaatttaacgctattttatagaataggttccatatagtgaaatatatatgtatattataagtatatctaaaaaggggatttttttttttaaattatttgtgtttttcgtttttgttgatatatggaaaaaacttgatgatagaagatatcagttgaaaaacagaaatattttagttttcttgttttttttttcatgttgtttatcttgcagtagattgtagttgttgtcgctggtagagatgggcaaattaaaaccaaaaaaaaaggcgtgattcgatttcaatattattgatgcgatctgaagatgctgaagaggtaagtggatctaaaagggttacaggttaatgctcggcaacgcttttgtaatttttactcctttagatttgtattttatatcgtgatttgttttacttttataattcagttctgattgcttgattgcaatgtttgtttaatcttctgttgtctcgcaccagtcttttgtgtaaacgggaaaaaaattaccaaaaaaaataactaggatcaaaaaaaattgcactctttagcttcgttcaagaaggatatatatcatcttttttagtgggttatgcatttcttgcttttttagttaggtatcgattcagtccttggttggtttatctctttgttgttaatatatattactcattatgtgcatttcggtattttttatttgtataaaaaaaattgcagctttacgttttgttattgtgctgtatccgggaaaaaaaaattttccgctttggaaaacacacacataaaaaaaaagtttaaaaaaatggtttttgactaacacttttacgcgaactttgaagtgctagtttaccgtttcgcctggttttgtgtatgtgtgtgtgtgtagttgtgagttctgttgtcaaagttgtgaaagaaaagcttaagatttaagcctaaacaaaaaaaacgtgatatttccctttctctttttagttgtaggttagtatctaaaagttacttttttttacgttttccaaatgatttttaatttttttttttagttttgttatatttttcaattacactaaaaaatttaaatacaattcaatttttgtgttttttttttttatcaaaatatacgacatatatattagtataatatatatgcactgcgaaattgcaacaataaattgaattatttacgaattaccgaattaagagcaaataataaaactaagtatgcattcatattgttgttggttgttagtgttatgtttgttgttggttggattgtttttcgtagcctgctgttttgttgttgttgtttgtgaaataccaaaagaaacaaaatgaatcaagggtttcagatgtaaacactctcaagattaattggtatatatgtattcactatatacccagcagatcgctcttgattatattttgtgtgtggcttgtgtgtttcatcttgtattcgtttctggatatttgtatttcagataaactttttagcatcgaaatagggatgcgagttttggaagcgttgctgtgatttaattgatctacctctgtgcatcatgttgaatgcggcggccatatgtgctggcggttgtggtggcggcggtggtacatttgctggaaccacgcccatctgcgacataaagtgggccgccttcgccttgccatgctcctcagccaaccggacggacagcggctgtgatccgccctcgggtattacgttgttcagcgccgaaatggcctcctgggcctcctcacgcttgttgtacctgcatagttttgatttatcgatcgaaataacacaccatagtagttgtagatggcaaatgaggtttataaaaatgagagaaaagaaagaaaacacataatgagccgggtgtcgaaataataaggggaaaagaaaacataatacaattgaccaaagggatacattcaaaggttctgtgagtcgacaaattcttctatacttccaacatttaagtttaatgaagttttagtgacaaaacaaaatgttcgactcagagaacctcgattgtggacattaacagaccatctagtcttctgattgcacatatcttaaccatataaaactatattgggcactcaccgaacaaaggccacaccacgaggacgacctgtgagcttgtcacgcaagatgttcttctgcacaatggaaccgtacttgccgaagatcgtgtccagctgatcgtcggttatggtacgcggcagattggtcacatacagattggtgtccttgatcgattctccgccgggacgtgcataggaaacctgttcgaaaataatgaaatggattagttaactaactctttgtgtgattggtgtgtttcaaagatctcaccttaagccgcttgttgcgcactgtgatgccattcagcactttaatagcacgctgcgagtccatttccgatgtgaagtccacgaaagcataaccaaaactgtagccagtctgttagatgataaaaattaagatttagttaggtttgttatttgcttgagaagatagatgagctatcagctatctgatatatttggagaaaagacgcttaccttatagtctcgcatgattctgcacgtgttgatgggtccaatggctctgaatagggcgtacagctcgcgatcggtcatgtcctggggcaagtagttgacaatcaggttggtgttgcttgcccgaggatcgttcatgagatcatcactaccaccgctgcccagcgacaatccgcagagattattcagcgagttgttgctggccatcggcggcaggtggcacatgttgccgccccctaaattgttggcactcccaccatttccgccgctgccgccgcagccggggaaatcattgtaaccacgacgcgacgatgaacttggaaatgaaaattctgtatcctgtggcgagaacgcataacgtgactgtaatcagattaaccatacaaagatattctagtgttgtgagaaggcctcatatcgcttgtcttggggttaattattagtagattgattggattggatggtttggttcggttcgatacgttttgactggctgctgctgcttggttgttataataattctcgagttctcgatatcgatatagacacaatacatatatatcgatcgttgctttttggcggcagcaacaacaacacacaacttgcttagtggatgaggtggctggcgaaggttcggagtggcttaaaacgtagaaatctacgacaaaaacgctaacggtaacaatattccaaatgcatatctcgcgaaaaatcgttagttctttgaatttcattggttagatttaagggcgtgcttgaaactcgagtgcagcgattttgaattggatttgatttttgatttaagcattaaatcgaaacattctcttgcttcactgtacttccgtgtgtgtatttgtttgtgtgagctaaacggcattcacagggttgcaaaaaccaaagaaaaaaaaaatggaatttcaagaaatgcataaaatgtttctttcctttctcagttttcttgagcttttcttaagtgtattgtgttaagtctctttaagtttttctttgaatgtgtgttttctgagggtctgtgtcattaacgtagaagaaatacagtgcgaggcaaaaatataatgacaatgagccagaaaccgatcaataaagtttttttttcaatatgttattatgcgcctgggatgatcaatgaagtgatttagttgatgcttcaaatggaatgggatattttttttttaattaaatgcccactttttagtgtcatctaatgcaatggcgtcaagtgtgtcgtccaatatttttgcaagtctgtgtggtaaagactgcgcaaaacgctaaacggaagccaaagctgaggcggaaacggaaatggaaacggatacgaaaacggacaatgtgacagggcaatacctaaaggtatttcatttaaaaactgtctgcttttcatggcacatgcaggtgagttgagtatttttgcttggcgtttgtatttctgtgtgttctttgtttagatgattctatttaaggtttatgtatatttataagttgtttgtgttgtcgttgctatttgagttttctttggtttatgtttattttgtatctgtttgtttaggttttgttgtttaaattgcaaactttaagttgttaatttgattttcatcattatcaataaaccaaaaggaaattgttcagcatccataaaataattcagttatgtttttagtatttgtttgttattcaaaagcgtgtgtccccagagcgttcatgagacaaactcaataacatacaactataaatagtaaaaggcataaaatttatattatcattattgttatgattatcaaaaacgaaaccgaacaaaacaaaatacaaaagtcagtaaatatcaaatgcattgccttgaatttggtttcaaatgaatagctttttccttattgttctttaattgattgctttcatgcaattgaaaatggaaatttatcgctaacaataattataaatttcaggcgtaagaatgagtatataaatgtgatgaatactaaccattccggatggcagagaatgggacatcccaaatccacgcccaccactgtacgatgaatcgattccatttcgttggggaagagaaaatatgaattagatatcatagaaatgattgtgttgtcggttattggttaaagtaaaatactatttaaaattatcaaaattaaatgtataaagcgcaatttacttatattatttagccattttgaaaatactttaaaaatgattaagaaatgttttggcgctggatgatttaacaatacttttcttactactaacttaaacttatgactaatgagttttgaaaacttgctgcagagtacagtaaactgtctcgtgtgcaaattagcttaagacttaggcttaatttaaatgagaaaaccattagtggattttgaaaaaaattgagaaatattgatgtgacgattttgcagtttctcgacgaatataacttagactgaccctcaaaacgatcccccagttatattcaaccgtgaaattctgcaaaacctcctttgccttaaggtgaaaacaattggtttcactttaaatattggcacttaagaaaagcatgatgtatttttttttttttgtactttcgaatcaccgaaaaaaaataaaaaaaaataatcatgggactatactagtaacccatatcggacactttgtggctggagcacattttcactttaaaaaaatcaaaaaaataatcacttttggcactttttcatcacattaacaaaaaggatttggggactttttatagtttcggacatcgccgtttcttcccacgtcgaattttggttgcatatcatattcggttcatacatttaggtctaagttagatctaagttgatttttatagtattttacaacgagctgcttccccaatatttcatcatcatattattatatatttggtttttgcctttggctttagtagtcttagagtcttgttacttacagggctttggaggtgtcctcgattcaaaaacattgcgtttcgttggcgaggagaccatggggggcggagctggcgcgtttgcccccccgtgcaaataaaaactacatactatcttaagagtcagtgagtgtctttcgcttttcggtgataatggtggctgcttctttctgggctgtgaaaaaaaatatgtctacacacgattaaattcagctgcggtacaacgtcgatgatgggcgttacataatttttgctgtaagggagttttggttcttgtttatgagttgggtgtttttctgggatatgtgtgtgttgtgtgggctggaagttttcaatttcactatatgtacgaaaacaaaagtgagattaggaaatctcaaatactcgctggcaaggtcacactaatttcgtgagcttgatttcattttgcacagtaaaaaaatatgcaaaaaaaaaaaggtagggcacaaagttctcaattacacgttgggaaaagtcacgctgttttcttttgaaattttgctttcattttcattttgcacagtaaaaaaaagaaaaaaaaaaagagtgccacttcaaaatctcagatatgctttggcaaggtcactctgcgctggtgttgattgttgacattgttgattgatgcgatgctgctgctgctctgcttgcggtttgatgttttagtatttgtagttttgctcggcattttatgaccttgagcaaatgttgcatttgtatttgccttttggcttttattcatttttgctgatactctcgcaagaggaagagagatggtcagcacagggatatagagaatgagagaactttggggggcaaaggcaatttgtcggctatatgcattggaatatgttggggaccttaggggttgggatggggcaagagtgagatggcgacgcaataaccacaacaacaaccggtgcttaaggctagttataaactgtaaaatctcccaacacgtgtgtggaaaaaggacaaccatacgtacataacttaaggctactgcatgtcaaggtcctgacacaatttttcgcacagcacgtgatgcactaaatttggagagggtgccctctgtggctgctctgtttacatttcatcgactgctgaataatgtgccataaattatacgaccccaaaaaaaaaaggggaaagaagaagcagctcataaaaatgtcacgaatgacgctgcttttgcttttcctccatttgttttatgccctaggaatatcattatagaaatcagaccacttcttgaccccgcttttcatttttttttttttttttttggcagcaaaaaacagtcaatttgtcatttcttaggcaaaacttaaggcttacgttctaatgaagatctggatatggaagatatatggataatgcgaggcgagaaaagaaaaactgaccgaaattaacaaaataataggcatttaaggcaataaagtacttattttttttggtacagttacgccaagcagtaagtgtggaagaacaaagacaaaaaataagataaaagagagaggtagagttttaagaacatttaccggtacattgtgagactgtttaggttgcacaatccgcacgatgagaacgtttttaggccgtttctataatcctcttgccacaaacaaattgcccagatacggatacatgtatctgccttgttctacgcgtgtatatgtaagagatatatcaagtttcgattcccagcggaatcaaaacgcttctgatggcccaaacatggcgcacgttcggtctttgtaaatgcagttcgatcttataaatggttcatgtgtgtatatatatatatacatatatatatttatatataaatatggaagattgcgttacattacgttgtttcacgttgatcggttaacatttttgcatattgcttatcttttatcacatacaactgtaaatataggacaaaaataaagcatgtcgcgattacgaaaacacgcagacgacgatcagctgattcaaagtgaaagtgtgtgcgactgtgggataaatgcgagcgcatgaatgtatgctatgaaaaatggcacaacgcaaacgtaacaactagatcgaacgatttatatggtagatacagctaatgaggggattcctatgtaatgcaaaaaacaacatctttttatagtggattgcttggaacgaaattaacattttctaagaaaaaacaaacaatgaatttgcaattgggagcggagcttttcaggggcgggctgttactcataaggcgggttccccttaaaacgattgactgttttttgctgcttttggttcgctatcaatgtgtttgtgtattcgtttgtgttaattgctatttgtatttaatcgattattggttttctgttatcattgattgcaccatctagcacatgtaacatttaattatacttatatacatcctccttgttgttgctgcggttattgttatccattcctgtggctgttcttgttgtttttctttctgtctctgataatatcagagcgcaaaaataaaaaagaagaatcaagtgaactaaaaaccaaacaatgtgtatgtgtgtgaatgtagaatgaataggggggagaacatcactcaatatgatttccttgttttttctttgccagtgacatcgacagcaaatcgataacaatctcgagattttatcgactgtcaatcgacatccttccctgcacaaataccaatgcacatatgccgacaagttttgctagtaaaagagatttcgaacaagcaaataacttgaactttcataaccaataagtctaaatctaaacaaaataataacgttgactgcaactattttccagcaacatggaattttcttcttcgtacaaactattcaaaaaaaggttgggttggtcttttgttcgttcgccaaagaggtatgggtagcaaaaaaattaggtaaacactgtatcatcttaaagttttgtgtgttatatgtgtgggaaggaatgggtggaaaggaagaggggattggggattgtcattcgaatgggtatcaagatcaaacataaatgatgtggatgtggctgacgaaacgtgagaactcaagtttaaaaatttacctcgacttgttgttgtagccatatgggggataaccaccattattattgttactacccggattattgttgccgtacatatcctgagagttgggagtgtgtttttcgaatcaacaaaagttacaccctcgatcgaaggtgagtttcggttttacaggaaaaggatgatgaggtgagttgcagttgacttgaggttaagaacgatgatcgagattcaatcgatctcttcaattgttttggcgctcagcgctctcagctggcctgctgctgtcgttgttattgttttcctgttacttctcttctgcctctgttcaactttcttgtgttgtactaaaattgctgttgctctctttctctttttacatgtgtgcacgctcactgtgctttcctctcttaagtcctatggggttttttttaagtgtgtgcttattatagctgttcttgtaggcgcgctgttgtagttgttgtagaagttgaagagttagttgttgttgttggtactaggagttgattgatcgatatagtttagattcaattgaatttcccttagcttgaggaggggagggggtgtaatggtggttctacatttatacgatgacaataaaaatatgacaaagacgtgaattgtgtgctgcacgatttaatgaacgaaataaaatgatcaacccacagctaaatagagaagttccgttaatcgtaccacgcattgagctgagtttatgtgtgtgtgtgtgtgtgagtgtttaaaactatagttgtcaggcattaaaaaagaaaagattctagatattgtttctaagcagatcccgaagaaatatatacactaacacaggttataacttaagaatacacttaataaatacttaaatccttaacactttgtatacagtcgcttatccagggttgccataccatcataagttatagcaaacgatttcttaacacaagtcactagtaaataagctgcgcatttatacaatattttgaccagcaaacaaacaagcgattggatagaactcaacatacctcgccatcttaaagttatagtaggacgacatggtcgaacagggagtcacagtatcaaaattgaaatccataatgggataatcacaaagttacgtttttcaacaaattgaatgtaagacacacaagaaatcacaagatctctgaacacaagttggacttgtcacgagtggaactcgactgaagatgtcctgcgggccatcgatctatttaaggatcgacagaggggtgccgagcgagtgggcggtggctgggtgccaggtagaagatcgaaggaggcaaggtgcgcgtgccagtcgcgtgggctacctaagatcccgcgaattgatcccgctaggaagtgtgccaggcgtactttcttgggtggccggctgcatttcgcggatccccgattcccggatcgcggatcttcgcaggcaggcagatgttccgcattctcggaagctggatgccggcaaggtgatagttctattttttt

SEQ ID NO: 26762 - DNA, 2892 bp, DROSOPHILA
gtaccaacaacaacaactaactcttcaacttctacaacaactacaacagcgcgcctacaagaacagctataataagcacacacttaaaaaaaaccccataggacttaagagaggaaagcacagtgagcgtgcacacatgtaaaaagagaaagagagcaacagcaattttagtacaacacaagaaagttgaacagaggcagaagagaagtaacaggaaaacaataacaacgacagcagcaggccagctgagagcgctgagcgccaaaacaattgaagagatcgattgaatctcgatcatcgttcttaacctcaagtcaactgcaactcacctcatcatccttttcctgtaaaaccgaaactcaccttcgatcgagggtgtaacttttgttgattcgaaaaacacactcccaactctcaggatatgtacggcaacaataatccgggtagtaacaataataatggtggttatcccccatatggctacaacaacaagtcgagtggtgggcgtggatttgggatgtcccattctctgccatccggaatggatacagaattttcatttccaagttcatcgtcgcgtcgtggttacaatgatttccccggctgcggcggcagcggcggaaatggtgggagtgccaacaatttagggggcggcaacatgtgccacctgccgccgatggccagcaacaactcgctgaataatctctgcggattgtcgctgggcagcggtggtagtgatgatctcatgaacgatcctcgggcaagcaacaccaacctgattgtcaactacttgccccaggacatgaccgatcgcgagctgtacgccctattcagagccattggacccatcaacacgtgcagaatcatgcgagactataagactggctacagttttggttatgctttcgtggacttcacatcggaaatggactcgcagcgtgctattaaagtgctgaatggcatcacagtgcgcaacaagcggcttaaggtttcctatgcacgtcccggcggagaatcgatcaaggacaccaatctgtatgtgaccaatctgccgcgtaccataaccgacgatcagctggacacgatcttcggcaagtacggttccattgtgcagaagaacatcttgcgtgacaagctcacaggtcgtcctcgtggtgtggcctttgttcggtacaacaagcgtgaggaggcccaggaggccatttcggcgctgaacaacgtaatacccgagggcggatcacagccgctgtccgtccggttggctgaggagcatggcaaggcgaaggcggcccactttatgtcgcagatgggcgtggttccagcaaatgtaccaccgccgccaccacaaccgccagcacatatggccgccgcattcaacatgatgcacagagacggagctatggaaaaattacgctcattattcgatgctatatgcgatgctatctttggtctcgatagcgaaaactttgccgatttgcttgacggattgtaccgtaggaagtaccattatccttacttataattgacaccgcaacagcagcagcaactactacaacatcagcagcaggcgttgggcttcaccagtagctccaataatagtattggcaatggtaatggcaacgacaacaacatgctactttaccaccagcaataccatcaacaacaaacacaacaacaacgcctgggcaatgttgctgctcacaatataagtccaaatggaagcaataataacattaacacgtcgaacaccaataacattaacttcaatacaatacgtcagaatggagttgctgctcttcactatcttcaggaacaattgcaattgcaacaaccgcaggatcaacaatcacagcaacagcagccattgactatgccatcttcgccgccgtttcaacaacaatcacgccaatcacaccacaatggcagcagtagcactctgggcaatcagttgcttgccataagcaacaacaatagcttcaataataattccaatcaatccaatagttttactggcaattacagcaacggtagcgcttttaccagtaacggtgccattagcggtagcaactttcccaacaatcccacaagcagtgggaacttcaccaacaactcaacaaacagcaaccccacaaacagtggacactttgccagtaatttggctggcagcagcaactttaccaaccatctttctggcagcaacaattacaccaacagcaacggaaatttcaccagtaatgcagctagcagtagcaacttctccaacaatgcagctagcagcaccaattacagcaagaactgcagcagcggcgtcgttggaaacagcgatcccgacagttgtagcagaaaacacaccaccaacactaataatcaccacacttcgccgcagcacgacttcagttttaatatgtcaacgactgaacaagaactgcatcagcagacactcaagttgcagcagctgcatctgaacaacagcttcaacaacaccacagcagctgcaacaacttcagcggctgcatcaacttccacttcaacaacggcaacggcatcatccacaaactccgcaaatgtcggatttttatggcgtacataaccagagagttgagaagcgtatgatgaaggcaatcttcaaattaaagattatatataaaaagcttatatatataaaactatgaataccttatattgatcatcgtagtatcagcattcatcgaaaccatatacaacaactgaaacttttatgttctcaaaccacaagaattaatttactactttttttttttttgtatgttcctcactttaacccatatgttgtagttggttttttgtgctttttttttgggaggaatcctgttgtaactagctctaaggcaagacacgtatatgtatacaaat

SEQ ID NO: 26763 - protein, 366 aa, DROSOPHILA
MYGNNNPGSNNNNGGYPPYGYNNKSSGGRGFGMSHSLPSGMDTEFSFPSSSSRRGYNDFPGCGGSGGNGGSANNLGGGNMCHLPPMASNNSLNNLCGLSLGSGGSDDLMNDPRASNTNLIVNYLPQDMTDRELYALFRAIGPINTCRIMRDYKTGYSFGYAFVDFTSEMDSQRAIKVLNGITVRNKRLKVSYARPGGESIKDTNLYVTNLPRTITDDQLDTIFGKYGSIVQKNILRDKLTGRPRGVAFVRYNKREEAQEAISALNNVIPEGGSQPLSVRLAEEHGKAKAAHFMSQMGVVPANVPPPPPQPPAHMAAAFNMMHRDGAMEKLRSLFDAICDAIFGLDSENFADLLDGLYRRKYHYPYL

SEQ ID NO: 26764 - DNA, 30252 bp, DROSOPHILA
agaaaccaattttaaatgttctccagaggtttgtcactgagtacggggtatcgcatcatgtaatagtagatagtagtagaatagtagagtttatatgcaaaagattcaatttgaatagtaaacaacaaattgagcaggtttatttcactgttaaatttaaaacgtatttgcattgattatttccatggatctataattaatttagtgcttttacttgctgttcttactccatggtttcggcctgtttattgattaaagtattcgtgcgaagcaaagtataaggcaaacaataaattaaaattgtaccctcagcgaaacatgttttctcaatcacctgatttttttgtttacatgtgggaggcacgtgaaatctcattaaaagttaggattccttaaagagatattacttttaccgctggaacctacctacatatcttttaacagtaattaatgtttcgatatcttgttttgcattgtattttggtgtgtataaattccgattctaaagatcatacgctacgaatttttataacttgataatcgaggaagtagactataggcttttttcttgttttacccgttacttgtagggtaaacgggtatactagattcgttgaaaagtatgtaaccggcagaaggaaacgtttccaaccatattaagtatatatattctggatcaaagtcgagtcaatctggccatgtccgtctttctgtccgtccgtatgaacgtcgagatcccaggaattgtaaaagctagtatgttgagatttttttttttggttttaggttaccgcgacatccgtaaatgtcgtggaattatttggccacccccgtgtacgtggaaattgccaaggacttaatgttgagattatgaacacagattctagagacatagacgcagcgcaagtttcttgaaccatgtcccacgcccactctaacgaccacaaagcgcccaaaactgccacgccctcacaatatctaaattttgtttatgataaaaatgggaacagcaagcgcgttacctttgaaacagccacctacccacgaccgccagccgcgtctgaacgaggtggcccacaagtttctcgccgatttggacgaggagcgccagcgattgtccgcggagtttccacttttcgcactgctaattgccgaggttaaaatcaattccgccctttacagggtattttaatggtactggtcgtattcccggcaaggagttatacgcagacgtgtacaagcagaagccgacaaagattacccaaaaggtcttcgtgcccgttaatcagtatcccaaggtgcgctatcgtaacaaagaggaggagctccgcagcacaggcgaccccaggtatttatttgtaatgtataaccaaagacactagaataacaagatgcgtaacggccatacattggtttggcactatgcagccacttttttggtgacggccaaaattactctctttcggctcactcccgctgagagcgtaagaaatctaaaaatataatttgcttgcttgtgtgagtaaaaacaagagacgagaacgcgtataagtgtgcgtgttgtgctagaagacgattttcgggccgaaatcaattctgatggaagaaacgaatttacatggtacatattagggtagtttttgccaatttcctagcaatatgataaaataaaaaaatttttaaaaattcgcgccctgaatattataattttaaagctttttaaatttgtttgttaaaatcgccgctcgaattagctaccgtttacacatttatatttatgtttaattctaatttgtctctcatctgacaattttttaaaagcgaaatatttttttttaaacacttttaatgttaatgttacatcatattaagtcaaatgatttaataaatatactaaataagtaaatatgcaattaactgtttattgcaaaagtaatatcaaagacactagaattattctagtgtcttagctttgttcatatcttgaggcacgaagtgcggacacaagcactcaacaattattgccttattaatttttcacacgccgcaagatgaatactctaatgacaaatattcttatataaagtcatttttgaaatttatttttgtgataatatgtacatagatttggctatttctaatctattttcaaataataataacggttaaggcaatgcaaaagaagaatttttcgcatggtgccaattgatcaaaaataatatagatttaaagccaaagaacttctaaggtgaagggcatattttgtcaaatttacaatgcatgtgaatacgtgtgcacacatacagatgtctgctatcactttgtgcgttgaaaagagctgttcgctgtagcgctcttcgctctctcgctctctaacaaaaattcgagagagcctggagccacctctagagccacggccaaaaaatcgtgtgccaaaaaatcgtatggcgttacgcatcttgttattctagggtctttggtataactttatcatttcataaccaaaccaggtgtaatggacctgagagtctccgcgtcctagtagttccttgaatcctagccaacgaacattttgatctttatagagtcgacgatgtggaggaggtggccttatgcgcgaaccgcccatcaagtcctataagcccaatcctggtaaacaaactttttgttttattttatttacctatacccataatttttgaacacatattcatacgaataagcgcttttttgtgcctattaataatatatagaatactaattatgtttggaaccatattgacatttacctttttttttttgcaaagcaaaagctagccccgacgaaattcttccgataaatacttcaaaacaatttgtaaaaatccctagtactcaccagtttgctttggtaaattgtagaagtcgagggttttgatctcggacgtctcgacatgcggggcgaacccttcgtacagatcgctctcctccacgatgccgctcagcttgtcggcctgggaagaggcatctccgcctcgatggtatggcatcttcttagccaggtttgcggtctctggatccgggtcctctgtcaagttttgatttgggtttgcgtccactcggatccgttctgccctccaggcagttggcggctttccttcgttgtctctgtttgactagatggctttttaccttgcagtgctttgctgtccgcggtgtggcaaccgatatgcgggtcttgtttgggcttgtagtcgggctaagtataatattactattatatttaagttttaattttatgtaaacggtggccaagttatggagacagaaatactccaatacgatggtgccgcgcggaattcattatagtaaacgttttagcacgagtactgcaaaagcatagcggtgtgtgaatcaaatcccaattgtcggcgttttcgagtctgcaatgagatagaagtggggacgcttgttaattattttcgaacacgaacacgattaatcgacgatatagcgaaagcatatggaatcaattccttcgactcaaaatcgaaattagttcaatgacatgacccaaccgaactgtacagtagataatgccaaaggcgccattggctcataaaatacttggtccgctcattatttgcgagccggctataaaaagccaactggccagatttataatatatataaaatcacacgcatatataagacgtttttgctgctgaggctgactctaccgacaacagcagccggtttgataactaattaaatccaacagaaattagaaaaaacaacaatatccagcgcaaatatttcactcggccataaacaaaaatgtacttatattgcacaaaaaaaaaaagcagacatttatttaaaccatgatggaagttaatatattttaaataactgaattatcaaataaatttaaaaaaattatcatacaaaaatgatattaaaattatttgtttaaagagtaaaacacctaacttttatggcttagggaacaattacgattagtcgaataaacttcggcacacgctgcgtataatcaatactcaaaaccttttttttttccaattttccacttatctcatcaccatgtttttggggaaccaaagacgggctatttatcttatgataatttgtctccccatttcgctagcattacacgcacatttcgttctgttttcgtcacaattcgcaagccaaatcagcgtcaaagcaaacgaaaaacttaaattgaattgcaaaattctaaaggaattccggacacgtatcgaaagccaagcaacggcgaaccgcctcttgagctttttattttccattttcctttgacactcttaatgatttagcctgtcaagaacagcatttcgggggccttatgggggactaggagggtccgacatcggatagaaatatagagagacagacaggtctgatagatcgctgcgtttgcttgattggctgtccgatataaggtgtcggactttttacctggccagcagagccagagcaggcggggaaacaggtgccgtcaagcggatttgtcgccgagacaagttgtatgtatggcagcttcgaagagaactcagataagaggttcgtctggaaagcgttagaatgacacggaatgaagcagagatgtctttttgcctatggtaacacctaatcaataacatttaatattgttttggtaagtatgaaagcgagacttcagtgatcctggatattgctcatatgtatttcattctacaacttcaagtaagtacacttccaactaataagcccccggtttgttttacaatgaactaacaaatggcaacacaggggggagcatcaacttttccataagtaaacaaataacggaaaatcttgaatcattttcacttcacttcagcagttcaggcttcagttagtagctccgccctctccaaaacaaatatcgaggcatttaagccacgaaaattgttttgcacagttccatttaataccactccagtcaactcgactcaagttgactcgattcgcttcgttttgagtggtaatgtgcaattttcatatgtatgtcaatattatgctacgtctagtattttcaaggtgcctcgggttacgtcgtcagcaaagcaacacgattgtacacaaaagcggcaggtatcacatggacagacatatagagttattaacaataatttgcactgcagttgagctgcttgtttgcttgctgcccgctgcctccggactcgagaacgttatctaaatgttataatgcacccaatttgcgctaatgaaatcaagcggcccgccactcaattgaattcaattggacagtttacaatgcctagcttagccaaactcggctaagcctcgagaaacacaaatgtttcggcaccgaatcgattaacgctcccgggaaccagcagctaattaaaacgtttatgctaatgaggcgacacgccgtcatgtcggtgtcgcgagatgtcagccaggagctggaaaatcgacaaaaaatggtacgaaaatgctgacatggcggcgataacctttcaaataaaagacgattttggggcaaagactcgatatgagagcaaactaaaatatttataaagccatcgattaaacaacgtttgaatcaatcatgatgatttgtcattccattcatgattcattttcgcatttatttgtattctatactctacttcatgaatcataactatcaaaatgaaactaaaggcattgaagactttttaaaagctctgtgaatttatttataaattcttaaccactgtacatgctaaaatatgtatatatttcatgtaattgacatcatttacggtagcccctggcaagtattagccataaaacctaaaccgaatcaagtcaattggagcccaaacataattcaacttctctctagcatgcacctaaagcaggtgctaagcaatttcgcagataatcactggccacaatgggttaatcgtcaattgccaaagacgaggcccaagtaatgccacaacaattatgggggtggcttgtggcggctaaagtgacgcaagtgcaacaatcggtgggtcaagtcgagactcaattcgattcgatccaactctcgtcacgtaattctcggtgcaatttgcgtcagttagcgaagaggaaaaacttttgaggtttccacgtaattttccactacgacaaagttcaccgaagttataagcgtcggaactctttggttttttctttttttgctgaaatcaaaaggtaatccctgctctataagcttggcgaccttgtaagattgtcggaaacttagctgaaacttctaaatgaaaatagaaactcctttaagagtacggaatagataatgagaaaaggttcgaattgtaagtggtcgaggtcctagtttaagtatggcaaccgtgattggaaataggtatagtaatttaaatgtttgaatttttgcaatgcacaaatgacattcaagtcgtctgtcagagctgtcaagcagccatttattttctatttaattacaacccaaataagtgacattttcaaaataactaggtcacctggctggggcgcagggcgagccaagtaaaagtaagaaccccacacccacttgaggggaatttgcataccctatgagaggggcgtgtcggagggtaggcgtacttttaagccgcacctaaggaaccttttgaagctttgctaaaacgttttcaaactaggccaagcagctgtcagtgcttcaaacgaaatatcctcgattgccttgagagtgcaatgacttgggcttggtccttcggtgcaccattgaccacccttaagcacctcacgaaacccatttgaaaactgtgtcagttttctgaaaacggggtacagtccgaaattgtaaattaatgtttactctttattaacatcgttccagattctttcccaagttaatcataatctagctagcattgctagcaagacttgtataattatattttaaaagccagttgctaatcgctgcgcttatagagtaggtgagaattcttcctgaatttgtataataccctctggaagggtataagaaggaaagggggccaagcagacagaaaggcaaacagggctaaaataaagggaattaggggcagagaggcgaaaagggaaatgtaagtccttaaagtacagaaaatgtggggcaacgcaaagctcattgtgtgcctgtgtgggtgtgcgcgtgcttgtgttggtgttttattttatttgttcttgtgtgggtgtgacaggacactttgcgtcagcagcagcagcagcagaccgaaaagtagcaacaaagatggaattgcgtagtggcaactcgaactgggagtgtactaagcttatcgtggggcgggaaccgaaaaggagaggagaggatggtctttgggagagagaagcccgagggaggttcctgaaatcaatgaatgaaagcaccaacacacgcatgcgagggaagagcgaggaaagaacgacgagacttggagagaggaaaaaccaggacctgcaaatagacttcctaatatggttagtggaaccctgtaatttaatcttaggaaaatattgaattgttctaaacttgtaggccattctaggacacaatgacaaggacgagacatgcattaaacaagactaactaatggaaaaataatcatgttaggatttagcaatttgcaggctagatttttaaaagttacccaaaaaaggaaagcaaagcgatgctaaacattgattttagtaaacttaatgtttctataaaacgtgtgaaattattccaattgtgtttcttgggcactcgccactattccctcttgatccaagtgtaatccatttatgtccccagtcgaatcacttttagcttacttagtggcaaggcgacatccagggtgcagagggcaagcagaggacacaggacgcagacagaaaaaaccgggccaagagctgaggaattcgcaaggaaatcagcttcagcttgccgcaaggacagtcactgaaaccgaaactgaaatttgtcagacagcccgaacaattaaaaccgggcccagagcggttgacctgatttcagcgcttcccctcattcccctcttcctcttgttatacccaaatgtttttatatttttattattttttttttcgcttttttgcggcagacttcgtgacggctgaaaatgccacacacgcaaggttttatgggtctgctctttcgccgtttcggtttctgtttttcttcttttttggcagcaaaggaaaacatgtacactgcacttgccacaaagcagcacaaaaatcgagctcaccaacgggtcactgaaccccaaaggaaaaaagtgcaacttcagcaacgccacagtagctgcggctgcaatttatttcataatcattgcacatgagcacaacggcaagaaaatcacgtgaaacgggccctggtctctgttttttatatatgggcatttggccaggcctctggatctgagtcggcatctgtaactgactcgacttggcctagacacacggaaaagccactgcgcacaattggccggaaaagaaaaacgacggcagcgagagttactttaaaaatcggccgatttgttgagtagggtaaaaaccctagaaactgagcctaagcattgggtaacaaatgcttttagggatgagatttggcataaagatggaaagaaaaaatgtatcaaagaaatattaagcaaattaatattatttaaataccgatttattaatagaaccgtttatattaatgttaacgcatctaagtgacaattataaaaatcaaagacgtattgacactatctagataagcgattatttatgtcatgtacctaaatgatgtatttgaactacatttaaattctttcttaattcatttcgcattgttagtgtttaaactaagtaagttattaatggcagaagtggtggctaacctactaacagaaagctctaaacatgttttaagctctctatactattatttgtgtttaatgccacgtaatagttaggccagctgaatttccgtgtaccagttaagcgaacctcgcaacaaacgagcaatgtccctggagccgcaaaacaaaggctgcccctcgtaaccgggagccacttgaatccgcccaaagctgtggcaccactccgttccccagtttttctgccgctttggccatccagcaccgaacacccaactccccaaaaggggccacaaaacttccatcaaatgtgttatgtaagcgcgcattttcaacatatttgcttgcccagttttctttgcttggctggcagaaaagcaaaaaaaaaaaaaaaaaaaagacgtttgcaatgcagcccagaaaaatggaaatcatacagaaatataggcaaagtgcagcgttggcggaattgttgttttaaattttaaattttttccgcccagaatgttcttggactagtaaaatggaacggcatgaatcatatggagatgtacggagaagtacaagtgtttacattatcgctgctgtcatacgattgccccataggttattattcggacatggggtttttcttctgtttgtataacacggcgcatgaaaggcaatcggtattactcatacgacgcgttggccgaggaacattttcaaacaccactcaaatatccataaacaccgaaattggaaacatttgatccccgccatatggcgattattcaaaatgggcaaaaattatatagcactgcgcaggcattttgtagctaatttgccacaaaattcgacacttaatatgcatgtaaaacgcttcctgtgtggccatcacgagctaatactcacatttgggtctggtcaacgaaatttttatgaagacatcatcagcagcctggaagttgcactcgaattatggctaattactggccccatttaataggcattcccatatgtcgcctgggggcctcttaatggctcttgaaacgatggcaaatggctggaggaatacgcaacggcagacttggccgagaattgcgctgtaatataacaaactaatataaattctagcgcccagtccacatcccttgggttagaaaacacggaaccacgggtggctaggggagaagcactattgtttacgctcggcgtattgcaacatccaaagaaaatttcaagttgttataataaacaatttttacgacgggattttttcgtaaatatggcgagcaattagatatggccataaattactaaaactttaatttaaataatgtaaataggcatattttgttgttcaacattgccaagctatttttaacaaattcattgaaacaagattacgtgatatacgtgatatttaacttagattaagcaatctataagccatataagctctcaagcctttttttgataatattaaagaaattcgcacagattaaatgaaaagaaaaagtagagttttcgattttagagaagcaataatttcatattgatacattttaggatgattgtgttaattgcttattgtgggatgagattgaaactttggtcgtacgtatttgagttctaaccaagtacacgacaacaaacgaaaccgaaaataattatgtcaaatgtttgagcgtgcgacatcaattgtgacttagaacacgcgttgacggctaaaatacgtataatacgcacaatatttatattcttgttgataagatagccgcggcgtgagaagcattaagtcagtttgcttgtacgagacccgctgataaacgacggccaatttattttgattttgccagaaataagctgcgaaatttggtacttatttatacgccagccattgataaacgatctatggctactgtgtcacgagctatcagttctggtccgctgacaaaaactaactgctgacactctctggatggaagatcttgtccagatcgaactccttacccgatgcacatatggatatcatggttcattactttgcggttgggggcgatgcaccctgtgaggaatatcttctgatcggatgaacaaagactagtgcgtctaactccgatttatatgtgaccatgttcctatggacacaaaatctacaggctacgcctacaacaacttcgccatcgatgtgcattcgccaatattgtgtttttcgttaagtgcggataaccggttcgatgccatcatcatggcatcataatgtatttttgctcacttatataaatatacattgtatatagaggagtacccacatacaaggcatatttttcgcgagtttctgccaaaatgtatgactcagtgtctttcctctctcattcaaccaacgcgcacacttgtttttggcattccagcgaactccgaagatattcgagagccgggtttcagttcgcgttcgattccaagttagccgccaaaagcgtcacgtgcttttcgagtcgattcgctttacctttagctttttagcgctcacttggctttgttgtttgcctttgtaaacaatgggaggcttgtttctaaatatttatagcgtgtccacttgcgtgccagtgtctgtgcgcctgtgcattttgtgtaattcggtatcgcttattatacaataccattttaggttaggcacgagttaacattttatacaatttatacaatttcggaaagagtctgtttgctgcagagttcattttcatttcagttcagttcggttgggtgggcgtgatcatggtttgctaactttcctaaccgccttataccgccttcttattgtgcgatcacgttcgccaaattatccaaggagtttcgaatatggatgcgtaggcagacgaagactcgctaatttcatagacacgcagaattatcaaagccgaacatgcgatgcagcacttttgcgtcacttgcaactctgtaatggaatattttcccaataataacccttttaggtacttaaaaggcaaaatctcctcttattcgaataacatttccatgcgaatttcgggttaattaggttggatttcgcacccgaatgctaagatcgatataatgggatttgcataaaatcgatttcttctttatgtgggcatctttgcccaactgctgtactttaataatttttagatcttagataagctatcatattatggaaaacttattgaaaacgttcctaatgattttccagatgtaagatgcttccaacactcttcgcatatattcgcatgcaaaacaatccattacaatcaggaaacttaatcttgtagcggataattttaaacaatttaaagacagctaattgttttctcgctcataaaaggaaaataaaatataccaaccagctgtgctgcgggatttcaattcatttggcagagcaaagcaaatcagatgctgaataattagtgaccatgactgacacttccggaagcatcacaatttgcattcagagcacggcaaacgaaacacaaattattagttaaaacaaatctgcaatgggcatgcccactcagaggtgaaatgctcaactgaggaaaaaaccaaataattgaatcactcagcgatcgaaggcgcttccaattagccagagcaaaacaaacagacatcaaatattcaagcatagcagaaagaaacgcggcgaagacatcgaaccgcaggcgaacaatttttcgcaagtcgaatcacaacctgaattccgcggatggctcctctgagaatcgttttgctttcattcagttcggttcggtccggtttggattcagttttcatttttcaattcaattaagcgtcggcgggcggagttcagcacacattgctgaaccaggcggcggcggggacctttttgagttctttactttttttgtctgctctgcgggtaattcactttattcaaataagtataataaaataaacgcctgtatgcaaaacacaatgggcgaaaaaaaaacaactacgcggccggcccattgtcgaggcgaattggtctgatgcacagaaaaaaataatgcacagaaatcagaatttatatatcgtatagatctaaacggttacattagatcgtatctaagtcaaacccaacattaatagctttatattaattccatttccataaattttcaaacaatcgatgcagatcccatttatttgggtacctttttctgcgagctctctactggaatgcctcgaatctggttgcagatgcggatacaaaagtctggcaccggatgttttcgagcaagtccctccaactgctgctcttatgcgaattgaacttatctcaatgaagagtgacaaagcgaccagagcgatgaaaacctctctgggggcatttctggtgtttaagtatggaaattgtcgcagcggttgaattgtccactctgaatgcactctggacacaagctactcttgttgttatcaacccactcgaaatgccagcgaataatcgtaactcaaatagaaccgcaagggatatatattagttcagatgggttttccaaagtgcctggccactaattactttacaatgtaactgagtatatgtttcatggacttggatagaatcgaaaatccaattactccttactagaattgctgagttaacttccacgcaatcgataagctgcacttacagcactttctacccggcaaaatataatgctgataaccagatatgctcattgatttacaacttatccggcacggatagcgtttacaacacggcaacacgatgtcaggcgaaatcaaggttatttaatcaatcgggggtttgggtgggggaatatttaccctgcggccagttattaactcatattgaaatgctgccagatagcgctacaccgccctccggacatctgttaaatattttattttcgccgtgcagttgctgttgtcaacaaacgggatcgagctcaatgaaattaatgctgcacaattaccaagcgaccgagcgtcgtcaatccaaagtcggtatcttgtatctgctctctacatatataggatttatatatatatatatatggaactgcgcgctcatatcgccacaatttcctttcgtgtgcaacgctttatattttattttggtcccgctttttatgctcgagtgtaggaaatccaactggtgggcgtatttttgtttcgctcctccgttctgttctgctcatttctgttattaacacatcgctggcagtacttgatttaataaacttgattaggatttatgagcgtgtggatttcaattttgcgagcctcccataaaacagagcggcggatgtttccctgaaatctacatcaggtgaccacggccatatcactccattaaatggatcaaatttataaataaatatcttcgcagttctggttaacagtttttagattctgagtgcatgacaaacaattatatctggttgcaatggggtaaattgagtttgtctataaaatgtgttagaaaatagcatttttattacaatagcaccgcaacagagcaacgcctaaataatttctaatatatattatatcctaacctaaaagaaacgtcacgttcttatttactgaatatgatttcataacctttactttattatttgattttattatttcatttctatcgatatgccatggccactgtaacacccacaattttcagaaataatttgatttttttgattatacctccatacaccctttgtatgcgaatttctatcgatatcccagaaatattattactttactccttctgctccacccactagccaactaaagggtatctaatagtcgaggtgttcgaccatagcgttctctcttgtttgattgaagagacctacttgtcttgctggcctcataatactaacctaggttagtattagcattgtcccccacaaggggagcaatttcaaaattatttttcgacccaaacgcaagcataaacaattaattttctggtaatttaacattagccaggtcccatgacaactacgccaaatttacggccaaacaagctggcattttttgtgcaacattttcgtggtcacaaaaataatttcaaagaggtgagcaagccagcgattttggcggggcgattggaccgaaaaatattgattttctacccaccataaatgcgttgctaagggtgaaggcactgggttagttggttactctcgataaagttcagacccttttggcagagttcaatgaaccaagtggctgacagtgctgtggaacttatagacagactcttgtcggttgcagtgggacaataatcgacgtgaatcaccgaataaatcacgttgtcgtcgcctaggcacgtacacatattcgctgaaaatgcgatatggatagatgcacgcagaaaaacgcttgtatgatatgggaaaaacatttgtttctgataatcaaaaatgtagtattttatataaatgtatatttttggcgccattaaaatgtaggagagcgatcaaatccaaaatgctattttgaatattatttcattcacaaaaaattattattactgtgtggtgtggactggactggataaacggacagataaatagatggatgtgagactctgtgcaacgcgacgttgacttattgaaatcgattgattctgattccagtcggtcagctttggacttacattttctggctgactcgcctgccggatctgtatctatatattgcacgactgctttttttttattttgcgaggcacttttaaaaagtcgttttgtatcggacatctcaagtgagcgaacggttcgatgggaccagctgacagacagtttacccaaatacaatttgttcattgccagtcaaatggatttagatagatagttagttatgcgcaagtacctggctcatgttttgccgatttagtgttcctttatgcggctctctggcccgcagataagataaccaagcagagaaatttaatttttggcaaatgtttgctgattgcattgccttttcgttgaaactcagccagcaggactgtatttatagttatagattaaacaaattatatgacccaatgaggaatatttatcgcttaaacaaatgtttgaagtacaaacagagttataattaataactccaaaggtcgtctattttgcaatcggagattgccaaacccaaaaaatatttatctattgatgagtcatgattaggaagatataagacataaaatgtttatttgggggaaatacggaaggggttttttgaagttacacatttgtagctgttgaacttgtgcataagtccacataaattccaaactaaagtataaaatcactacatataccataaatttatattaaacttataataaacttatatttaggctataaacataaaatatgggacaaaaaaaaagccaacgaccaacataatccaccgtaaatttaagaacaaaacggaactcgctttttacaacatttttaatgcctaactaaacagcattaaaaagttgaacttctttctcgctatcaacatggaataacgtggtttgctgccgtcataaattgtgcaaggttgaacgaaaaataacgtctatctaatcagttatgtaggtataaagagcacatgaaagttaaaaaacggcattttaagacttatacaattttgttggatctcagcaaaaacaaatttgaataaaatgtatgatcacaatgaatcacaaagaacaatcatatcatgattgaaccctttagtccacgtgaattgcaatttattatcaaaataacaaatgaatcatagaaatggtgatagtgcaactaaattcgaaattctcttgggtagagagcgataaaaaaagggatgggagagtgactgctattacctgtcaatatctgatgtttttgttcttgttttccttgcccttcttcgttggttatttttactttttttctgtgttcttgttccgttctcttttttctgatttgctgcacttgttctttttcttatcctccttcgttgtttttatgcactcgttttttgttttgcttgcttcgtccgttttatcgtgttgtcacgttttcactttcacaggtaaattctaaaggagcaagatatatattctctttcccattttattactctgcccaagggggcgtggccggggaggcgaagggcactatttggcctttacacacacactcacgcacgcacacagaggagagtgaaaaagcgagatggataaataaactaccttaaaagatggattttctagtttccgaaattcgcgtatttcgtatatttaaagtggtttaactattttcgccctacatccatttttttttatatatattttttatattcttttttttatgtttgtttcagcgggaaccgaaaacacaagcagcgcggtcgaaaaattatcgggcaatacgaaagagcgccttttgcgggttgcttaaatagactttcgtttgctgcttcggttgcgaacctctcgtcgttgctcgctctccaacgtttgacgaacagtgggattaatgtgcagtggtatgcatgaaatactgttttttttttttagttattattgtttattgtttaggaacaatttacaaaatctcattattaaaaaactaaagaataataaaatcatgattttatcaagctaattccaactttactaaaacataacataacaacaatttagtgtatttatatcagtgaattcggatttttcacacaaaaaatcctgttttaagcactgaaataatggcagaaaggattaagaactttcccactgtgcggttggatgtcggacgagtgagacttaaagaagtttgagagagcatcacccaaaccatacaagtaaaaaactaatgttagcaaatgaatttatacatatttttgcaaataaaccaacttttgaaatacacaaaattattatgaatggaaatttctttaaagccaaacaaaattttcacaatgccgataagcagggtgcgtgataccgttataaaaagtgggagaatagggagagagcagcaagtgcgcaagtgtgtgtggtaaaaaggtacccctatcacaatgcagttcacaaaaatagtcaccatctgtgcccctggttttggatattctagatctttcttcaatatacatatttcagatttcagatctcgttttttatttatttatgattcttaatgctttcgtacggagtagtaatttgcgttaaaatgttgtgccaataagatgccaaggcaaacgcctcttacagattgttttcttaaaaagtgataacaattcagcagaataaattacaaaaattgcagaacatttcacacgtggtttttttggtattgcaacttcacgcaacagaaattcccgaacacgcacacatgagcacaaacagaacacgtcaacaacaacaattcttcttctttcccatctctttctcgctccaattgtgtttgtatgagtttaaaaggcaagggaattgttaattttagtacattgcttagcacttgatttaaacgcgcaaattggtgacacaaatatcgatttattaagtttgaactatttaatttgtcgcgcctttcagcttgcaaatagaagtatttactttagacaatcggatgacgcttttgatttcgcatttgtttgcgactgtgtgtgtgcgacgagccttctaattccgacaaaaagaagaagagcaccattcggtggcctaatttgtttcacttctccggaatcaagcttttccgatgcctgcttctattaacctttatttaatatgactcgtgcgttcgacgatatttttgcagtagttattttcttttcgtgcttgtggagtgcacctcttttatgccgcgtttgaagaagaagcacaacgtagtagtgtttgaatgtactgcggaatttagggatgggaatgcgtagctcttgcaatcgatagctcgataagtcccctttcgcgtttcgcagcacttgggcgggatttttaaatctaaggtgtgactattgtgaatcgagaaaaaatgcacatttccacttttccagtaattttcgagttgctcaaaagatattaaaaacttgttgcatttgaaaattaaatggtctttgttcgtttaagtttacaactatatcgagtcttaatctctgagttttcacatagaaatatagtttttatgcaaggaatctccaataatctcttgagtagaatctacaagtccctaaaaatgaggttgcacatttcgttgtttttttggttgagggcaaaagtgcagccggcagttttgtgggagagtgtagagcgcacatgtttggcataaggacgatcaacagactgcaggaaaaccgaacgaacgttggtttgtctgtgaaggaggctttcaattagcatgtgagtcattaaaatagttctagcaaacttacttgagaagctgttcaggtcgctggagttgcatgcacaatttaatgccgctgtagaagtccaagtccgcattcagactcaactttggttcgtgggtgatgctgaaatcctgcactaatttcgcatacgtaaagccaacggccaaatgaccaagaacagcgctgccagtgctataagccaaaagttaatcgtgagttaaataacattccaatcaaatgctttggctttttcacttacttctgctggatttccgtctgggcatttcgattccacaggctgaatcccaccttgccattgagatccacactcctggcgcccagaactcgccagtggagcgtcgccccggaggtcaggattatgtagtgctcgttatcctgggacaaagtggttgcctggtaagcgggcgttgagtccgaggcacttcctccccacacgtgacccattagctcggtctgaccgctgaagaatactaggggtcgcaattgagcaccctgcacactgatctccatgcccgcggtgaccgcttcgtcttcgctgaactcatcatccgccgggattgcatcatttccatcgccggagtcaccatcgcctaccagcgagcccaagccggcagtgtagatgcccaatttaaagctgctggcttgggaacggcctgcgtggagcagaaattccacggagccacgtttcaggattccctgatacacttcctgggtacttagcagggtttcgttgaaggctggagcctgggaaagctgacgggtgaggactgtcgtaagacctgtaagtattaaagttcataattgtttgaacagtgtcattaggaaattaggtactcacccttttgtcccagcacattgtagttgtttacatgcctccgcttgacaagctccgatttgaacaaagccctaaatcgcgggcacttctcagccagcattcttagcttctgcagcacgtatgttttgatctcaaactggcgatcattggaggctaggtaatccaagaagttgcccaattgctcctgagttggccggagggacaggataatatcaagagccagagtgcgagcggagctatcaaagcgacgctttcgctggtagaatatgctctcgaactgcaagcgatgtgaagagttaaagctacctaggggaaaggctttcagagcctgtaaggcagccaccgataaattgggagcctcgccagtttgagcgtgctccagcagagcttcaatggtagcaggatcctggagattttgcagagcccttatgtacaaggtaggctccttggaggtgagaccttgcagtagataagaacgcacttccttcaacaaaggatcttcaacatctagtccgctttggcgggtcaaggtggccacggtttggataacgctttccctcagctttaaatgctttttgatagattcctgttctagcaatccaaacaagtgctcaactattttcctgtctggatgggtggcgaccgccagggactgcaggtatttctctagcagatccaattgctcgcttgtggtttccgactccttgtaaaggaatccaaaggtggcattatgagcatcgaacgtttgaacagcacccaaaagatccaccaactggggcagaacttctgcgtgttccgtaagtagatcttcaaattgttcttgccttgtgatgcgagccaggggaattagttttacgtacgcaagagccagcgaggatttgcccacgtcggcggattgcaattccgtcagagaggcctttaattggtcctccagctggaagaatatatttttagttcagcaatccccaaatttgaaattatttacataccgtttgctctttgatcgcactgatcatgccatctacatcggactctagctcaaaaacgcgataccattcgagcaggctctggatggccttatctaagctgcctagttgcagttgcttgacttcctccgatccttgcgagacgtgttgcagaatcaacgaactcttcacgaagcttcccacatccggtttggcagctagattgaggcggtgattctcctgagactctgcatgcaagagtgtgccctctgaagagagctcgtagaagaccgtctcctgggcttgctgagtaactccaagagcttcttctgggttatagttgaccctgagatcccacagagagcagtcccttttggttttctccactttcgtggatgatttgacattataggacacacgacacaggccagaaacatccagttcctcctcctgggaagcatccaatctgagctgcagcagggaagcaattccgcgctccaagttcaacagggattgatctttggatgtatgggcgatgaccttgtcaggctgtcccctaaccagactaatataaaaaggtctatcgggtatccgggtaattgagcgggcttttccagaggcgtcgaccttgcttccgctgataaaaacctccagtaactggtcctcatctccactccaaactgagttgatcttgagatctgtctcaaatgtatagctcgtctccgcggagcttgaatctcgtcccagttcctggagtatcacttgattctgtagcttgaaaatttgctgactgttcggagctattagggccgtttttccatcctctacagaaatgtggccgaaaagaaatagtagaacacgtcattagtcaaacgaattgttataactttcacccagaagcagcgctacatgctgatatgtattttcgtcgtttactaagcctgggtcgaggttatcaacaagtggccctgcacagtgggcagcgataaggcaaatagtggaagcaacgtgtacgagggagtgataatctgaaggagggatggggtgatagatagcaaaggtcgatgtggatgtgtttaaatccggggatctttgggaacaaatatgatgatgtttatctatgtttcggtttttaacaattcagggtcgggtaactgcacgtttttgtctaactttacagaaacaaaacgaaacacctgtgcaggtcacatttccttgaccttcaatactgttacttgccccactgtaaaaacagctgcttcaattggaaagtgtgtcagataaaagttctctttcggccttttgtttgtgtgcgtaggcggaggtgtggcactgtcaatgttgttgtttatcgccaaacgctacctaccacaaagagttcattcaacttgatcaaaacccatttacccaactaatcgcaaatattggcattacttacccaaaagtcccaaaaagagggccagcagtagcagggttcgcaggcacttcttatttttgttctccattttcccaaggtctttgttcgattctgtacttatattaaactgagcagaggtaaattaaacttaattcattgataataccgagccgagccggcaggcgacggaattaaaagcggaatgaaaacagaacggagctgaggagcgagattctgacttgtggtgactttaagcagctgagagtcgctgagctgggctgtggtgagattgaacagctggcgagcaagagggcgccactgttacggagagtgccagaatgtatgtaaattattcgagcttctacaaacttttttattttatttaaatgagtatacatgttattataacctccaaaaatattcatactatattcatgtaacaggcacaaggaagcgtttccgcgcatattaagtatatacattcttgatcaggatcaatagtcgagtcgatctggccatgtccgtctgtctgtccgtccgtttgaacgttgagaagccaggaactttaaaagttaaaaagttgagattagaaacaaagattctagggacatacaggcagcgcagtttgttgatccatgtcccacgcacactctaacgcccacaacgtttcacgtttttgaaccgtttttcggtattttttcataatggtattagtcttataaatgtctatcgatttgcaaaaaactttttgccacgcccactctaacgccctaaagtcgccaaaccttgcacgtccacactttagaacaattttttttatttattttattacccaatatctaccgatatcccagaaaaattatgaaacttccgcgtttgcattcacactagctgagtaacggttacctgatagtcggggaacatagactatagcattatctcttgtttttaatctgatgtagcttaagtatgactgtaaatgtctaaagtaaggctgagttaataaacgcttaaaacaaatgtatgtatgttcatctttggatatacatatttgcttttggggaacaactacggatatggttatctttccacggggttctattttttatatttttaactaaggattggcgactggaccgttgttcaatcactatagcactgaaaaagttggcagcctcaaaacttcaaacttttggcaggtctccctttttaagtcactgatatataattctttattcagtctacatcaatttcaattgtgatttttcggtaaatattgttacgataaaaatgggaacagcaagcgcgttacctttgaaacagccaccttcccacgaccaccagccgcgtctgaacgaggtgacccaaaagtttctcgccgatttggtcgaggagagccagtgattgtccgcggagtttccactttgcgcactgctaattgccgagggtaaaatcaattcggccctttacagggtattttaatggtattaatcccacattgcagctgtggaccgtgtctatggcactggacgtattcccggcaaggagttatacgcagacgtgtacaagcagaagccgataaagattacccaaaaggtcttcgtgcccgttaatcagtatcccaaggtggttttttatacaattagctatccactccgaccgcaaaatgaatccttacacttgcgcagttcaacttcactggcaagatcctggggaccaaggggaatgctctcttgcgctataaattcccacaacaaatattaatcttaatttttgatttgcatgcctattatgttttgattttgattcctgagcttgtaattttctatgataaattcaaaaactaatgaaataaaacgcattgaatgaattttataaattttttgcaatccgatctaactatgcccgatatacaatcaaaatatgcattacctaattaaacaattaacttactagcgttaaaagttagttagttatatatctaaaaaataaattgataatgaaataaagcggtatgaacttatcacatccttttatcaaatgaagcaaagtgaaacgattcaaaaaaactttataatccattacaattttataaatgaacaagaatattaattaaacataaaataattaaaatatttcaggttttctatcttttttgtaagatattttaaattcccttaggactatgaatccgaagacttttcatatgataagccgtaaatatacacatacaccggcaacttgaagagcaagatttcctcaaatacacattttcaacagtcccaataaaaaatatcccaaaatcactttctgattatataagaaatatttaatgtacaactaatatatggaaaatgttcccgtttttcaaaaacttaatacatatattcaatacgcatttttaaattaaatagtggttacacgatttgatttacattgtgcaaataaagtgatctgcgtcaatgctggaataaatgtgtccctcggaaatcataaagtccagaatgttgctgtaaaaataggaacaataaaatgttataattaatattaattaataaagaatatcaaatgatgcaatagttttggataaacaacttacgtcaactcagagtcgctgatgtgggagaatttggctttcagttccttgcgggagatgccctcctcggaaacattgctcttgatggcctggaatacggcctgctgcttgggctccagcccactgacaatggccgagctctgggaggcggtgaaatcagctatggagcctgagccggaagaagcccctgcaccagctccagctccacccttgctctggtagtcctcggccctgtagcgggcattgagtacttccagcaggtgggtgcacacctcgttgggatccaaaacgggcagtagcttgaagatcattagggttttggaaccgccttgcgaccgggtggtgccgtagaccttcacgtagttgttgaccattacttcgggtgccttgagagcgtcgccctcctcaagccagtagtgcgcatcgatcctgccgctatgatcctccagggtgtaggtgatcttcgtcgaggaagtctccacgttccgcactatggccacaacacatgccatggcgtactgcatgccgaacaactcgatgtttccctctggggcgtccacaatctgcttcaccaccaggggcactattccctagttgcaatcatacggaatcatgttaggttgtgcaactttactggcgtctcactcacttacttctcccttttgattgctggcggctccagttggcgcagtttgtgtggcattgaaatctccaactaaaacgagcttcgttattagttcccttaatttctctgagctacgggctatacttacatgaatcattcattttcttggcttttgagggatttgtaattgagtattctatataatttcacaagggccgctggtaaacaataaaacgcgcgaacgtagagctgatagtgtggccgtaggtcgaacacgtaggaataacatctatttagtatataagaaatacgaaatattgtagtgtcaatatttcaatatttttcctgaaaaactgaattattgtaataaattgggaatatacctttttcagttaaaacaaaaaaagaaaaaccacaaaattttttattttttacaggacttacagcccccttaataattcatttattttcttatgggtaacacaatatttttcttagcactaataatttcagaaacacttagaaacctaaaacctttttcagcgttcgctgaacctctttcctatcggtctttcttccttttttctttagtttcagcatgggctgaaggacaaatgtccttgttcaggcactccccacaatttggcttcactggggtgcaaatggtttgtccgaatcccacgaacaaatgattgacctctgaccagaggctgaatggcagccacttctccaacgccacacgggtttgctcgggctccttggtgggcttcggcacccagcccagcctgttagaaaggcggtggacgtggacgtccactccgattccggttatcttgttccaggccactgccatgcatatatgggccatcttggggccaactcctggaagagctacaaggtccttgacattatctggaatgtccgaaccatacttgtccgtcagtatctccacggtttgcttgaggtatttagctttgttctggaagagatcgagagtaagtgcgatatatttatttattattaattccaccaaaccttgtagaaggatacgggatgcagtaaattctcgagttcagtcactggcatttcctttactttcagtggagttagacctcggtctttaaggcgattcatggcttcataagtagtttggtctttggtttgactggacagcatcaatgccactaagttttggaagcgctgggtctgcaaggaagttgtttgcttgtaacatattcttctatgtacttaattccacttattggaaataccttcgagtctgcttttaaatcggcgcatcggtggcatcccatggtgtccactggcgcagttctggagtttctcataatgcgaatgttttctaggtggttaaaccacaaaggatgtggtgcttgcacctcagaaaaagaaggggaatcctccggagcttcctgttttatttggggttccacctcctctcttatcttatccactctcactggggagtccacagcatcagggaccaccttgcatatgaccacagtagccgaacccatttgaactctggttaccatgcgatcatcctttctaaactttttgggtgccactcgagctggagacaagggctccattttaatgttagttttcttcacggcttccccatttaagagacgctgcttgcgggtttgcacgggggagaagaacactgagctactcgatcctgctgcgccagcagatacaccaaccagatcctctatatcctggaagatttagaaactgcgtcttgagtatcaatttcattgtttatcatgcatttccgcctaccctcacgttatccgccctatttggacgactttttatttccgtgggttttataagatctccgcgttttgccaacttgttggccaacgttaatttctttacatttttggccatagctaatacaatttctgcgcttcagtttcagtttccatgtttgtttacatttcgaacctatcgatttcgatgtaggagaaacggccacactttacaactaagtagccgggaacatttgaaatttcgaaatattcaactcatgcaagttaggattttaagaaccatttttcgtatgctacagcataataagttataagctattacaatacattttaagccacaaatttaattttaatgcacttgatttaaaaaaaagtacaaacttttcgatttcgttatcaacagctcataaaatttaacaaagatatttaaaataaattttatacccgatattcgtatactagattcgttgaaaagtaagtaataagcagaaggaagcgtttccgaccaactacatatatatatattcttgatcaggatcagtcgatctagtatgaacgtcgagatcccaggaactataaaagctagaaggttgagattaagaacagtggttctagagacatagacgtagcgcaattttgtagaaccgatttccaatctaacgcccataaacagcccgaaattgtcatgcccaaacttttgaaaaatgttttactattttttgatttttatgttagttttgtaaatttatatgccaaaatactttacgcccacaagccgcgtaaacctgtcacgcccacattctcagcaacatttaaatttttattttattattttgtttccaatttctaccaatattccaaaaaatattgaaatttctcgttcacacttccagctgtgcgagggaactcgactatagcattctctcttgtttttaatctgatgggtaagtagcttaagtatagctaaagtaaagctgagttaataaacgcttaaaacaaatgtatgttcatctttggatatacatatttgcttttggggaacaacggatatcgttatctttccacagggttctatttttttttatatttttaacaaaggattggctactggagcgttgttcaatcactatagcactgaaaaagttgacagcctcaaaacttcaaacttttggcaggtctcccattttagttcactgatatataattctttatgtagactgacataaattttaattgtgatttttcggtaaatattgttacgataaaaatgggaacagcgagtgcgttatcttcaaaacaggatggatcccgagtcgtccatgaacattaacggactctatctggaggtccacaggtaatggggatccctttgcatatcgatgttacttgacaagcgagttgagcatgtgacatacaacgggttgccattgggcaaagagtaaaaatctattgttattttgcagatctgtcaacgacaaggtgttgggtggcaacagcaatgggtctctcaagtacatcaacccgattaagcaaggtgcgcgaaatccgcccgagtaagttacttgtaaagtaatggacctgagactccccgcgtcctagcagttccttgaatccgagccaacatgcgttgagccaacaactaacattttggtctttatagactcgactatgtggaggaggtggcctatgtcatcctccgtctattacataaggtagttttatgggatgcaccttgggatttatttcggggaactcgactatagcattctctcttgtttgtataccacaatactgtaataacaacattgtaatcaaaaaattgtatttctcattaatcgcaatcggcttttaagaaacaaaaaaaatggaaaatggaatatatttgaattatatacgctctaatcattgagatagcagtcttctttcgtgggcctgcaaagaaagcattaccaacaaaacaaaattaataaatattcatctactgacctcaagtgccagcttcagaaggtgctcgaaactcgaccgacccgtctggagcaccatcccgtaaaagactttgctccacgattgggtcagtagttcgaatggtgatccgaactccactagagtaccagcgtccagaaccatgaccctgtccgaatcgatgatcgtgttcaacctgtgagctatggtcagaactgtgcaatctctgaacttcctgcgaatggtggattgtatgagggcgtctgtttggggatctacatttgcggtagcctcgtccatcacaaggatgcggttctcgcggagaatcgccctggccaagcagaccaactgcctctgacctacactgtagttggatccgccctcggcaaccacactttccaggccattcggcagctcggatacctcatctttgaggtgcacctggcgagggaaaatggtttaattatagttatgattgtcaggtttggtaattactcacctcttctaaggcctcccacaatttttcatcagcatactgttcaaagggatccaaattgcagcgcagggtgccggaaaatagcacaggttcctggggaattatagagatcttgctgcgcagatcatgaagcccaattccaagaatatcggtgttgtctatcaccaaggatccttcgttgtaggacagcctaaagagggcatttataagggaggactttccggcaccagttctgcccacgatgccaatc

SEQ ID NO: 26765 - DNA, 866 bp, DROSOPHILA
atgggaacagcaagcgcgttacctttgaaacagccacctacccacgaccgccagccgcgtctgaacgaggtggcccacaagtttctcgccgatttggacgaggagcgccagcgattgtccgcggagtttccacttttcgcactgctaattgccgaggagttatacgcagacgtgtacaagcagaagccgacaaagattacccaaaaggtcttcgtgcccgttaatcagtatcccaagccgcgtctgaacgaggtgacccaaaagtttctcgccgatttggtcgaggagagccagtgattgtccgcggagtttccactttgcgcactgctaattgccgaggctgtggaccgtgtctatggcactggacgtattcccggcaaggagttatacgcagacgtgtacaagcagaagccgataaagattacccaaaaggtcttcgtgcccgttaatcagtatcccaagttcaacttcactggcaagatcctggggaccaaggggaatgctctcttgcgctataaattcccacaacaaatattaatcttaatttttgatttgcatgcctattatgatggatcccgagtcgtccatgaacattaacggactctatctggaggtccacagatctgtcaacgacaaggtgttgggtggcaacagcaatgggtctctcaagtacatcaacccgattaagcaaggtgcgcgaaatccgcccgagtaagttacttgtaaagtaatggacctgagactccccgcgtcctagcagttccttgaatccgagccaacatgcgttgagccaacaactaacattttggtctttatagactcgactatgtggaggaggtggcctatgtcatcctccgtctattaca

SEQ ID NO: 26766 - protein, 98 aa, DROSOPHILA
MGTASALPLKQPPTHDRQPRLNEVAHKFLADLDEERQRLSAEFPLFALLIAEELYADVYKQKPTKITQKVFVPVNQYPKPRLNEVTQKFLADLVEESQ

SEQ ID NO: 26767 - DNA, 9276 bp, DROSOPHILA
atattttaataaccaatcttcattttgtattgtcatgaagaaaggaaatattgttctattaagaactatttgtgttcatatcttgtaaataaaatcgaatgcaactcagggctaaatatacttaatgctctcaaagtctatttctaattgcaatagcttatgaacatggcactgatcaacgtatttgcctctattagaaggaaatatgaatgaaaactatagacactgaagccccttcagtccgaacaaatcgtttgtgtttcccatttccctttttcctcgtccaggaactgcagtcaaatgattttacgagagagctgagtacgatcaaagcgaaagcgaaactcttgagggacacatggagccagttcctccgcagttcctccggattggtatggagtggggtgcagtcgagtggagtgcatttgggcatgaaagtacagacagtcgaagggcaggagttgactttgaccctgacaccgcctttgggagatccgagtgtgtatctgtgtgtgttgcacaatgcaaatgcgaaacgagaaacaaattttacgacgtgtttgacggctgtctgtcgctgctgtctgcgtgtcttcttgtcttactgactccgactccgaatctgactttgactctcgtttccattcccatttcctttcccttttctcatccggagccggcgctcacttccgcatcggcttgaggccctgtccctgcgggaaatcgcggcgtccttcatccttcatcctgcgtcctattaccactgccctcgtccctggttggctgccagtttagcctcgcattattacctgcgcggtgtcaaatgcaaacaagacgtttgcgccggccataaagacggcatctttaggctcttcttacttttttccttacaggccggagaaaatagccagcgatgatgagtggcgcctggttacaggcggtccttattgatggcccttgctgtggtttacttaccaagtttctgcatctttttttttttgcagaacgcgtcactggaagtgagcaaaccggtggagtagatccatccccattcagcagcggtgcagacccaccaagcaccaccccagcaacaaatctcagcggtggcgtccggccaaaaccacctcgttgcgccgacagcggcgagcatttctccctccagcgtcagttcccatcccacaggtaagctaaaattataattagtccggtttaagccagatatgtatttaaatatgtaatattaaggcgttaaaatgctactaataattataaaatgctattgtgcagagagtttatccctttaaaataattctgcgtgttagcagagtggttcaataggaaaaatgtcaatcatactttatttctatttataaataaaaaagttgaataataatttcaatcgaagaagttatttttggaaatagattgcggcagttaattacaagttttgtattattataagtagaattcttgaagtttttttggggtttacttgatcaactttgttatgtaagcagttggactcttcaactaaatgcgtgatgtgaaaaattaaaaatgaatgttctgatttcacataagaaataatattattcgtctccagtcgcgatgacttctgacattttcttaagcccctgctcaaatgtattattgtaattgctaagtatggatttttatgcgattgtacatacattttgttgtcaaacgggttgagagttgttctcatcgcatcctttttacgatttgttaacatttccttggcctcgactgcgtgccttttgcttttcttccaatggcaattgccataaaattcccataattgtccattgcagcgtaaaatttggcaactgcctttggaagtgagacaaggaggggaatctgtagaagagccaaaagggagaaaggatgttgagataggggtgaaaagagacccggggtttcctaacaattgggctgtcataatttgctgactgaactggcgcacgcatgtatttgtttaactaattagcattaattagtcactgcgcttgacgactcgtataattggtcgcgatccatggtctttatgcagtgagtttttctgtatgttgctgctgttgtggtaatcgataaaaagcgccaacaacaagccaactaactacacacaatgtggtgccatctaccacgcctccccgcccccattccatcgaaatctcggacatagatggcgctgtggtgcgcgcgtgttaagtattcaaatcagcccccagaatcgggcagtaagagcgggcggtgagtctgagagcgttttttgttcgttgaagagcggatgccttcacacgtacactgtgcgtgtgtgtttcgccctcgatgaccccctgtgacttggagcacctgctgagctcagcgaattccagagccagtcccagtcgaagtgcgataccatctttacctcattgaaggcgctagttgaaacagtgctatttcccccagcaacatccaaaactctcttcggctccccccacttacacacgcacactcgctgacagtctgggatccacacagacgctgtatacagtgtacgtgtgcataacgcgccacaagagagccgcaccaactgccatcaacataacatcaaccaccaccaccatcaatctgagtgcttgtgcaacatgcgcatgtccgcgctctcttccaagtcacacggacggggaggcacacacacacacacacacacacacacacacacacacactggagcgggctggcgccgctgcgcttagagtttgtgttcgtgtgctggttctggttctggtcttggtcttgtgttgtcggtgtgccgtgccagcgatgtggatatgttgtcgccgtgcgcgttgctgccgtcagtgtagatttgtgcttcgctctgttcggttggaaggcgcgcgggcgtccagcagcaacaacagcaactacaacaacagccgaggcaagcggccctgcaacttcgtcgaggactgggacttgaacgatttcgtactcgccgtccattcacattcacattcgactgggagtgtttcgttcgaacggttcgaaaaatacaagttgaacattttcgaaaaatttaactgaaagaagaaacgtttttggagtcgtataaaaaattaaatcaaaaaacaaaaaacacaatcaaaacatcgtgtcgccggcgttgtgaggagaaataataacatttttgttaactgttgcaaacattgcctttaattgtttgttttggtcgtaaaatcaaattttatgaccagcaacataaaaagcgaacgccagcagcagcaacaacaacgactgcaggccccacaaataataaactatttatgataattataaaagagagaagaaaatcaaaaacaaacgccaaccgaaaaaaaaagaaaagtgaaaagaaaacattaactgacaaaggaaaaattggaaaagttttggaaaattggattgaccgaatgaaaactgaaaaaagccaatttgaaaatactgcgtgagttgctgacgaccgcaagcaccctgtgaaattcaagctgattcgatcccctgtgcaacaacaaagttactctcttcgcccgctctttaggcagtgtgcgtgtgtgagtaagtcggcgtgtgcgtgtgaccgctgacggacgtttgtgtgcgtgtgcggtacgcaaataaaaggggcaaaactcgagtaaaggtgctctgaatattaaaaataaaaattattaagtcgcgaaaaaaatataaagagacttaaacaattagaaaggcgtcactcagaggagtgagaaaaaaaagacagagaaaggtcggtgggtcgaggcgatcgaccccactgcaccgcctttatcctcgccgccgcagttcgagtgcaacgcgtccaagataaccgtaaatattccacccctcccccaaaccccaaccatcccgctggcgtgcgctctctacgacccccacgatgtctcggcagtcgggtcgcacgccgctgccggggcgtggtgggggcatcacacacacacccacacccacgtacccaccgccccgcacccgcatccgcatccccaggcgcatccctccctgcccgtcatgcagcagcaccatctgcagcagcagcaacagcagcagcagcagcaggagcagcagcatctgcaggagcagcagcagcatctgcagcaactgcatcaccatgcgcaccaccacctgcctcagcctctccacaccaccagccatcaccacagcgcgcatccccacctgcagcagcagcaacagcagcagcaacatgcagtcgtcgcctcctcaccctcctcggtgctccagcagcagcaacagcagtcaactcccaccacacattccacgcccacgcatgcggttatgtacgaggatcctccgcctgtgccacttgtcgccgtacagcagcaacacctccccgctccgcagcagcagcagcaacttcaacagcagcagcaacagcagcaacaacagctggcgacaacaccggtggccggcgccctcagtcctgcccaaacacccactggaccctccgcccaacaacagcaacatctcacatcgccccaccaccagcaactgccgcagcaacaaaccccgaacagtgtcgccagcggcgcctcctcgaatctccagcagcagcagcaacagcagaatgctgcagttgctcctggccagacgcagatcgttgcgccgaccacggcgagtgtttctccctccagtgttagttctcagaaggaaggtgaggtcccagaaatataactttccttggggttgaaaaccagcggatttcttattggaactccattggttatgggctttcaaagatcgttgggaaatatattttttgaaattttctacatctgaactggaaaactctcgaaataaattggggacgttaaattgggaacggggtcgttccacttgtttttttttccccccagttgcaataacgtttcagttgtgctgattgcagcacgtttttcaaggctgataaggcttttctttaactctcccaggaatcgtcacgcatttaatttatttactcaaaatatttgcgtctgttttatcattatagactatataattgcagggtggtaacaactttaattttgtaaggaaattaaaaatttttaaaaatattgtttgtgagtgtactgaagttcttcaaaactgcattggtttttttttaaagagtttacacaaaaaaaaaaattaaacgatgatttgaaacgtaatcgttatggtaaccattttattaccttaagtgttgacacgtgttaaatatacagatttatatatagacgaggtgtgaatgcacccacatccatgacatcgacaaacaatctaagggttataggcacaaatgccacgccaagtgataaaatgccaaatgatcaaggaggtcgatttgatcatagacagtcgttaaaattagacttaccagccctagtgccaatattaacagcagcaaatctgcgcttatcgtttactttcagacatcaatatgtccatacaattagcgccactgcatatacccgccatccgggccggtccgggattcgagacggacacctcggcggcggtcaagcggcacacggcacactgggcctacaacgacgagggattcaatcagcattacggctccgggtactacgaccgcaagcacatgttcgcctatccttacccagaaacgcagtttccggttggtgtaagtatggccacagcgccacccacgcctccacatcagttgtaagcaacttcgttccaacccgacctcatttctcccccgcagcagtactggggccccaactaccgccccgatcagaccacctctgccgcagcggcggcggcctacatgaacgaagcggagcgccacgtgagcgccgccgcccgacagtccgtcgagggcacatcgacgtccagctatgagccgcccacctactcctcgccaggcggcctgcgcggctatcccagcgagaactactccagctcaggtgagtccagaccggccagagtcggcacacttaagggtaacgaggttaggcacactggaaataattttgagcatcttgcaactctagtttgggaggagaaattttaaagattaaaaattaaaaatttactgtttacaattcttaaaatttttaataaaatatttggttattcatatgaaattaaattaaagtgaaaaattatacgaattcaaaattctgtttaaaaagaggcgttcaaattccacctaaatgtttttaattgtaaaatatatatttatagaccgtcaaattttccaatgaatcgataattatttggaagtgttttttatatggtgctattattttttttcctaaaagccaagccaattatttaaacagccctaaaatattaagcatcctacaatataaagttcaagattatttgattttcctatgtgcactagacttttcgtcgtcgtatcggttgaaatagcaaattgcgaaaccgtcaagtttgtcgttcaattagcgtagtgcaaaacggcccataaatcgatactcgctatttggctagcgttacgcctttatgtgggtgcgaaagtcattggggtttgcattctatggggttgcctgtttatgttcgtgtcttatcaccaggtgtttttcaactgccagaattgtatctgtcgactagtcatattttcccagtagtatccatggtatccatagtaaagactcgttattatggcggaatatgtcagttaagtgacctcgccagccaattttacaattggaattcaggtctcttaggctcgataattaatttccaatctgacctaactgtcctaactgttcaatgctaccaagactaatcgaagaaatcagattagattcgaaaagctcttcactcgtgctgaactagcgtttaaattaaaataaatccaacttgtcactttatttcaacattaatttaattgcttcatttggtcggccaatgagcgggaacgaatgtattcatttagtgttatccactcgagtgtgaatatgggcctcatgccaattcggagctccgctccccgtaccgcaccaattaagaggccataaatgaggaattgaataatttcgtattacgcttattgctaaacaatttccgtaattgctctataaacttaacgatctgatattgcaccgaacaccgagcaacaaaaccatcggaccacccgcacttgcggtttaatgaagttaaccatgtagtttaaccccattacttgatgatgttttcaggagcctctggtggattatccgtgggagcagtgggtccttgcacgcccaatcccggactgcacgagtggaccggtcaggtgtccgtccggaaaaagcgcaagccgtactcgaagttccagaccctggagctggagaaggagtttcttttcaatgcgtatgtttccaagcaaaagcgctgggaattggccagaaatttgcagctgaccgagcgacaggtgagtccataaacctactgacttgaactgaattcattaaacaggcgttcctttcaggtcaagatatggttccagaatcggcgcatgaagaacaagaagaactcacagcgccaggccaatcagcagaacaacaacaacaattcgagcagcaaccacaaccacgcgcaggcgacccagcagcaccacagcggccaccacctgaaccttagcctgaacatgggtcaccatgccgccaagatgcaccagtgacccttggacaacagcagcgctggcgccatgggctttgccacctactagcagttagccaatccgagttcgggtaaccccagctcgaatcccaaccccatgtccgatccgaatcaccatcatctaatcaagaacgagctggccatggactttccatgctagtccagcgattggaagggcgattccagccaggccgagttcagtcggttaaatgtacaaaaaccagagatctctagcatgcgggataggaatatgtgaccacaatgaggagcaaggatgtggatgagcaactgcccagaagtgcgcaggcgtcgctgatgtgtgaccaaccgacgttgatgcaaatgcagtttattattaagtcagttctacggatcccagagatccaagccccaacacgataatgcagcttagttcggtagttgaatatagatacgagtaagatgaagagtaagcagcagcagtagcagatgcacttgaaattcgcaactgtacgaaaatatatgtatgtacgtatttctctcaacgctctcattagcctaggcgagcactatgaattttccgaactataaattatgaatatgaatatacttaaacgtcagtgaatataaccccgcataaattatgaatacacgcgttcgagtagtagattttaccatacctatccaattaagagcggccacaaggcggctgagttaggctgagcagcagaacacattttagacccagataaatgttcttgaaacacaaattgaaattgtttaacaattttcggacccctcacagctccgcaaacaagaagacacactccgcagtctaggataaattttgtcgtataatgttcgtcgtgtcgtgtcctttgataccttctaagttcctgtatataaactaagacattgcgctgatttccggccgaagcgagcactcgataactaaattacatcagatatatgtatatgtatattgcgtacacgcagagatattcaatatttgtataatatgaactcggattcgattttagcaaatggttaattgtaagttgcaaaaatttcaatgagtgtgtgcatgtttaccccatagttgaagtcgctttcgaattaaattaactcttaaaccaaggaaaacacttaacaaaactactcgtaaagctaaagcaacaaaaacttaaaagatacacacttaacagaagtaagcgagtgtgaaaacgatggaggggagatgtcggggaggagtaattagcataccgtaacagctacttatataacatacacatagtacatatagtaatcgtacatatgcatacatatattttcatgtgtatcgacgccgcttgatcctgatattaagtctaagtttagttgtgttgtgtaattatcgattttgttaatgttttgccccgagcattatattatattatgctaacctatacctatacctacacctacacctatgcctatcattatatgtgtataattagcctatacatacttgatgaagaaatgatttcacccactgctttattcatgttcttgtattattattatttcgagccctcgata

SEQ ID NO: 26768 - DNA, 1559 bp, DROSOPHILA
gcagaacgcgtcactggaagtgagcaaaccggtggagtagatccatccccattcagcagcggtgcagacccaccaagcaccaccccagcaacaaatctcagcggtggcgtccggccaaaaccacctcgttgcgccgacagcggcgagcatttctccctccagcgtcagttcccatcccacagacatcaatatgtccatacaattagcgccactgcatatacccgccatccgggccggtccgggattcgagacggacacctcggcggcggtcaagcggcacacggcacactgggcctacaacgacgagggattcaatcagcattacggctccgggtactacgaccgcaagcacatgttcgcctatccttacccagaaacgcagtttccggttggtcagtactggggccccaactaccgccccgatcagaccacctctgccgcagcggcggcggcctacatgaacgaagcggagcgccacgtgagcgccgccgcccgacagtccgtcgagggcacatcgacgtccagctatgagccgcccacctactcctcgccaggcggcctgcgcggctatcccagcgagaactactccagctcaggagcctctggtggattatccgtgggagcagtgggtccttgcacgcccaatcccggactgcacgagtggaccggtcaggtgtccgtccggaaaaagcgcaagccgtactcgaagttccagaccctggagctggagaaggagtttcttttcaatgcgtatgtttccaagcaaaagcgctgggaattggccagaaatttgcagctgaccgagcgacaggtcaagatatggttccagaatcggcgcatgaagaacaagaagaactcacagcgccaggccaatcagcagaacaacaacaacaattcgagcagcaaccacaaccacgcgcaggcgacccagcagcaccacagcggccaccacctgaaccttagcctgaacatgggtcaccatgccgccaagatgcaccagtgacccttggacaacagcagcgctggcgccatgggctttgccacctactagcagttagccaatccgagttcgggtaaccccagctcgaatcccaaccccatgtccgatccgaatcaccatcatctaatcaagaacgagctggccatggactttccatgctagtccagcgattggaagggcgattccagccaggccgagttcagtcggttaaatgtacaaaaaccagagatctctagcatgcgggataggaatatgtgaccacaatgaggagcaaggatgtggatgagcaactgcccagaagtgcgcaggcgtcgctgatgtgtgaccaaccgacgttgatgcaaatgcagtttattattaagtcagttctacggatcccagagatccaagccccaacacgataatgcagcttagttcggtagttgaatatagatacgagtaagatgaagagtaagcagcagcagtagcagatgcacttgaaattcgcaactgtacgaaaatatatgtatgtacgtatttctctcaacgctctcattagcctaggcgagcactatgaatt

SEQ ID NO: 26769 - protein, 270 aa, DROSOPHILA
MSIQLAPLHIPAIRAGPGFETDTSAAVKRHTAHWAYNDEGFNQHYGSGYYDRKHMFAYPYPETQFPVGQYWGPNYRPDQTTSAAAAAAYMNEAERHVSAAARQSVEGTSTSSYEPPTYSSPGGLRGYPSENYSSSGASGGLSVGAVGPCTPNPGLHEWTGQVSVRKKRKPYSKFQTLELEKEFLFNAYVSKQKRWELARNLQLTERQVKIWFQNRRMKNKKNSQRQANQQNNNNNSSSNHNHAQATQQHHSGHHLNLSLNMGHHAAKMHQ

SEQ ID NO: 26770 - DNA, 6622 bp, DROSOPHILA
gcgtcgagagcatccaggtggagagccagggtcaggtcaacaggctgaccaccttctggcaggagtccgatgtggacatgtcccgtggccttgattttgtgccgcgcggccatgtcctcgctcggttcacccatctgcagcaccacgaattcagctacaccatcaaggtggagaactccagcgaggccacgcggtatggctacgtgcgcatcttcctggcgcccaagctggatgatcgcaatgcacccatgctgctggagcaacagcgcctgatgatggtggagctggacaagttcgtggttaccatgcctcccggcagccatacgatcacccggaactccacggagtcgagtgtcaccattccgttcgagcgcaccttccgcaacctggacaagctggaggagctgcagaacttcttgtgcggctgcggttggccccagcacatgctgattccgaagggtcggcccgagggtctgcgcttcgagctcttcgtcatggtttccaactacgaagaggataaggtaaggtgtctttagagtatactgcgaatgcctcctgatcccaatcctctttccttgtgcaggttgaccagacggtcgcagattgcggctgcagcatcgccgcttcctactgcggcctgcgcgatcgcctctatccggatcgcaagtccatgggcttccccttcgatcgcaagccgcgtcgaggctccgagatcctggagaacttcctgacgcccaacatgtgcgccgtggaggtcatcattacccacgaggaccgcaccgagaagcttcgcgaggtaccagctcgctcctgaataagagaagcatcttgttatggccagtttcattttttggcttaaagagaagccactaataacggtctatagctttctcgctgtgtagaaaataccaaataaattaatgaaatactatcagatgccaaaataccagtttaccgttggaactccccgcgaacggtcacactgtgctgcggttgggggcggaattgaatttatttgcaaacaaaaatcgaaacacgggagctcgacgttagcgtaagtgttacggccaccgattcagctgctggccaattaaaatatcatcgatgttgcacacagatacgccgcacagacactcacgcacacacgcaccgcctgggagcaagattcgagcccagaatctcaatttgatcaatttagcattctggccatttgacaatacaaattgagactcgtctgcactgggtacaaagttcagtccgtgtgcattggcctgtgcctgtgtgcgtgcattcgggcgtgtgtgcctgtgtgagtctgtgtgtgcagtacgcaaatgagaggagaaaaagcaagaaaccactgccaatcatttttcagtctgtgtccaaagcgcttgtgtgaaagtattctgattcgcccgcccgcccgtgaaagtgttttctgcaattttccgcatccgcattcgcatcacaatggctgcgcacttttttcgcactgcattttacgcaacggcggccagaaaatcgatgagtctgcccttcgccggccggacagccgcaactctagccgtgggcctatcattcggtggtaaatccctgtcctcccgcatctcaccgacttatttataacttttgcattgcccaccatccccaccgccatcgccactcccaatataccaacgcacgcgagtagcgcaaaatagccgggcagccgtgccgtacgagaatgcctacgcggacagcttcttcgggggctgccagacgcagggactgctccagcggattccccagaccggatacatccagcccccgctgatgcggaacttctcgagcctgcagacgggccaccagcagcagcagcagccggctccaaatgtaagcatattgattggttctggtcctccatcgattctggtaacgtggattccagcgactagatttccactaggatgcactccaaattttgactcttaaaacttatctcttcagttgttgcattacttactcgtatgattaatcaaaattgcgaactttgatcttatggttcagatactcttagaatccgctctatcttcacattaagacattatttctttagttacttattctaaagcaaaattatctccacgacgcaagtagttatgaaaatatatatgtactttacaaaaggataagataaacctgaaccgcctaagattaaatgtagttgtccatgacgcggtcaacgtagttagcattagaaaatagttttacagcttaaaaagcttaaaaaaaatgacaatagcttcgatgcatagatcagatatcatacgtggatgagccataaattgcagggtatacgctaatgagctgtagagcagcttgtattgaacatctgttgttgatctgcggttgaacctttaattacctccaattcgcttcttcattttaagcactttatagttggtgactttggaaatttgcatgcttgagtaaactgtagtccctgcactttgtacccggcaaatgatttcggtttccaatctctcccaacctcgcttcctctgcaatggtgatttgtacagataagcttagcttactttgtatatatttgtaaacatatgcacatattctaatcgttgttttgcaattagtgaaggctcattaaccgcttgaactaaccatacaattaacgatattattaatttatgtcatcaatattccagttccattgaactactgcccttatcctggggcacacttctggatccaccctcgcattcagcaagctcaattgagctggggcacagcttttttcacgattcaaatcataatggcgccccaatgccaagctttcgctcgatccgccaaatgttcgtgttctgtgtttatttttaggcggcaagttgatacccaagttaaaacttaagtctgggtatttcggattcaaagatagtcactatacactcatctataaaggttagtgttagctatcaacaaattagggcagaatactgcttaatataaaaagaatcctgttaagttaaatttcacatggtatcttttagtcgagactaagagttcacctttcgcaaatgggactgaggcttccagtgccgcaatgtaatttaaaccaatgccgcaaagagtagaaaaaacatattcctccctatacacacacacacatcagctgaaataactatgtaccttccatggggattgggaatgtaagctcgcctcaattccgctcaactatccgtgatcgttccactggatcgctggactatatgctatataatgtggatcagtcagtcggtcaaagtcgttgcacctgcttagttttatcttcgatatggacttcctaattgaaataacattactggtcatattggcaattatactgctgaagatctatcatcgggcgaaacgtgtgagtggccatacaatttggggtcgtcggtcaagttcaaagtgtcaagccaaagtgaaagtgtgctccagcattaagtcacgatttgtctcaattataatgagcctcatttaactcaatagtgcggaaactgttaggtcacaataatgtttcactaatctaaattgcaactgcttatcgtcagactttgcggggctatcttcgaacttataatgctatcagtcggcttagccttgctgaaatgggggaaaagaacctaaaacctttgcacctccttcatttggtcacttgccttcgtgcttgctacaagcaacttctgataactcgccactgaaaacggtatgaaaatagtctagtcttttgatttccttataaatcacagtgtttgagagttcgaaaagtgatcgtagtaattgaatatcaatcgcggtaacatgattccatgaaataaccaaatgcacacacacctgggcttatcttatcacaaacagctgttcatgattgtaacgtgttgagcgagtttcaaggtcagcagctgttgccgaggataaatcagtgctaaaatacttaatataagtattccccctaatttgcatggatttgggtgcccccgctaatctgcagccgatcggaccatattaaccacttaagctttcatatcttatcagttagctgctcagttagtgactggacctatccaaactttggttcgcagggcgattagttcatggaatagcctaggtgtaatcgcttggtcgcacatttgaagagcggagagaatcgaaatcgtatgcatatttgcttagttattgaattctaaacgtatgccttgcactccaacttgtttgttgtttctaaagtttcattttacccacccaacgcactaaccatcccgcatcagctgtgcccgaacatgactaatagcccgtttctcccgaactcagagtgccatggcgccgtcgaacaatcgccggtacttatcctcgcaggatattaccaagaacatgaccctgtacaccagcaccaagacccaagttgaggtggatcccaagacgctggccttcaagaagcccactggcaacccactggttctcatgatggcctggctgatggccaagcagaagcatctgaagaagtatgcccagatctacactgagatgggattcgatgtggtggtggtgcacattacgccgtggcagctactctggccggtcaaaggatcccaggtaatagccgcccttcaaagtttacattccaagttgagtcattcaaacactaatgcatccatttcctgctgaccaggtggtggccgccgagactattcgattcctggagaacaacaagtcgtacgaacccattgtgatgcatggcttctccgtgggcgcctaccagctgggcgagatcatgctgcagatgtcgcgcgacatggatcgctatggtagcattctggaccgcttcgtgtgccaggtgtgggacagcgccgccgacatcaccgagatcccggtgggcgtgcccaagtcgatcttcccgaggaacgagcgaatgcagagcgccctgcgcaactatacgctgtaccacctgaagacattccacaaccaggccaccatccactacatgcgctccagccagatgttccactccacgctgctcaaggccccggcgctgttcttcgtgtccgacaacgatcccatcggtccgccgtcctccaaccagtccgttcgcgaggactgggagcgtgcgaacatcaaggttaccttcaagtgctgggagcggtcccagcacgccgcccactatatacggcatcgcgaggagtacctgcagacgctgttccagcatctggagacctgcggtgtcttggaggccatcggcgtgccgaagcgcgccaagttgtaggtgtctctaacgaggagcggctgatcagttcagtgatatacatttattcaagaatcaatgcgattatgattttaccctagttgctaagacctaaagattaacgagcaatgtaaaaccaatgtcctctttgaatgattatgatctgtgtgtctctcgcgaggcagaatcttcaaaagcccgcacgggaaattcctaggctaagcttaaagtcgtatttcatcaaccgagagaagaatgcactacgcctctatattgttacatatattttgagatcgctgcaaaacagctaaataaagtaatttaaatgatacgaacacattaaatgagtgtttcaatcaagtatgtgctggttaaacaagtattttcacaagatatatgcgatgaaagattcttaaaaggtctgaaaaaatatctcgggttaaaattggttcgacaaaaaaaaaacgtgttacaactacactatcgctgcggacaggacttgaacctgtgcgggtagaacccaatggatttcaagtccatctccttaaccactcggacaccgcagccttattgaagtccgctccatttgtcactgatatctctccctgcataattctatgctgataagcatctgaatttctgcaaagcgatgacagtaaatcactagatatttgaatgcagaaatatgcagttcaatttcttcaataccacaagttttagtttaattgatagctgctcttcatgacatgtgctcatacttctatatgtaaactattagcttaagtgagagcgaactaaaaaataatgtattgctacattattttatttatttatgtattaagctaataatctttatggattcattagccccacgtgaacgaaactccaattttcattaagaatggcttaagccgagacaccaccccgtgaatagttcttggttcgtgtctgtataaatggtgcgtcatacctggcgaagataggtgaggggggtgctgaaatctatgcttcataccaaataggaactttgccaccggggcgacacagttgcggtgtccgagtggttaaggagatggacttgaaatccattgggttctacccgcgcaggttcgaatcctgtccgcagcgcagaactttttttattttttatttattgtgaatttgcagagggtactaatagctgaccttaatatttctttgacatttcattgttaagcattatactttctgtgatgaagatgaaaacaaactagtgtataccagccttgcccaaccattttccgcaatacccctcagaaaaaccacgtttgtacaaagattgactttaaagatcttcatctt

SEQ ID NO: 26771 - DNA, 1900 bp, DROSOPHILA
cggaattgaatttatttgcaaacaaaaatcgaaacacgggagctcgacgttagcatacgccgcacagacactcacgcacacacgcaccgcctgggagcaagattcgagcccagaatctcaatttgatcaatttagcattctggccatttgacaatacaaattgagactcgtctgcactgggtacaaagttcagtccgtgtgcattggcctgtgcctgtgtgcgtgcattcgggcgtgtgtgcctgtgtgagtctgtgtgtgcagtacgcaaatgagaggagaaaaagcaagaaaccactgccaatcatttttcagtctgtgtccaaagcgcttgtgtgaaagtattctgattcgcccgcccgcccgtgaaagtgttttctgcaattttccgcatccgcattcgcatcacaatggctgcgcacttttttcgcactgcattttacgcaacggcggccagaaaatcgatgagtctgcccttcgccggccggacagccgcaactctagccgtgggcctatcattcggtgcgcaaaatagccgggcagccgtgccgtacgagaatgcctacgcggacagcttcttcgggggctgccagacgcagggactgctccagcggattccccagaccggatacatccagcccccgctgatgcggaacttctcgagcctgcagacgggccaccagcagcagcagcagccggctccaaatagtgccatggcgccgtcgaacaatcgccggtacttatcctcgcaggatattaccaagaacatgaccctgtacaccagcaccaagacccaagttgaggtggatcccaagacgctggccttcaagaagcccactggcaacccactggttctcatgatggcctggctgatggccaagcagaagcatctgaagaagtatgcccagatctacactgagatgggattcgatgtggtggtggtgcacattacgccgtggcagctactctggccggtcaaaggatcccaggtggtggccgccgagactattcgattcctggagaacaacaagtcgtacgaacccattgtgatgcatggcttctccgtgggcgcctaccagctgggcgagatcatgctgcagatgtcgcgcgacatggatcgctatggtagcattctggaccgcttcgtgtgccaggtgtgggacagcgccgccgacatcaccgagatcccggtgggcgtgcccaagtcgatcttcccgaggaacgagcgaatgcagagcgccctgcgcaactatacgctgtaccacctgaagacattccacaaccaggccaccatccactacatgcgctccagccagatgttccactccacgctgctcaaggccccggcgctgttcttcgtgtccgacaacgatcccatcggtccgccgtcctccaaccagtccgttcgcgaggactgggagcgtgcgaacatcaaggttaccttcaagtgctgggagcggtcccagcacgccgcccactatatacggcatcgcgaggagtacctgcagacgctgttccagcatctggagacctgcggtgtcttggaggccatcggcgtgccgaagcgcgccaagttgtaggtgtctctaacgaggagcggctgatcagttcagtgatatacatttattcaagaatcaatgcgattatgattttaccctagttgctaagacctaaagattaacgagcaatgtaaaaccaatgtcctctttgaatgattatgatctgtgtgtctctcgcgaggcagaatcttcaaaagcccgcacgggaaattcctaggctaagcttaaagtcgtatttcatcaaccgagagaagaatgcactacgcctctatattgttacatatattttgagatcgctgcaaaacagctaaataaagtaatttaaatgatacgaacacatt

SEQ ID NO: 26772 - protein, 389 aa, DROSOPHILA; identical to SEQ ID NO: 5661

SEQ ID NO: 26773 - DNA, 6245 bp, DROSOPHILA
ttccgcaacctggacaagctggaggagctgcagaacttcttgtgcggctgcggttggccccagcacatgctgattccgaagggtcggcccgagggtctgcgcttcgagctcttcgtcatggtttccaactacgaagaggataaggtaaggtgtctttagagtatactgcgaatgcctcctgatcccaatcctctttccttgtgcaggttgaccagacggtcgcagattgcggctgcagcatcgccgcttcctactgcggcctgcgcgatcgcctctatccggatcgcaagtccatgggcttccccttcgatcgcaagccgcgtcgaggctccgagatcctggagaacttcctgacgcccaacatgtgcgccgtggaggtcatcattacccacgaggaccgcaccgagaagcttcgcgaggtaccagctcgctcctgaataagagaagcatcttgttatggccagtttcattttttggcttaaagagaagccactaataacggtctatagctttctcgctgtgtagaaaataccaaataaattaatgaaatactatcagatgccaaaataccagtttaccgttggaactccccgcgaacggtcacactgtgctgcggttgggggcggaattgaatttatttgcaaacaaaaatcgaaacacgggagctcgacgttagcgtaagtgttacggccaccgattcagctgctggccaattaaaatatcatcgatgttgcacacagatacgccgcacagacactcacgcacacacgcaccgcctgggagcaagattcgagcccagaatctcaatttgatcaatttagcattctggccatttgacaatacaaattgagactcgtctgcactgggtacaaagttcagtccgtgtgcattggcctgtgcctgtgtgcgtgcattcgggcgtgtgtgcctgtgtgagtctgtgtgtgcagtacgcaaatgagaggagaaaaagcaagaaaccactgccaatcatttttcagtctgtgtccaaagcgcttgtgtgaaagtattctgattcgcccgcccgcccgtgaaagtgttttctgcaattttccgcatccgcattcgcatcacaatggctgcgcacttttttcgcactgcattttacgcaacggcggccagaaaatcgatgagtctgcccttcgccggccggacagccgcaactctagccgtgggcctatcattcggtggtaaatccctgtcctcccgcatctcaccgacttatttataacttttgcattgcccaccatccccaccgccatcgccactcccaatataccaacgcacgcgagtagcgcaaaatagccgggcagccgtgccgtacgagaatgcctacgcggacagcttcttcgggggctgccagacgcagggactgctccagcggattccccagaccggatacatccagcccccgctgatgcggaacttctcgagcctgcagacgggccaccagcagcagcagcagccggctccaaatgtaagcatattgattggttctggtcctccatcgattctggtaacgtggattccagcgactagatttccactaggatgcactccaaattttgactcttaaaacttatctcttcagttgttgcattacttactcgtatgattaatcaaaattgcgaactttgatcttatggttcagatactcttagaatccgctctatcttcacattaagacattatttctttagttacttattctaaagcaaaattatctccacgacgcaagtagttatgaaaatatatatgtactttacaaaaggataagataaacctgaaccgcctaagattaaatgtagttgtccatgacgcggtcaacgtagttagcattagaaaatagttttacagcttaaaaagcttaaaaaaaatgacaatagcttcgatgcatagatcagatatcatacgtggatgagccataaattgcagggtatacgctaatgagctgtagagcagcttgtattgaacatctgttgttgatctgcggttgaacctttaattacctccaattcgcttcttcattttaagcactttatagttggtgactttggaaatttgcatgcttgagtaaactgtagtccctgcactttgtacccggcaaatgatttcggtttccaatctctcccaacctcgcttcctctgcaatggtgatttgtacagataagcttagcttactttgtatatatttgtaaacatatgcacatattctaatcgttgttttgcaattagtgaaggctcattaaccgcttgaactaaccatacaattaacgatattattaatttatgtcatcaatattccagttccattgaactactgcccttatcctggggcacacttctggatccaccctcgcattcagcaagctcaattgagctggggcacagcttttttcacgattcaaatcataatggcgccccaatgccaagctttcgctcgatccgccaaatgttcgtgttctgtgtttatttttaggcggcaagttgatacccaagttaaaacttaagtctgggtatttcggattcaaagatagtcactatacactcatctataaaggttagtgttagctatcaacaaattagggcagaatactgcttaatataaaaagaatcctgttaagttaaatttcacatggtatcttttagtcgagactaagagttcacctttcgcaaatgggactgaggcttccagtgccgcaatgtaatttaaaccaatgccgcaaagagtagaaaaaacatattcctccctatacacacacacacatcagctgaaataactatgtaccttccatggggattgggaatgtaagctcgcctcaattccgctcaactatccgtgatcgttccactggatcgctggactatatgctatataatgtggatcagtcagtcggtcaaagtcgttgcacctgcttagttttatcttcgatatggacttcctaattgaaataacattactggtcatattggcaattatactgctgaagatctatcatcgggcgaaacgtgtgagtggccatacaatttggggtcgtcggtcaagttcaaagtgtcaagccaaagtgaaagtgtgctccagcattaagtcacgatttgtctcaattataatgagcctcatttaactcaatagtgcggaaactgttaggtcacaataatgtttcactaatctaaattgcaactgcttatcgtcagactttgcggggctatcttcgaacttataatgctatcagtcggcttagccttgctgaaatgggggaaaagaacctaaaacctttgcacctccttcatttggtcacttgccttcgtgcttgctacaagcaacttctgataactcgccactgaaaacggtatgaaaatagtctagtcttttgatttccttataaatcacagtgtttgagagttcgaaaagtgatcgtagtaattgaatatcaatcgcggtaacatgattccatgaaataaccaaatgcacacacacctgggcttatcttatcacaaacagctgttcatgattgtaacgtgttgagcgagtttcaaggtcagcagctgttgccgaggataaatcagtgctaaaatacttaatataagtattccccctaatttgcatggatttgggtgcccccgctaatctgcagccgatcggaccatattaaccacttaagctttcatatcttatcagttagctgctcagttagtgactggacctatccaaactttggttcgcagggcgattagttcatggaatagcctaggtgtaatcgcttggtcgcacatttgaagagcggagagaatcgaaatcgtatgcatatttgcttagttattgaattctaaacgtatgccttgcactccaacttgtttgttgtttctaaagtttcattttacccacccaacgcactaaccatcccgcatcagctgtgcccgaacatgactaatagcccgtttctcccgaactcagagtgccatggcgccgtcgaacaatcgccggtacttatcctcgcaggatattaccaagaacatgaccctgtacaccagcaccaagacccaagttgaggtggatcccaagacgctggccttcaagaagcccactggcaacccactggttctcatgatggcctggctgatggccaagcagaagcatctgaagaagtatgcccagatctacactgagatgggattcgatgtggtggtggtgcacattacgccgtggcagctactctggccggtcaaaggatcccaggtaatagccgcccttcaaagtttacattccaagttgagtcattcaaacactaatgcatccatttcctgctgaccaggtggtggccgccgagactattcgattcctggagaacaacaagtcgtacgaacccattgtgatgcatggcttctccgtgggcgcctaccagctgggcgagatcatgctgcagatgtcgcgcgacatggatcgctatggtagcattctggaccgcttcgtgtgccaggtgtgggacagcgccgccgacatcaccgagatcccggtgggcgtgcccaagtcgatcttcccgaggaacgagcgaatgcagagcgccctgcgcaactatacgctgtaccacctgaagacattccacaaccaggccaccatccactacatgcgctccagccagatgttccactccacgctgctcaaggccccggcgctgttcttcgtgtccgacaacgatcccatcggtccgccgtcctccaaccagtccgttcgcgaggactgggagcgtgcgaacatcaaggttaccttcaagtgctgggagcggtcccagcacgccgcccactatatacggcatcgcgaggagtacctgcagacgctgttccagcatctggagacctgcggtgtcttggaggccatcggcgtgccgaagcgcgccaagttgtaggtgtctctaacgaggagcggctgatcagttcagtgatatacatttattcaagaatcaatgcgattatgattttaccctagttgctaagacctaaagattaacgagcaatgtaaaaccaatgtcctctttgaatgattatgatctgtgtgtctctcgcgaggcagaatcttcaaaagcccgcacgggaaattcctaggctaagcttaaagtcgtatttcatcaaccgagagaagaatgcactacgcctctatattgttacatatattttgagatcgctgcaaaacagctaaataaagtaatttaaatgatacgaacacattaaatgagtgtttcaatcaagtatgtgctggttaaacaagtattttcacaagatatatgcgatgaaagattcttaaaaggtctgaaaaaatatctcgggttaaaattggttcgacaaaaaaaaaacgtgttacaactacactatcgctgcggacaggacttgaacctgtgcgggtagaacccaatggatttcaagtccatctccttaaccactcggacaccgcagccttattgaagtccgctccatttgtcactgatatctctccctgcataattctatgctgataagcatctgaatttctgcaaagcgatgacagtaaatcactagatatttgaatgcagaaatatgcagttcaatttcttcaataccacaagttttagtttaattgatagctgctcttcatgacatgtgctcatacttctatatgtaaactattagcttaagtgagagcgaactaaaaaataatgtattgctacattattttatttatttatgtattaagctaataatctttatggattcattagccccacgtgaacgaaactccaattttcattaagaatggcttaagccgagacaccaccccgtgaatagttcttggttcgtgtctgtataaatggtgcgtcatacctggcgaagataggtgaggggggtgctgaaatctatgcttcataccaaataggaactttgccaccggggcgacacagttgcggtgtccgagtggttaaggagatggacttgaaatccattgggttctacccgcgcaggttcgaatcctgtccgcagcgcagaactttttttattttttatttattgtgaatttgcagagggtactaatagctgaccttaatatttctttgacatttcattgttaagcattatactttctgtgatgaagatgaaaacaaactagtgtataccagccttgcccaaccattttccgcaatacccctcagaaaaaccacgtttgtacaaagattgactttaaagatcttcatctt

SEQ ID NO: 26774 - DNA, 1691 bp, DROSOPHILA
gtctgtgtccaaagcgcttgtgtgaaagtattctgattcgcccgcccgcccgtgaaagtgttttctgcaattttccgcatccgcattcgcatcacaatggctgcgcacttttttcgcactgcattttacgcaacggcggccagaaaatcgatgagtctgcccttcgccggccggacagccgcaactctagccgtgggcctatcattcggtggtaaatccctgtcctcccgcatctcaccgacttatttataacttttgcattgcccaccatccccaccgccatcgccactcccaatataccaacgcacgcgagtagcgcaaaatagccgggcagccgtgccgtacgagaatgcctacgcggacagcttcttcgggggctgccagacgcagggactgctccagcggattccccagaccggatacatccagcccccgctgatgcggaacttctcgagcctgcagacgggccaccagcagcagcagcagccggctccaaatagtgccatggcgccgtcgaacaatcgccggtacttatcctcgcaggatattaccaagaacatgaccctgtacaccagcaccaagacccaagttgaggtggatcccaagacgctggccttcaagaagcccactggcaacccactggttctcatgatggcctggctgatggccaagcagaagcatctgaagaagtatgcccagatctacactgagatgggattcgatgtggtggtggtgcacattacgccgtggcagctactctggccggtcaaaggatcccaggtggtggccgccgagactattcgattcctggagaacaacaagtcgtacgaacccattgtgatgcatggcttctccgtgggcgcctaccagctgggcgagatcatgctgcagatgtcgcgcgacatggatcgctatggtagcattctggaccgcttcgtgtgccaggtgtgggacagcgccgccgacatcaccgagatcccggtgggcgtgcccaagtcgatcttcccgaggaacgagcgaatgcagagcgccctgcgcaactatacgctgtaccacctgaagacattccacaaccaggccaccatccactacatgcgctccagccagatgttccactccacgctgctcaaggccccggcgctgttcttcgtgtccgacaacgatcccatcggtccgccgtcctccaaccagtccgttcgcgaggactgggagcgtgcgaacatcaaggttaccttcaagtgctgggagcggtcccagcacgccgcccactatatacggcatcgcgaggagtacctgcagacgctgttccagcatctggagacctgcggtgtcttggaggccatcggcgtgccgaagcgcgccaagttgtaggtgtctctaacgaggagcggctgatcagttcagtgatatacatttattcaagaatcaatgcgattatgattttaccctagttgctaagacctaaagattaacgagcaatgtaaaaccaatgtcctctttgaatgattatgatctgtgtgtctctcgcgaggcagaatcttcaaaagcccgcacgggaaattcctaggctaagcttaaagtcgtatttcatcaaccgagagaagaatgcactacgcctctatattgttacatatattttgagatcgctgcaaaacagctaaataaagtaatttaaatgatacgaacacatt

SEQ ID NO: 26775 - protein, 310 aa, DROSOPHILA
MRNFSSLQTGHQQQQQPAPNSAMAPSNNRRYLSSQDITKNMTLYTSTKTQVEVDPKTLAFKKPTGNPLVLMMAWLMAKQKHLKKYAQIYTEMGFDVVVVHITPWQLLWPVKGSQVVAAETIRFLENNKSYEPIVMHGFSVGAYQLGEIMLQMSRDMDRYGSILDRFVCQVWDSAADITEIPVGVPKSIFPRNERMQSALRNYTLYHLKTFHNQATIHYMRSSQMFHSTLLKAPALFFVSDNDPIGPPSSNQSVREDWERANIKVTFKCWERSQHAAHYIRHREEYLQTLFQHLETCGVLEAIGVPKRAKL

SEQ ID NO: 26776 - DNA, 5195 bp, DROSOPHILA
gtgttttatttttataaaagataattgacaaagccacctgaaaagtgttttctttagtttattgtggctagtaaaagcgattgtgtgctcaaaattcgcaaaaaaacaccggattgcaaccctgcgtatggttctttttcgccaagagaaagaaaaaagagtgctgtctctttctctccctcaccgctgctccaattttttttttcaagagagtgttttcacttttgacttgcgaagtggtaaaaaaaacatttaaaaataaaaaaaaaagaaatgaaaaaagtatatttaaggtcagattcgaaaaatcaactgcacaaattatcagcggcttaaaaaataggtaaaacaaaaaacctgctgcgtcaagagaacaacaacaaaagtaagagagcaatgaaacggtggtaacaaaacgaagaagaagaccagaagagtgtgggagggagaaggggcaaaatatggcaaacgtccacgtaaacttttaacttttgcttttccgctcattgtgagctctataatataccctaaattctattttgttcagtattcgattgcgtattttccatcactcttcacggtttccaagtgtcattaaggaaaatccaagaaaacgggtaattttccatcaaaactggtttggttcattgaactgccccacaaaatccagcaaccaccccctgcaatctccccggaaaactccttataacacctagaaaccttttaaatatcttgggcgaagaaacgaacactttaatattaagttttttcgttaccataccatacctttaaacccttttttcggttgaatatctcttttggaaaataagcctgttcaaattgcgggtaaagatatctctagggacctgaaaacaccttaaaaagatatttaaattgacgatttaccaggatattaacgtgatttctgtagaaataagtaggcattcatttttgagttaaaaagttgacatccttttgtttttctttgttcagatccaaaatgttgcacaataatgcgccctggctgccaccgcatcagcagcagcagcaacaggcgccgcagcaacatcctactccacagcagcaacatgcaatgccccaacagcagcaaactcttcctgcccagcagcagcagcagcaagtctatgccagccaaatgttccagcaacatcagccaaattattggccagaggatcagcatcaacagcagcagcagccacaatccctgaactacaataactactttccgggacagcagcagcaacatcctatgcagcagcagcaactgccaccgcagcagcaactgccaccacagcagcaacagcctacgcagcagcaacatacaatccagcagcaactgtattatcccactcagcagcagccacaagtcccggctccagcggaaccagctctggactcgtttgacaacaataatagcggaggaggtggtggtggcggccggagcgatggctggggtgattggggcgattggaacgacaatagcaacaacaataatagcaacggcaccgatggcttgttagagccaaccggacaactgctggaggattccttcaatgttcaatcctcgcaaggcagttggcaggcgtttgccactagcaataatgtcaataacaatggagagttgccgccaccagccaatccgcagtcaacgtccttgcaacaacagccattgaatcagcaatcgatacctttgctgcaccagcagccacaatcgccgccggaactggggcaggaacccgaactggatgccattgtgcctccccaggctttccaaaaccaaccaccaactgcagcaccaccaccaacatcactgacttccttctctgcacaaatgactgctgtgggatcgccaatctatgctgttggagcatcttcagcacatagcgcaggagtaggagcttcaccagcacctcccactggagtagtagctccgccagcacatctcgccggtataggagctccaccagcacatcttgcaggagtaggagcttcgccagcaccttccgctttagtaggagcttctccagcacccatcattggagtaggagcaccaccagtgggagcaccaccagtaggagcaccgccagcggacgctacaactattgcaccaccggccgcactgccacctagcatagttccatcgtctggttccaatcccttcaagcgttccacgggcctaaataagcgagtgaacataatggcagatcctgcagcaggagctccatcgcctccagctcctgctgctgcaattgctcctgtggcaccagtagcaccaattccgccaccagcagatcagctctttggtatgccagcagaagctcatggagagggtttcaacttaattgcggcgccacctgttgaggcttcacttggaactccactaagtgcacctattcctgcacccattcctgtacctaacgcatcgctctatgcatcaccggctgttccacaggcttttgcgcatttggaaccggacaatcaggaggttttgtccgcgccaaatgacgaacgggcccagtacttgcagaccagccacctgtccgagcagctgggcgaaggtgaagcggatcaggatgcgggcctgctgccaccaccaggactgtctcgtctggttttgggccaaccggagttggattcgcagcagcaacgccaggtcactggagccacagagcagccaccacttaatgtggcccaggcagctgctctgcatatgcaagaacgtcgcgcagatggcgaggacacctctgacggcgagcagcaagtgcgtaatatacagacgccacctcgtcgcgtcgtaaccggcgtggagaccaatgccccgtcgttgcgagaacagcgggaagtggtgctggatggcgagaatctggaggatcgcgaagctataccgccaccaacgttggctgaactgccaacaacttcagtacatcacaatattctacccgacgaggcggagcagctgcatcacaacaatccgccccaggcgatgaccccgctaaatgcacagcaaccacatcagcagcagtccacgctgcagcagcaacaccagcaacattcaaccactcagcaggagaagaagcgtgcagcagtaggacgccggaccaccgcgtcgctggatctagagtccgatgagtccgatgaattcctgcagagcgaaagggaacgggatcgggagcgtgagcgcagggatctaatggaggagaggcacagtcgtggacgcagccatagtcactatccctacgaaggcgaaacggaggactctgtgcgtggtgctgcccatcacgagacgaaatccttgagagaaacacatcacaaacgtaaccacgattcagcacgctctcgtcgccatcaggatcctaaagtggaacgtgaaagggagcgggatagggagcgtgaccgcacatggcgtcgacgatccaacaagtatcacagcggtggcgaggatccggatcgttcgtacgatcattcgcgtcgctataacaacagcaactacgagggcgagtcggataatccggagtataatcacatgggcgacgcagaacttgatggcagcggtggacggagcagtaaaaccagtcgccatcgacgcagtgccgccgaggaggatttcgatgattacgaacgggaacgtaatcgatcccggcgctcaaccaaaccacaatcgtcggctgaaaagtcacgctcctcgggcggacgacggaattacgagaattcgggtcgaagtgcccgtgcggatgatggacgcagacgttatcaggatcagcgcaatcctggtgctcagtatcccgtgtcagccaccggctatgttccctacggaatgtacgagcaaatgtcgcggaatccacaagtctacgctgatatgtatgcaaagttctatggccaaatgatcaactcgatgaacgcagctgtttcggcggctgcttcgaaaggtggagttcccgctggagcaggagtcatacccggattgatgcccagcgcggtgcccgtcagtgccgcccagttggtggccgccaccagcggaggaagtgtcagcggtagcagtgaagccgccatgctcagggagcgagaaaggttagtttccaagtacatgtcatgttttttttttatgtctttattatttatgaagtttgcttggtcatctagaaataccccagagtcttgcagagattttagataagggtttgaggaaatttttatatttggattcacaatttctatttattgtatgttgcatcaaatatgagattagcaaattattagttttgtagtaaatgattggaaaaaaaaggcaattttttgcttgatatttttatactattcgttcactggagcgtaataaatatctttcgcttagtgtaaaaaaagattatataaattagatggcatgttgttatttgactattcaaattaaatttatttcgtgtaatgaaattaagtaggacagtgtaatctctgcaagtttcgggctctagaatttcggctgatccaaagtgttcctttgccaacgttcctttagttttgtttaacccctgtcacctgataacttaacccttagtctgaacccgtttacctgctcctaactttttgaactcgaagtagttgttggtttttctctggctttcttacattaccttgatgtttgtcaactaaaaacggatgattaacattgattgtttagcgtttgaatgggtatattaaccctaacccctcccattgcccatctacaccaccactccgtcccttaaatgttgaggttggacttgggctttaatcttatcaactgaactaaaacttgctaattttgtttgtagtaagtgattagaacctaggtgtctcgctctcgctcgctctcttgcagctttctcttttccccttgcgttgtaccccaaatacatgttacatattccaattggattctaccatcccgccatataccatgctccacttccactttgttccccgtgtgccgttcgctgtgtacgtgttttactaattaaaacaacacacacacacacaataagatccaaacaaatgcaaaaaccaaactaatgcaaattcgtaaataaccgcaaaactgttttcgtctctaaccaacaaaaacaaacaacaatcgcaatcgcaacaacaacaaattgcacacaaacaacaacatacatatgtgctatctgcccaacttc

SEQ ID NO: 26777 - DNA, 3195 bp, DROSOPHILA
atgttgcacaataatgcgccctggctgccaccgcatcagcagcagcagcaacaggcgccgcagcaacatcctactccacagcagcaacatgcaatgccccaacagcagcaaactcttcctgcccagcagcagcagcagcaagtctatgccagccaaatgttccagcaacatcagccaaattattggccagaggatcagcatcaacagcagcagcagccacaatccctgaactacaataactactttccgggacagcagcagcaacatcctatgcagcagcagcaactgccaccgcagcagcaactgccaccacagcagcaacagcctacgcagcagcaacatacaatccagcagcaactgtattatcccactcagcagcagccacaagtcccggctccagcggaaccagctctggactcgtttgacaacaataatagcggaggaggtggtggtggcggccggagcgatggctggggtgattggggcgattggaacgacaatagcaacaacaataatagcaacggcaccgatggcttgttagagccaaccggacaactgctggaggattccttcaatgttcaatcctcgcaaggcagttggcaggcgtttgccactagcaataatgtcaataacaatggagagttgccgccaccagccaatccgcagtcaacgtccttgcaacaacagccattgaatcagcaatcgatacctttgctgcaccagcagccacaatcgccgccggaactggggcaggaacccgaactggatgccattgtgcctccccaggctttccaaaaccaaccaccaactgcagcaccaccaccaacatcactgacttccttctctgcacaaatgactgctgtgggatcgccaatctatgctgttggagcatcttcagcacatagcgcaggagtaggagcttcaccagcacctcccactggagtagtagctccgccagcacatctcgccggtataggagctccaccagcacatcttgcaggagtaggagcttcgccagcaccttccgctttagtaggagcttctccagcacccatcattggagtaggagcaccaccagtgggagcaccaccagtaggagcaccgccagcggacgctacaactattgcaccaccggccgcactgccacctagcatagttccatcgtctggttccaatcccttcaagcgttccacgggcctaaataagcgagtgaacataatggcagatcctgcagcaggagctccatcgcctccagctcctgctgctgcaattgctcctgtggcaccagtagcaccaattccgccaccagcagatcagctctttggtatgccagcagaagctcatggagagggtttcaacttaattgcggcgccacctgttgaggcttcacttggaactccactaagtgcacctattcctgcacccattcctgtacctaacgcatcgctctatgcatcaccggctgttccacaggcttttgcgcatttggaaccggacaatcaggaggttttgtccgcgccaaatgacgaacgggcccagtacttgcagaccagccacctgtccgagcagctgggcgaaggtgaagcggatcaggatgcgggcctgctgccaccaccaggactgtctcgtctggttttgggccaaccggagttggattcgcagcagcaacgccaggtcactggagccacagagcagccaccacttaatgtggcccaggcagctgctctgcatatgcaagaacgtcgcgcagatggcgaggacacctctgacggcgagcagcaagtgcgtaatatacagacgccacctcgtcgcgtcgtaaccggcgtggagaccaatgccccgtcgttgcgagaacagcgggaagtggtgctggatggcgagaatctggaggatcgcgaagctataccgccaccaacgttggctgaactgccaacaacttcagtacatcacaatattctacccgacgaggcggagcagctgcatcacaacaatccgccccaggcgatgaccccgctaaatgcacagcaaccacatcagcagcagtccacgctgcagcagcaacaccagcaacattcaaccactcagcaggagaagaagcgtgcagcagtaggacgccggaccaccgcgtcgctggatctagagtccgatgagtccgatgaattcctgcagagcgaaagggaacgggatcgggagcgtgagcgcagggatctaatggaggagaggcacagtcgtggacgcagccatagtcactatccctacgaaggcgaaacggaggactctgtgcgtggtgctgcccatcacgagacgaaatccttgagagaaacacatcacaaacgtaaccacgattcagcacgctctcgtcgccatcaggatcctaaagtggaacgtgaaagggagcgggatagggagcgtgaccgcacatggcgtcgacgatccaacaagtatcacagcggtggcgaggatccggatcgttcgtacgatcattcgcgtcgctataacaacagcaactacgagggcgagtcggataatccggagtataatcacatgggcgacgcagaacttgatggcagcggtggacggagcagtaaaaccagtcgccatcgacgcagtgccgccgaggaggatttcgatgattacgaacgggaacgtaatcgatcccggcgctcaaccaaaccacaatcgtcggctgaaaagtcacgctcctcgggcggacgacggaattacgagaattcgggtcgaagtgcccgtgcggatgatggacgcagacgttatcaggatcagcgcaatcctggtgctcagtatcccgtgtcagccaccggctatgttccctacggaatgtacgagcaaatgtcgcggaatccacaagtctacgctgatatgtatgcaaagttctatggccaaatgatcaactcgatgaacgcagctgtttcggcggctgcttcgaaaggtggagttcccgctggagcaggagtcatacccggattgatgcccagcgcggtgcccgtcagtgccgcccagttggtggccgccaccagcggaggaagtgtcagcggtagcagtgaagccgccatgctcagggagcgagaaaggttagtttccaagtacatgtcatgttttttttttatgtctttattatttatgaagtttgcttggtcatctagaaataccccagagtcttgcagagattttagataa

SEQ ID NO: 26778 - protein, 1064 aa, DROSOPHILA
MLHNNAPWLPPHQQQQQQAPQQHPTPQQQHAMPQQQQTLPAQQQQQQVYASQMFQQHQPNYWPEDQHQQQQQPQSLNYNNYFPGQQQQHPMQQQQLPPQQQLPPQQQQPTQQQHTIQQQLYYPTQQQPQVPAPAEPALDSFDNNNSGGGGGGGRSDGWGDWGDWNDNSNNNNSNGTDGLLEPTGQLLEDSFNVQSSQGSWQAFATSNNVNNNGELPPPANPQSTSLQQQPLNQQSIPLLHQQPQSPPELGQEPELDAIVPPQAFQNQPPTAAPPPTSLTSFSAQMTAVGSPIYAVGASSAHSAGVGASPAPPTGVVAPPAHLAGIGAPPAHLAGVGASPAPSALVGASPAPIIGVGAPPVGAPPVGAPPADATTIAPPAALPPSIVPSSGSNPFKRSTGLNKRVNIMADPAAGAPSPPAPAAAIAPVAPVAPIPPPADQLFGMPAEAHGEGFNLIAAPPVEASLGTPLSAPIPAPIPVPNASLYASPAVPQAFAHLEPDNQEVLSAPNDERAQYLQTSHLSEQLGEGEADQDAGLLPPPGLSRLVLGQPELDSQQQRQVTGATEQPPLNVAQAAALHMQERRADGEDTSDGEQQVRNIQTPPRRVVTGVETNAPSLREQREVVLDGENLEDREAIPPPTLAELPTTSVHHNILPDEAEQLHHNNPPQAMTPLNAQQPHQQQSTLQQQHQQHSTTQQEKKRAAVGRRTTASLDLESDESDEFLQSERERDRERERRDLMEERHSRGRSHSHYPYEGETEDSVRGAAHHETKSLRETHHKRNHDSARSRRHQDPKVERERERDRERDRTWRRRSNKYHSGGEDPDRSYDHSRRYNNSNYEGESDNPEYNHMGDAELDGSGGRSSKTSRHRRSAAEEDFDDYERERNRSRRSTKPQSSAEKSRSSGGRRNYENSGRSARADDGRRRYQDQRNPGAQYPVSATGYVPYGMYEQMSRNPQVYADMYAKFYGQMINSMNAAVSAAASKGGVPAGAGVIPGLMPSAVPVSAAQLVAATSGGSVSGSSEAAMLRERERLVSKYMSCFFFMSLLFMKFAWSSRNTPESCRDFR

SEQ ID NO: 26779 - DNA, 2475 bp, DROSOPHILA
gaaattgtttaattttgatatttattgcctaagccacaggaagatatctaaaacaccataaatactctgagctccgttttggatttttgtttacacgtgaaagttttatacgaattatgccacaaatgaaagaaaataaatctttttgtactataactaatttatgtaattgacaatttataaataaaaatgttaaaattatataatttgttataatataataatttatttaaatattattttagatgtgcttttagtttaagataaaaataatactttttcgggggagtaggtaatatttttaaattacgaacatataacaaatacttttttattttattacgaaaaataaaaatgttgaaatgcttaaaaattatacaaataattagaaataggaaaatttattacgagtaccgttaagtggtttaagtcaggatagctgttagtccaagacgcgaacccacatatatttatgcccaaacattttggatatagttcagctctggtcccatttaatcctggcagcgaaacaaaacccgacaaattgatacaaatttacggttaatcgttaataatttcgggtaaaaaatcaaaacagtttgtaacaacgaattttacgtaactgcaaaggctgcatcacacctgcatttagtacagccaaccaaatttaatcgggttaattaggtaagcagcggtggattcgcaaaaagggcgcagaacgtggtcgcaatccacattttcacttgtgggcgtgctttgttgttgttcgagtacagtgtcgtgtcagattttccaaaacataaataattggtatcttaactatagtatactgaccggaaactgtgctttccgtttggtaatcccaagagtcacctattcagctgtgtgggagaaagtgaaagtgactgcgcttccgccacctttgttgcgaatcccgtgaagcacatagacggtactactacatatgctaactcatccatttccacttaaacagcaagaaatggcacgtggacaccagaagatccagtcgcaggcgaaggcctccgagaagcaggccaaactaaagaagcaacaaggacacagtgccaacgaccagaagaaggcggcccagaaggcacttgtctatgtgtgcgccgtttgcaaggtaagccagctacagtgaaacctccctaagtcagcaactgcagtgggttaatcaaatggttttgagacagctcgaagaatcacgcaagaactcgcttactttaacgtcgaggttttaaaacgcaaatactaaagaaaatttatcgcaaaacattcgacatctcaggagctttaaactaaagaattcgattcagatgaatgttatagtaatgccttattttatatttattactcgtactttgtggtttatttgaaacctaatcgaatctcgtctccatttcagtcgcaaatgcccgatccgaagacttacaagcagcatttcgagaacaagcatcccaagaatgacatgcccgatgagctgaaggaggtctgatgaccgatgtggctgcgtgcatatataaatatatcaagctgatcgaaatcgacgaatttcctaccagtacgaaacttttgaaacaataactttacaacagccccgacaaaacaaacatcaacatttaagtcgatgagaggagggcgcgtaaagttagaacatagtttccaaagctaagggcccagctgaattttttatatacacactgctgacttttggtttatactttgaaaataacacatatggctaccacaacaatacaaagaaaatttacacatagtaaaataaatacttttgttttgatttttattttccctgaaaggcaactagcaatttgagtaacaataattacttgtgctttgtctttgatttggtctattatgaacaacgatgctgacaatgtcgtagttttgtatacgatttttttactaaaaaacctttgaatacatcatgtaaatgagaatttataaatacaataaaaacagtataattgttaaaactaaagagaaaagttattgctgcagaagcattgtctaatcttatggttagtgtataaatgcaaagcattcctgtctttgatggtttcaatgctacttaacatttggcaacatcccacttaaaatttaggctttctatgtacattgttttaacaagcacatttcgttctatagttaaaaagtatacattaacgatttccctgcactttcagtttcatgaaagttttttcagttctttggttggacattcagctacaataggttgactcccggaactgctgtcctctttcgttgtcggagtctcagcggagtattcttcatgcgcgagttgcataaaaaccaaatcttcttttgccggaaaatcagcgagtactgtaatgccaatgttgttatccggcagcgcaggcgtttcctcgtggtacccaaaccaatagattatcattccaggaccaaaactgacac

SEQ ID NO: 26780 - DNA, 234 bp, DROSOPHILA
atggcacgtggacaccagaagatccagtcgcaggcgaaggcctccgagaagcaggccaaactaaagaagcaacaaggacacagtgccaacgaccagaagaaggcggcccagaaggcacttgtctatgtgtgcgccgtttgcaagtcgcaaatgcccgatccgaagacttacaagcagcatttcgagaacaagcatcccaagaatgacatgcccgatgagctgaaggaggtctga

SEQ ID NO: 26781 - protein, 77 aa, DROSOPHILA
MARGHQKIQSQAKASEKQAKLKKQQGHSANDQKKAAQKALVYVCAVCKSQMPDPKTYKQHFENKHPKNDMPDELKEV

SEQ ID NO: 26782 - DNA, 2222 bp, DROSOPHILA
gtgcacttaagcccacttggagcgagattttgaccactgttcgagggtgacgctattatcgctgttctctattctttcgctagctcgctcgctcgctttttctgtttccccctttcttagccgctgcttcttcttgccgctgggactctggccgatgacagccagtgatatcgataggctccgcattctatgagtgatcgtatttgaaattgaatagcgaacaagttcgggattcgcaattaaataacacccgcaaatctggcaaatcgcctgtacgattgcataatagaaatatgctccatgtgcatgcgatctatttgtaacgtatttctctatttctcgcgttacgtgccatgtactcaagttagccggggagtcgggcgggggcttaataaataaatccaggggctgagcgaccatgcaacatatctttgtgagtattaaacacacgctgcactcctgctatttacgttgactgagtttgggtcttcggtgtggggctccggctcctagctattgagtgcagttttccgtgccttccgtctgcgtgagctgctgaaaaaaggcatagctttagaagaagttcacacacagccgaaacaaaacggaaaaacaaagaaaataaacaatggtaaaaacccatcaatggggacggagctctcatgccctgcaaattgggggaaaaccgaagtcaggggttacattaattcggtgaattgggcaaccaataaaggtggctttagaagatccgagctttttatctgataggtaattgcaaagtctaggtctaatgtaacgcaaaaattagtagctaatacaggtgcaaactccatactttcgttgtgggcttttatatacataatatacacgcgtgatttcttcttatttttaacagtgcaaattccacaatttggggctagcctccgtctcggtagagagtagtcctcctctggctgaaaaccacccacaatccatgacacgatgatcgctgccatccgaaatgaatggaaattgcaggtttttcactgagcagccaactccgctgtttcgcggcgcgtgcgcagaagctccaccaagtgtggctccaccaaagcagagcgaggcccatggctctgcccatatcgttggtggtggactgcgtcacggaagcgcagaagccgccaactggcgtcggggtattcgtattccaccgcattccgtgtgcctgcgcctgtataaataaaatggtcgcagtggggcagcaatcaaagcagccgcttcgtcggagccttcaacacctcagcacctgggtctcaagccaagcgatatggataaccgcagtttggtgagtggcgaccgggtattgcaactacacaaggattacacccgatatccgtgctccctctattcgcagctcctgaggctctcaattgtggtggcgctggtgttgcttctcgtctgcgtgccggaaacggatgcggggtatggattatcatggggactactgggccagatagaggatacatcgcggcacaggccccttaacttaaagcgtcattcagattaacgaacattttacaacttcaaatcatagaaagccaatcactctcgctaaataatttcaaacgaacttagctaaaatatttaacttaagctatattaataatcttccaaacgaaaagtgtatggaatcaaataatttattaggttaaaaatgtatttgctatccttttcaggggccaccagaaaaaaaagaaaatcgtgatccacgtgcccattcacaagaaaatcgaaacgcacatacacaccgtggtgaaacacgtgcaccaccaccacaagccactcgtcctaaaggaggagaagaaggtgatccacgaggaccaccgacccatccagattcaccagaccaaggaacacattcaccaccacgagaagcacgatcaccatgatcaccacgaccaccacgaccatcatgaccaccacgagcaccaccacccacttccgcctccggtggcgcctccagcgctgccggaactcgaagaggaggaggagcacatccaccaccaccacaactatgagcacaggggcggactgcgagacgacttcattggcggtgacgggagcagcagtgaggagcgctgactatgcagcgcccatgtgggggcgcagactgaccggatgcggcagacgtggaccgatcgatcggatcatcccggattcttgtgattccctagatacgtacg

SEQ ID NO: 26783 - DNA, 222 bp, DROSOPHILA
atgaatggaaattgcaggtttttcactgagcagccaactccgctgtttcgcggcgcgtgcgcagaagctccaccaagtgtggctccaccaaagcagagcgaggcccatggctctgcccatatcgttggtggtggactgcgtcacggaagcgcagaagccgccaactggcgtcggggtattcgtattccaccgcattccgtgtgcctgcgcctgtataaataa

SEQ ID NO: 26784 - protein, 73 aa, DROSOPHILA
MNGNCRFFTEQPTPLFRGACAEAPPSVAPPKQSEAHGSAHIVGGGLRHGSAEAANWRRGIRIPPHSVCLRLYK

SEQ ID NO: 26785 - DNA, 2162 bp, DROSOPHILA
acttaaatttcatgacgaaagtttcggagcaatcggacggacagggtcagatcgactcggctattgatcctgatcaaaaaatatatacttcaaatggtcggaaaaggccttcggcattttacatactttatagggtatactagcctttcaaatgtgtagccattgcagttttggtcagcatgcgggtgtgtaggggtcacaagagtctacatgtccaatggtaatgcccatgtaatatacatgattttcaaattcacattacaaacaagaaatgcttgtttgggctttgctgatgggtatcgtgttaatatcagttggaatcataggcatatccgttaaaaaacctcccttttgaatttcgcatttggatttggttcagatcagcactgtcaacctcatgcccatatacaatggttcacagctcagtttaaccaaagacaatagtatattctattcgcaacagcttttaaaatttaaaaagaaatatcttctgaacatatctgtaagtctcacactagctcacacttctttgctggcaaatttataaaaatttgaatcagaatgtatttccgaatattaaatttaaccatggatatgcgctttttatttaaaattgtttgtctggcacagctactagccccctgatattatgctgaagaatgtttcagaaaaccactagagtatactcgcccagcgccctaatacagacggttactcatcatacttaattcttttaggcatgccgtcgaattcaattattgtcaggacagcatcaaagttagtttaatcaatcaagtcaatcacaagtcaaagtcaatttctgttatctcaacacctctaaacacttgacagccgcggtaacggaatattaaacaggcgagaaagatggccacaaacgcaatcgtataaaaaggaagcgccaacttagatgttcaccagtctgccaagggcacagtaaagcatgggacctagaagctgtacgcacttcgccacgctgtttatgccactctgggcattagccttctgcttcctggtggtgctgccgatcccagcgcagacgactagtctacagaacgctaaggatgatcggcgactacaggaattggagtcaaaaattggtggggaaatcgatcagcccattgcgaatttagttggaccatcattctctctattcggggacaggcgtaatcagaaaacaatgagcttcggtcgcagagtgccactaatttcacgcccaataataccaattgagctggatctcctcatggataatgatgacgaaagaacgaaagctaagcggtttgatgattacggccatatgaggtttggtaaaaggggaggtgatgatcagttcgatgactacggtcacatgcgtttcggccgataaacacttgccatcagtttagtcatttagaaaaccgattatgtatattgtacatagaaattaatcgagcacacattttatattaacaagtatataaaaagtaataaatgttcgcattcaaaaatttaatatttcgtattatagccgaattcttagagtaagctatgatggattcattgaaaaaaggatttttagtcccttgcatataggtgtattgattcctagcagaatttatcaccgcggtaaaaagcctccatttatccggtatataaaaaaagggctgcaccttcaatatataaaaagttttatttaattatttgtgacgaaagcatttgaaaggttctccgactttcgaattgtgaataccttttaaagacgcatcggatttacttaacaagaattattgtcgttgatgtatgtttcccttaggcccatttatatacagctgtgttcagaaaaatagcagtgctttggacttgagagtttaagataaaaatttcctatgatttacagttttaatgggaaatttttttttataatatcattaggtatttaatttcaacacaatttaacaaatgtttcacttttatttcttcaatagtttcgaaaatatagaataaaacaacataataggcagaaattctggtgttcaatgaaatagcagtgctatgaaaaaatagtaacaaaattaaacttgacttagaaacgaacttagtttttctttttaatatgttaattcgggcctaatacttggctggaaagcctttgttagccagca

SEQ ID NO: 26786 - DNA, 387 bp, DROSOPHILA
atgccactctgggcattagccttctgcttcctggtggtgctgccgatcccagcgcagacgactagtctacagaacgctaaggatgatcggcgactacaggaattggagtcaaaaattggtggggaaatcgatcagcccattgcgaatttagttggaccatcattctctctattcggggacaggcgtaatcagaaaacaatgagcttcggtcgcagagtgccactaatttcacgcccaataataccaattgagctggatctcctcatggataatgatgacgaaagaacgaaagctaagcggtttgatgattacggccatatgaggtttggtaaaaggggaggtgatgatcagttcgatgactacggtcacatgcgtttcggccgataa

SEQ ID NO: 26787 - protein, 128 aa, DROSOPHILA
MPLWALAFCFLVVLPIPAQTTSLQNAKDDRRLQELESKIGGEIDQPIANLVGPSFSLFGDRRNQKTMSFGRRVPLISRPIIPIELDLLMDNDDERTKAKRFDDYGHMRFGKRGGDDQFDDYGHMRFGR

SEQ ID NO: 26788 - DNA, 2420 bp, DROSOPHILA
tcactttcatttccacacaatcaaaatacgtcgagtacccgggcatcggacatcgggcatccgagcatcggggatcggggatcggcgatcggagaagggggactgggaaaagtgaggcgcaaaaatttcaatttcattttatttatgagcgtctaggcgacacttttgaatgcaaatgacgttaaattgttggtcaagtgagagcggactctcgctgcctattcccccttttccctgcccctcatctacttcgcccccccccctcgatacgaggctcacagacagcaggtggaaaaccttagaggtgcagcagggaactgcgtgacgaaaccaaagcagttaagagggacttacccttcagccaataacttttcttcgaaattgcaaaaggggttgcgaagtaaaagcacagaagctagacagacttcctaaccaaacaaaatagtttatgaatataacaatagatgtattaaatgtacaaagtattcgaggcgacagtgtagcaaatagttttcacaccattttactgggttgcacaaaaagcgattcaatttaacgaaacaaccgaaccgaattcgtgtaaaggtccactctttggcaggtttaagtggatcgacccagagacccactaacgcccccaaaagcccagagaatcccttggcactcaccgtgttgatcttatccatgaggacactcatttgattcatgctcgacataatgatactgctctgtagcactggaattcgaattcaaaaactataactatagcgttgcaagtctcttctgccgcggactgggatgcagcaccaattcgcacatcacgcactgctcattgccaattcacttgatgcaaaaaaaaattaatccgaagaaaaaaaaaattttaaattgacatacaaagtgtattcaaacagtgttcgttcgctttgcgaaaagcacacgcgcgcgcgtatttccaatttccgatttaatcagttcgacttctatatagcctatagccttaggttttgctttccatagccggtctctgtctgccggatgacttgacccgctcgcgtgcgttcttatcgacggctggcagcgcattgaacgctcgccgctcaagacgtgcccacggcagcggcgacttggccaaaagcaacacgacgagcacgagcacgtcgccgcggcaagccgaagaagttggccaagacagagtggcagcgacaggtgccagcagagagcccgagagccggagcgggctccaacgcgaacgcgaaaccggtcgacggcagaaagcgggctctgagcctattctgtgcctaatgccgcagaccccactgtgtcccagtctcagtcgcactcccgcccgcacaccgctcgccttggctcgcggattggggccgccttggtggatagtgggtggtggaaggtgctgcatttccatgtgcgtgcggggtgcattcctggggtatttatgaaatcacaagggctgagacacttgaagagatatcgaggtaattatgggtgtgaaacgaagagcttactgctacgagcatttagaagaccaagcggagcctaaggtccacgatactggaataccacctgcgattcattcccaaatgcaatccaaccagtgatagtttaacttcgaaaggagacaactagccgaccaatgtaaaggagttggaagcatgaaaccaagccaagaaacaattggacagccgaactgtctatcgaacaacttaattagctctggcaaatcagccgcacacaacagacaattgttagtccgctcgataagttgttcggcaacatgcacatagccatgttcaccggtaactttggcaattgtgggctcaaagccgccagagtcgaagtcaaagtcaaaaacaatttaaggtcgtcacaagtaaagtttgttattccctctcttttgtttcgattttgcaagtgtcatgcaaaaaataaaatatcatggcaataccgccgtgtaaaaacaccgcctctgcccctctatctccacttcccgattttcagcaacgattctcatcatctcttttttttatgtaacggtccttattagagccaatgttgttgtcttataccgacgatcattggccaaataccgaatgctgacggtcattcaatttggagtcgacggcatgaggtggccatccgttctttagctgttttggctggatattcgcgccttttttttttagctttttgatacccttaacagttgaagaggcaaatgctattattattttaaaaccaatttgatggtgtaaccatcttctaccacgtctaaattttgatcgttgaaaatagaagagcgactattcaatgatgtatcatacttatatttatgggctgtaaagcgcactcattttccgattttctagacctatcgaacatttaccaactgcctcctcggc

SEQ ID NO: 26789 - DNA, 420 bp, DROSOPHILA
atgcagcaccttccaccacccactatccaccaaggcggccccaatccgcgagccaaggcgagcggtgtgcgggcgggagtgcgactgagactgggacacagtggggtctgcggcattaggcacagaataggctcagagcccgctttctgccgtcgaccggtttcgcgttcgcgttggagcccgctccggctctcgggctctctgctggcacctgtcgctgccactctgtcttggccaacttcttcggcttgccgcggcgacgtgctcgtgctcgtcgtgttgcttttggccaagtcgccgctgccgtgggcacgtcttgagcggcgagcgttcaatgcgctgccagccgtcgataagaacgcacgcgagcgggtcaagtcatccggcagacagagaccggctatggaaagcaaaacctaa

SEQ ID NO: 26790 - protein, 139 aa, DROSOPHILA
MQHLPPPTIHQGGPNPRAKASGVRAGVRLRLGHSGVCGIRHRIGSEPAFCRRPVSRSRWSPLRLSGSLLAPVAATLSWPTSSACRGDVLVLVVLLLAKSPLPWARLERRAFNALPAVDKNARERVKSSGRQRPAMESKT

SEQ ID NO: 26791 - DNA, 3144 bp, DROSOPHILA
attgttgtggacgatgtgctgccagtgggcgcggtcaaactggtcatagaacgctccataatcgctagtggaggtcaatgatttgctgtccctgcacagcaggatacccaactcctcgaaggtttctcgtatggcagtcagccgcagagctagggatctgttaggtgcgaaaataatgttacatcaccaatttcctaaaaacctatttgagttgcatacggatccagcgatttcttatctgccttggtgtggaaaatatccggacgtggacccttcacgtggcccacgttccgcagcttagcggcactgaactcgtttctctgaaagtgttccaaccaggcaggcgaactgtccgaggcatcgcaaactccgccaggaaacacggatgactccggcatgaaagtggacttctgcgtgcgtgtaaggaggagggcctagacgaatagattacgtcagaatggtgaagctaagttaacgttaagctgcaactcacattgtaatcacacgacgtggacttttcaacttggttcttagccagaaggattaaacttgaggaggagcgaattttgggcaaaagcctcgacatatttaggtaacacagcgatatcgatagagtgggtggtaatatcgattgctcaccagctgattttgtttacacttttgaaatacccaccacctgttgtagtcagatggtggggtggggtagtttataattaaaagaacttctgaaattaatttaagtaaattattttattaagccaataaaatatttctaggtttatttattaatgtgagtacttatttaaatttcacattctatcactgaagtcaatgaaatataggattttaattcattccctcacctaatgtcagaggtatccgagggtcgagtcttttgactaatgcgttaaagcattaacaacaagctcttattgctttgagaccaaagatcaaaggtttgaaaaagtggatttggaaattaaatggattattgactataatgactactaaaactggaacttatagaccttcggctagccttattgtagccgccaaagaggattctttagaggactacgactacagagtatgttaagtataagattataagctctaaacgtttgctgactgattgtcttttattaaagttattgttgattaaacgaactgaaaaaacttcctatgcattgaaccattgcgtctttcctggcggcgtcttcgatcctatagaagatcaatctgcgaaatggataacttttttcaaatcctttggggtgaccgatgaacaattaaaaatgtgtaggcacaatcaggattctccaaggcctgagtttctatccggtggagaccatatttcaagggacattgcactgcgactgactgcgctcagggaaacctttgaagaggtgggcatcttgatttgcacagaacaggacgacatacaaaaatgggattctaaatcgggtcatcctagaaccgtgcttctcgagtcaagcgaacacttcgaatggcaacatcgggttcacaatgatgcctcacagtttctggaactctttcggcattataaagtcattcccaatatctggtctcttcaggaatggtccatttggaggacagcagccactgccaatcggaaatatgacactgtttattatatcaccatgttagataagtacaccaggaatataaagctgcttctggaaccgcacgaggtggcttcggcccactggttgagtccgatcgaggcttggtcgagctcacagaaagccattatttggctcccgttcatgctgctctatgacatcgctcgtctgatgaacttctatagctttcaggagcttctcaacttctcccgccaaaggagctgcaatggaagcacaatggtgcagcccgtctactatcgctgcgatgactgcatgtttggagttcttcctggtgatgagctctatcccaaagaaccaggcgcttgtacacaaacaattatcttgtcgggatcggtggacgaccttcatcgaaagtccaagcaatacaatcgctatatcgtctacgacttccacaaggtcgtactggcctccaatataccgccctgcgatgggcatctgccactgcagcctcttgtcaataacaagctagccaagttgtagtaaaagaatatagttttaatagaaaatatatatatttcctcttgcgctacaacaagttaccactatccaactcggtctgtatggcgcggcatgcgtggcacaaaccgtccttgttctccaatcgcttcttggccaagccctcgagatcttgtccgcttttgtacaggctcacgccggcctctgaaacagatctggagtactcaatagccagcagagtgtcggatagttcggagtccagtgtagatcgacagtgaacacaagaggactgctctggattggaattgacagctattttgtcgccagttcggaacactgtggatactgtggaggcgaagttttgctgcagattggccacaaaggctgatgtaaggttctgtaagctggcagtctcaccatgctccatcccataacgtgagcctttttgaaaatgtggctttagacgctgtgcatgtatgtaaaattgaatctcctgctcagttaggtccttgagaggtcgcagcagcttaacatctccagacagccgatcgtcgaggagagccacatccaaggcggcactaccgccacgacctagcgctattgcagtcagcagctgggtggctaagtcaacacttatattagattcaaagacgtgagtacattgcagacactgagccacggagcagatgaggttcttgcgctgttgctggaggtaatcctggcgagctgtcagacttcgcagtttttgaagcttgtggataagctcattgtttgcgttgaggaaaggactataatccttgatccgctgcaaggagctgggcaaggcgcccagttcaatcacatagaaatcgaagggtgcgtattgtgttgataatctctgcagagcttccaagtccacaggatcgcgaccttgcacttgctgctcctccacgtagaccacacgtgcgttgcaatggagtcttttaaacgtgttctgtgtttgcgcgaagtgcaacatgtcgagcagaacgagcgactctgcgga

SEQ ID NO: 26792 - DNA, 1083 bp, DROSOPHILA
atgactactaaaactggaacttatagaccttcggctagccttattgtagccgccaaagaggattctttagaggactacgactacagattattgttgattaaacgaactgaaaaaacttcctatgcattgaaccattgcgtctttcctggcggcgtcttcgatcctatagaagatcaatctgcgaaatggataacttttttcaaatcctttggggtgaccgatgaacaattaaaaatgtgtaggcacaatcaggattctccaaggcctgagtttctatccggtggagaccatatttcaagggacattgcactgcgactgactgcgctcagggaaacctttgaagaggtgggcatcttgatttgcacagaacaggacgacatacaaaaatgggattctaaatcgggtcatcctagaaccgtgcttctcgagtcaagcgaacacttcgaatggcaacatcgggttcacaatgatgcctcacagtttctggaactctttcggcattataaagtcattcccaatatctggtctcttcaggaatggtccatttggaggacagcagccactgccaatcggaaatatgacactgtttattatatcaccatgttagataagtacaccaggaatataaagctgcttctggaaccgcacgaggtggcttcggcccactggttgagtccgatcgaggcttggtcgagctcacagaaagccattatttggctcccgttcatgctgctctatgacatcgctcgtctgatgaacttctatagctttcaggagcttctcaacttctcccgccaaaggagctgcaatggaagcacaatggtgcagcccgtctactatcgctgcgatgactgcatgtttggagttcttcctggtgatgagctctatcccaaagaaccaggcgcttgtacacaaacaattatcttgtcgggatcggtggacgaccttcatcgaaagtccaagcaatacaatcgctatatcgtctacgacttccacaaggtcgtactggcctccaatataccgccctgcgatgggcatctgccactgcagcctcttgtcaataacaagctagccaagttgtag

SEQ ID NO: 26793 - protein, 360 aa, DROSOPHILA
MTTKTGTYRPSASLIVAAKEDSLEDYDYRLLLIKRTEKTSYALNHCVFPGGVFDPIEDQSAKWITFFKSFGVTDEQLKMCRHNQDSPRPEFLSGGDHISRDIALRLTALRETFEEVGILICTEQDDIQKWDSKSGHPRTVLLESSEHFEWQHRVHNDASQFLELFRHYKVIPNIWSLQEWSIWRTAATANRKYDTVYYITMLDKYTRNIKLLLEPHEVASAHWLSPIEAWSSSQKAIIWLPFMLLYDIARLMNFYSFQELLNFSRQRSCNGSTMVQPVYYRCDDCMFGVLPGDELYPKEPGACTQTIILSGSVDDLHRKSKQYNRYIVYDFHKVVLASNIPPCDGHLPLQPLVNNKLAKL

SEQ ID NO: 26794 - DNA, 3889 bp, DROSOPHILA
ggctggctgcattccggtgacttgggctacatcgatcccaagggtaatctaattatatccggtcgactcaaggagctgatcatcaccgctggcggggagaatattccacctgtgcacatcgaggagctgatcaaaaaggagcttccctgcgtgagcaatgtgctacttatcggcgatcatcgaaagtatctcaccgtcctgctgtccttgaagacgaaatgcgatgcaaagactggaattccactggatgctctgcgtgaggagacaatcgaatggctgcgggacctggatatccatgagacccgtctctccgaactcctaaacattccagccgatctccagctgcccaatgatactgccgctctggcagctaccttggagatcaccgccaaacctaagctcctggaagccatcgaagagggcatcaagcgagcgaataagtatgccatttcaaatgctcaaaaggtgcaaaagtttgccctcattgctcatgagttttccgtggccaccggagagctgggtcccacgctgaaaatcaggcggaatattgtccacgccaaatatgccaaagtcatcgagcgtctgtacaagtaaatgttatctctcaaatggatttcttaacctaggtttaaattttattttactcgatcgcttacattgtattgattaattacgaaattctcttattatttactgcattacgaactgaatatatttgttattaaaacgttgcatattttatttttaaagtgggctacgatctctgatcgggatcggttctgatcgcctgccactgaactttgctgacgtactgaaataaacaagcgggttatcgataaggagagaaagtcaagccaatcaatttgattagtaaatatattgcactgatattgattgaacattagctaattgcttaataatttaaatgttttttatttgtccaaaagaaaattctatcaagatctatgatcgtttatagggtcagaaatgtaagattttgttaacaaaccacattatgcagcatcttttggcccagtttacgtttctcattgcgatccacgaaccgtcgcaaccaacgaagtcctgaaaaagctatcgcaatggccaccagcatccaaatgatcaccgatcgtgaatcaaagcgatctgttggtatcttcggccaggtgagcggtggaggtgaaggatttgtctcatcataggcaaccttaaagaaaatgctccaaaataatgtagcaactcgtagtggttcggttcttacttacaacacaatcgcaattgtctgattttggttgtggcacgccacttacatccagcaatattatggaacgattagtgcccccttcaatgcagtctattccctctacatttgtggtattttcactcaaattattgattacagtccagggacgagcgaagttaacagagtttggtaatttttgcaccaagttagccaccaaccaattgcagctccagttattatccgccaagtttatatagcgaaaatgaagaagactgctgaggttcaacgatttgaggcgattcgaactgagatccacgtagagagtaaaacgattcaccgatggagaaagcctgtcgaggaaagcggcatcactgattgcatttcccgacaatttaatgtatcttaaatgattttgattgaacatcatctgagaggatatctcttctattttgttattagcaaggataatctcttccaattgagtgttgaaatggaataaattatctggcagtgtggtcagaaggttgaagctaatatctagttgaagaagagcgattagggagtccaggctttcgtcatatattttatccacatagttatgacttatgttgaggcgctgtaataaaattgataatttaactaattaatttttttcgttcttatgaagtggcctagtaggatttggagattagtggtttcattgccttacttatcttttactgctttatcacttaacagacttatcagaatacaaacgctggataagaaaaaaaaaaaaaataattattataaaaacacacctccaaagaatccaatcccgataatgcttccttgttgagcttagttatgttattataactcaagtctaggtcctgcagctcaaagtttttggaaaatacaaatggctccaatttttgtagcagattactcgatagattcaagtgaaccagtcgagccaaacctcgttgactgagaaactgaagactgctcaggagattttggtccagccgtagacttcgaagatgggtattactctcaaacgaatccatttctatgaactcaatgcgattgtgctgcagtgataaactggatagccgatgaagaccccgaaagaaactaccatctatgtgcgccagttggtttccgttcagataaagatgctttaaatgagataatccatcaaaggagtcattctctatttgactaatccgattgtaacgcaagtcgagctgttgcaactggggatattgctcaaagctcttgacactcagtttgcttaacatattgtggcttagatccaaattggttaatgcacccaaaggctcactggaccaggatctcagactgctcagattgttgtgggacagggaaaggtattgtaactttgtcaagccattcagtgaaaaatcatctaaatcactcagtccactgtgctgcagttctaaatgaagcagatgatcaaaccgtacgaaaaatccattttccacatgcggcagcgtgcagttgctcaatgtgagtgacgtcaagagctccgtcttccgtattaaggtcacctcagtattattgcacttgctcaactgcaggcaacttaacctcgggctaaagctaaagatcagcaggagtagactaccaggtagtaggtacatcgcgggaaacaaacctccacagactaactctttggatctggagatctgtaactgaagccctaatcttattgcagcagcctgtatcgccagccgacaacccgtcaagatacgtaatcacttcatcaactagccaccgtttgcaaagccaaaatatttgcccacctttcagtcagacagggaaaaactgttctacagtttcaagaactccccaagtgaataaccagataatcggcattctattgctttaaaatatatgatttctatttttgtagatttagactagatccttttttaaagccgtttaatgttgtttaacactttgagcgaattgtttctatgattttttgattattaaaaaggtttttccgtagctgaataaatgaaagttgatgtttgtattttacgaattattaagtatacgaaatttaaaaaattgcaaatgtttccaattaggcagtcaacaaaaactttaaatgagagcggactttataaaatgaaatttcatgcaaacgcagctgaaacggaaaatggtataaagccttttgttcaaacaaatgtgcatatttcaattaaaatatacatcagcacagttgaaatctcttcactggtgctctgtttttatatttgccggtcgattttggttcggtctatttgcctttcacctgcatatcaacatttactttatcctatttgctgattttgacggcattacgaaattgtatatgagtgcatacatatgtggaattccggtgagaaatagttgtgcagtgctgcagtcctagaaaagaggataaccacagctgaaaagccacagaaagcactgcaatgaacagaaattttcagatattgaacaaaaccagaacctcccccagaataaaacgattatgactacacaaattcgcctgttgccacaatgttgcaatgtttattaatgcaaaatgttgggtctgtgccaaaagtgctgttgtctttgttgccttagtgggcgttcaatttgcaa

SEQ ID NO: 26795 - DNA, 1451 bp, DROSOPHILA
atgtacctactacctggtagtctactcctgctgatctttagctttagcccgaggttaagttgcctgcagttgagcaagtgcaataatactgaggtgaccttaatacggaagacggagctcttgacgtcactcacattgagcaactgcacgctgccgcatgtggaaaatggatttttcgtacggtttgatcatctgcttcatttagaactgcagcacagtggactgagtgatttagatgatttttcactgaatggcttgacaaagttacaatacctttccctgtcccacaacaatctgagcagtctgagatcctggtccagtgagcctttgggtgcattaaccaatttggatctaagccacaatatgttaagcaaactgagtgtcaagagctttgagcaatatccccagttgcaacagctcgacttgcgttacaatcggattagtcaaatagagaatgactcctttgatggattatctcatttaaagcatctttatctgaacggaaaccaactggcgcacatagatggtagtttctttcggggtcttcatcggctatccagtttatcactgcagcacaatcgcattgagttcatagaaatggattcgtttgagagtaatacccatcttcgaagtctacggctggaccaaaatctcctgagcagtcttcagtttctcagtcaacgaggtttggctcgactggttcacttgaatctatcgagtaatctgctacaaaaattggagccatttgtattttccaaaaactttgagctgcaggacctagacttgagttataataacataactaagctcaacaaggaagcattatcgggattggattctttggagcgcctcaacataagtcataactatgtggataaaatatatgacgaaagcctggactccctaatcgctcttcttcaactagatattagcttcaaccttctgaccacactgccagataatttattccatttcaacactcaattggaagagattatccttgctaataacaaaatagaagagatatcctctcagatgatgttcaatcaaaatcatttaagatacattaaattgtcgggaaatgcaatcagtgatgccgctttcctcgacaggctttctccatcggtgaatcgttttactctctacgtggatctcagttcgaatcgcctcaaatcgttgaacctcagcagtcttcttcattttcgctatataaacttggcggataataactggagctgcaattggttgcctatgatgagacaaatccttcacctccaccgctcacctggccgaagataccaacagatcgctttgattcacgatcggtgatcatttggatgctggtggccattgcgatagctttttcaggacttcgttggttgcgacggttcgtggatcgcaatgagaaacgtaaactgggccaaaagatgctgcataatgtggtttgttaa

SEQ ID NO: 26796 - protein, 442 aa, DROSOPHILA
MYLLPGSLLLLIFSFSPRLSCLQLSKCNNTEVTLIRKTELLTSLTLSNCTLPHVENGFFVRFDHLLHLELQHSGLSDLDDFSLNGLTKLQYLSLSHNNLSSLRSWSSEPLGALTNLDLSHNMLSKLSVKSFEQYPQLQQLDLRYNRISQIENDSFDGLSHLKHLYLNGNQLAHIDGSFFRGLHRLSSLSLQHNRIEFIEMDSFESNTHLRSLRLDQNLLSSLQFLSQRGLARLVHLNLSSNLLQKLEPFVFSKNFELQDLDLSYNNITKLNKEALSGLDSLERLNISHNYVDKIYDESLDSLIALLQLDISFNLLTTLPDNLFHFNTQLEEIILANNKIEEISSQMMFNQNHLRYIKLSGNAISDAAFLDRLSPSVNRFTLYVDLSSNRLKSLNLSSLLHFRYINLADNNWSCNWLPMMRQILHLHRSPGRRYQQIALIHDR

SEQ ID NO: 26797 - DNA, 6324 bp, DROSOPHILA
gcttatatgaaaacaagacctgtgttaagcgatctgattgctcaaccaccatgcgcagtggttcgaaactcatagtagacgtaaaggtacgggcgaaaagtgtctgtcatcccgatgatatggtaggttccggggaaatagtctttaaattaattctctatattatgttatattactccaatgaacgggtcgattcctttaagatacaagcaacgcggcattggcaatattggtggcatttttatagatctaatagccgaatacccttggttggtggccattctcgatatcgttcacagatttctatgcaatggtgtttttattggctacaaagttgttctcacaacagccacttgtttatcaccggatcaaccacttgtcataagggctggttattgggatctgacaactgatcgcgagttcgtgcctcacgtggaccgcgatgtccaatgtcgtattgttaatcagaaatttaattggaattcaataaaacacaaacttgcgcttctggtcctggccgagcagtttccacgggtccagcatatggatctggattacgataacttctttgtcaccggttggaattatagagtgactaaaagattatacccgtctcggaacattgtcctaaaattgggtatggatatcgaggaaactatctccccaaacacctcgagttgttcagtgtttacttctattccccgacctgagcagcccatgtataccaaaggtgctcctctagtttgtcccaccgagagcagcaaatactatgtggttatggcctggagcaccagccttaatggaactattcagttcaccgatataagaaagttcaaggaatggatttatcgggagttacttctgtacaatattgtattttaaatagtaagacaaatattgagcccctcttccttttcagatataaattataaatttctattaaaacataaattttattaatttttgtaggcatagaaataacgcatactttgaattgactttagcacatatttccgcactcgttgccgtggcaaatgtcacacagagaagtgtccacgtgatagaattcggtagcactgcgttcggtggcatagtaatcatagagccgaacccaagaaggtttcagattggccaccgcatgggtgtatatggcctctagggtcaggcacttgcggtcaccaggtgacagcttttcgaaatagatatgaacctcggtgtcttcgtttttggtctccacacgctttacgtctgaaatggcttcgatatcggcaaagggctcgatatcgcaaacataaccagatggtagctgcacctgcatcaaagccatattggtggtcttattcctctcggaggctgcgatgggggtgtacgtgccacaaatgccaaggatcagtcggcctttatgggacttcttaaccgtagtcgttaatttgaagctgggtctcgcctccttggtggccacgttgtagcggtacgtcagctgaacttgtgcacgcccctgacctttggccaacaacttcacctcgtttgtgttttcaggaagctgatgagtctggactttaaattcattttctttagttacccttacatgttttttatcttcgttcaaatgccaaaactctatgtcaatagcttcggtcgaggcatgtgattggagttcgtacttggttaaggccattatacccacaacggtgtcctgggaggagacaaaacctccgttgctgttgcgcttgctaatcagccaatcgacaatcggtttgggttcatccgatatattatgctcgagaagggcgagcaggacataagaggtggtctctacttcgctgctcttacacttatcagaaccggtccaccatttgtgatcacctcgccgagtggccaatttatccaacttatccagaactttataggcattgcggtttcttgctaatgacagggccagggcggcaatggccagatcatacggctcatttgactggtgcacctccgtaaccacaaattccacagccctatcgattacatgcttatatttaggcatatattcctgcagatagagatgttttaaaaacaaaaaaaaaaaaatgcattggctaagtatctcaatgttaagttaataaagagtatatagcaatatagagcaataacaaggcaagcttacctcgttttcgaagaaagtcagcaggacaaatgatgtaagtgccaatggacttccatgactgttgtgtattaccatgcccaattctttaaactttccatctgtactctgtcgggacacgaggaaatcaagtccagctaccaacacatttttgtcaatgtcgatgtatttggcggcctggtgaaaggaccgtatcacatatgcagtgagccatgtgctgcctaaagcatcgtgttgcccccaagcgctaaaggaaccgtcgttacgtttgtagttgagttctatctggtaaccagtttccacataacgcttagctttattttctatctcttgatcctgccgattttttgcttttaaatagcttaacgccagtatactgggcacaaagttaaacatgttctgctctccacatccgcagggcaagtgaaccagatcgtcaaggtgttccagttgaggcgcttggctagttccgcacacttcgaattctacagtctcggaaccttcaataacattgtcggctttttctatgattattgttttttccggtggtgccaaactacgacgattcaacctttgaacgttaattaatacggccttattgacgtacttttggacgccatcggcctccactttcagtatttgatggagtctgtcaccggcatatttcgaaatggcggtgattttcagagtagtcaggcccactttctttgggcggatcatgaatgaaatgccacgtcctgtattcgcgggaatccataatgtttttttccttcggactcccctaagatactgggacacatttttgttggttgtctcaataaattcgtactgaccgtcagagttatccattaatactttcgccttcacatccattcccaagtagttaaagacgatcacgggaatggcaatcacttcaccccgctttacagagtacggcaagttggtggtaataaagaatggttggaacacacgaattctgctcggattcctggtcactgcaaggccggattgagggctaagggaaaagcctgtgatcacccaagaggtcaacgtatcgggaacagtttctttaatgatatattcaccgttggcgcccacgctgtaagcagaaatgtattatgtttgcttatggagtatataaaaaacttactcagtaatatttgaaaacagccatgtttcgggaaagagcttacgaactggtggaagtgaagcttgtgctctggttgaaccgacaatgggaacaggacctgagttctttgctagaattatttaagatgctataagagaagagaaggaatttaagcaattaattggtgggcttacttggctcatttttaaacatcgttcgaccaatgaggcttccagtacaattagtgtaaccttatatataggaatattgaattaaaattaatttaattatatgtcagttatactgacttaccaggattggtataacagccacctaaagggttaatcgaatttagtatttccaacagaagcttttgaaaataacttacccgagctcctgtagatatttatattcgcatttgttaggatcaccaaatcggtggagtacgtggcgagattgttcaatattagatcacggttcaggtcatttcctgaccttaaaagtagcacactctggtccactccaaggagtccgacgaaagaatggggattggttttcacctttaggctcacttcatcccttggcaatgcttcgtttgttgttaatatttcaatctgtgggtaagcgtatggaaatacgaaaatagattcgtgattattttgttgaatctattgtcttactgtgttctcaaagtccctctcgatatcgacagttttctcgtcagacatcaaaactccatcgataatgtaatggacaaatatcgtagcttgaggcaccagtgcaaaggttggctcgaactcaatttcctgactcttttttttttctttcatctcttgaaaaagactgagaacaatgttaccgcgtgcgacaacagtgagaataaagtaaggaagataggtatcggatataatattgattttaagtagcttccttagttgtggcctataaagtgaaagaaatatgtatagttagccaattccaaagcactactatttttacttacttcttagtattgatcgcaatcatgagtggtttattgagcttatatatgtaccgttctatattttctgcagtatcaaatgtagacgtcacaagacaactttggcacgtttcgggaagcattatgtgctcggttgcaatgctattttgaagtgaagctgaaaaatttttagaaacctgacagcacaagacgttgaagttaaccatcttagaagagtccatgacaggagaaccgtccaagtttctaaccacagtcttaaattcagacgatacacctggcctataatgcgttggccaaaaaagatcttccagcttatgacggtgctggtggactgtcacgtaggcagtaccattgtgtttgatgtccgtcagctcctcggtaacaatggccgttattttcaaaagtctcttggcagtcgctgaaatgggaaactccacattcacctctccatcaatgggcaggctctgctcggtcgagctgccctcgatcgtagcgacgacgtggccctttacgggtttcttgaatgtgtacctggcttttatcgttgccctaatatacccagcactagccgccacattcttagcggttaatacgaccacctcgaacttcggaaccacatacttgtccaccactagcacattagtcactttgccctcgtcctgcaccgtggcggttacggtccagttgcctagtacaggtctgtcggacagctggagctctccggaatagacaccctttgccggcttgatatctttccagctcttaattaaattctggtctccatcgcggatctcaattttaatgggcttatcgattacggcaggtcgggtgttcttgtctaggaagagtaccctaaattggatcttatcgccgggcttataggtggccttgtccgattgaatgtataaccaatttaagtcgggcgcaaagctcagcttggtggaattctggaactcgatgcctccgctacccataacttttagctcgtaatcgccttctgttagcttcggaatgtcaaacctaaccgacttcgaggacattgattgaacatcaacatactttctcgaatttaaggaaggtccagtcaggctgactgagacttcagtggttcgcgttgtattgtggatggcaactacaacattataagcgctgttagaccgtagggttttgggtgccagaacagagtacaggctgcaaaatgaaaaaaaaaaacccatgagatatagatacaccgcttggcggtaaccatgattgcaaatatttgttaagctactgtgttttctttcttatatttaagaaacgcacaaaaatctaaaaaaaaaataatataaaatataaaaattcccttcctccttgtcaacgtcttatgaaattccgaacagatttaaaaagcttaaaatgtctatttatgggaattaatattaaaattttataatcattttaacgagtagctgatagccaaaagttttttatgttcctttaagattataatgttgttattattattatttatgtacagattttttttttaaatttttcagcaaaatttttttcatttttggagaacaaaggtttatgcttttagtcagaagtctcacactacggattattttttatacccgtcactcgttttatgaattgaatttcatattaatgtcactttaatacaaacccgttagcattgcttaacaacacacaatgcaaaattgtcgagcttagtattaaccacagcataatgcaatattttttgcatgaacttattcttttcagtcttcaaaagagccactgattatttgaagacctgccagcttgaacgacaaaactgcactcagcttttaatctgcgcgagtcagtttatatagactctaggcactgacacatacacaaacgcataagtacgtgtttaaagattatattttagttcgggtgtttttgcaaaataaaatccccattaactggaaaattttatttattctacgaataagaggtataataagaggtttgtataattttgggcaatttaagagtaaaagagaaatt

SEQ ID NO: 26798 - DNA, 3612 bp, DROSOPHILA
atgtcctcgaagtcggttaggtttgacattccgaagctaacagaaggcgattacgagctaaaagttatgggtagcggaggcatcgagttccagaattccaccaagctgagctttgcgcccgacttaaattggttatacattcaatcggacaaggccacctataagcccggcgataagatccaatttagggtactcttcctagacaagaacacccgacctgccgtaatcgataagcccattaaaattgagatccgcgatggagaccagaatttaattaagagctggaaagatatcaagccggcaaagggtgtctattccggagagctccagctgtccgacagacctgtactaggcaactggaccgtaaccgccacggtgcaggacgagggcaaagtgactaatgtgctagtggtggacaagtatgtggttccgaagttcgaggtggtcgtattaaccgctaagaatgtggcggctagtgctgggtatattagggcaacgataaaagccaggtacacattcaagaaacccgtaaagggccacgtcgtcgctacgatcgagggcagctcgaccgagcagagcctgcccattgatggagaggtgaatgtggagtttcccatttcagcgactgccaagagacttttgaaaataacggccattgttaccgaggagctgacggacatcaaacacaatggtactgcctacgtgacagtccaccagcaccgtcataagctggaagatcttttttggccaacgcattataggccaggtgtatcgtctgaatttaagactgtggttagaaacttggacggttctcctgtcatggactcttctaagatggttaacttcaacgtcttgccacaactaaggaagctacttaaaatcaatattatatccgatacctatcttccttactttattctcactgttgtcgcacgcggtaacattgttctcagtctttttcaagagatgaaagaaaaaaaaaagagtcaggaaattgagttcgagccaacctttgcactggtgcctcaagctacgatatttgtccattacattatcgatggagttttgatgtctgacgagaaaactgtcgatatcgagagggactttgagaacacaattgaaatattaacaacaaacgaagcattgccaagggatgaagtgagcctaaaggtgaaaaccaatccccattctttcgtcggactccttggagtggaccagagtgtgctacttttaaggtcaggaaatgacctgaaccgtgatctaatattgaacaatctcgccacgtactccaccgatttggtgatcctaacaaatgcgaatataaatatctacaggagctcgggtggctgttataccaatcctgcaaagaactcaggtcctgttcccattgtcggttcaaccagagcacaagcttcacttccaccagttcgtaagctctttcccgaaacatggctgttttcaaatattactgacgtgggcgccaacggtgaatatatcattaaagaaactgttcccgatacgttgacctcttgggtgatcacaggcttttcccttagccctcaatccggccttgcagtgaccaggaatccgagcagaattcgtgtgttccaaccattctttattaccaccaacttgccgtactctgtaaagcggggtgaagtgattgccattcccgtgatcgtctttaactacttgggaatggatgtgaaggcgaaagtattaatggataactctgacggtcagtacgaatttattgagacaaccaacaaaaatgtgtcccagtatcttaggggagtccgaaggaaaaaaacattatggattcccgcgaatacaggacgtggcatttcattcatgatccgcccaaagaaagtgggcctgactactctgaaaatcaccgccatttcgaaatatgccggtgacagactccatcaaatactgaaagtggaggccgatggcgtccaaaagtacgtcaataaggccgtattaattaacgttcaaaggttgaatcgtcgtagtttggcaccaccggaaaaaacaataatcatagaaaaagccgacaatgttattgaaggttccgagactgtagaattcgaagtgtgcggaactagccaagcgcctcaactggaacaccttgacgatctggttcacttgccctgcggatgtggagagcagaacatgtttaactttgtgcccagtatactggcgttaagctatttaaaagcaaaaaatcggcaggatcaagagatagaaaataaagctaagcgttatgtggaaactggttaccagatagaactcaactacaaacgtaacgacggttcctttagcgcttgggggcaacacgatgctttaggcagcacatggctcactgcatatgtgatacggtcctttcaccaggccgccaaatacatcgacattgacaaaaatgtgttggtagctggacttgatttcctcgtgtcccgacagagtacagatggaaagtttaaagaattgggcatggtaatacacaacagtcatggaagtccattggcacttacatcatttgtcctgctgactttcttcgaaaacgaggaatatatgcctaaatataagcatgtaatcgatagggctgtggaatttgtggttacggaggtgcaccagtcaaatgagccgtatgatctggccattgccgccctggccctgtcattagcaagaaaccgcaatgcctataaagttctggataagttggataaattggccactcggcgaggtgatcacaaatggtggaccggttctgataagtgtaagagcagcgaagtagagaccacctcttatgtcctgctcgcccttctcgagcataatatatcggatgaacccaaaccgattgtcgattggctgattagcaagcgcaacagcaacggaggttttgtctcctcccaggacaccgttgtgggtataatggccttaaccaagtacgaactccaatcacatgcctcgaccgaagctattgacatagagttttggcatttgaacgaagataaaaaacatgtaagggtaactaaagaaaatgaatttaaagtccagactcatcagcttcctgaaaacacaaacgaggtgaagttgttggccaaaggtcaggggcgtgcacaagttcagctgacgtaccgctacaacgtggccaccaaggaggcgagacccagcttcaaattaacgactacggttaagaagtcccataaaggccgactgatccttggcatttgtggcacgtacacccccatcgcagcctccgagaggaataagaccaccaatatggctttgatgcaggtgcagctaccatctggttatgtttgcgatatcgagccctttgccgatatcgaagccatttcagacgtaaagcgtgtggagaccaaaaacgaagacaccgaggttcatatctatttcgaaaagctgtcacctggtgaccgcaagtgcctgaccctagaggccatatacacccatgcggtggccaatctgaaaccttcttgggttcggctctatgattactatgccaccgaacgcagtgctaccgaattctatcacgtggacacttctctgtgtgacatttgccacggcaacgagtgcggaaatatgtgctaa

SEQ ID NO: 26799 - protein, 1203 aa, DROSOPHILA
MSSKSVRFDIPKLTEGDYELKVMGSGGIEFQNSTKLSFAPDLNWLYIQSDKATYKPGDKIQFRVLFLDKNTRPAVIDKPIKIEIRDGDQNLIKSWKDIKPAKGVYSGELQLSDRPVLGNWTVTATVQDEGKVTNVLVVDKYVVPKFEVVVLTAKNVAASAGYIRATIKARYTFKKPVKGHVVATIEGSSTEQSLPIDGEVNVEFPISATAKRLLKITAIVTEELTDIKHNGTAYVTVHQHRHKLEDLFWPTHYRPGVSSEFKTVVRNLDGSPVMDSSKMVNFNVLPQLRKLLKINIISDTYLPYFILTVVARGNIVLSLFQEMKEKKKSQEIEFEPTFALVPQATIFVHYIIDGVLMSDEKTVDIERDFENTIEILTTNEALPRDEVSLKVKTNPHSFVGLLGVDQSVLLLRSGNDLNRDLILNNLATYSTDLVILTNANINIYRSSGGCYTNPAKNSGPVPIVGSTRAQASLPPVRKLFPETWLFSNITDVGANGEYIIKETVPDTLTSWVITGFSLSPQSGLAVTRNPSRIRVFQPFFITTNLPYSVKRGEVIAIPVIVFNYLGMDVKAKVLMDNSDGQYEFIETTNKNVSQYLRGVRRKKTLWIPANTGRGISFMIRPKKVGLTTLKITAISKYAGDRLHQILKVEADGVQKYVNKAVLINVQRLNRRSLAPPEKTIIIEKADNVIEGSETVEFEVCGTSQAPQLEHLDDLVHLPCGCGEQNMFNFVPSILALSYLKAKNRQDQEIENKAKRYVETGYQIELNYKRNDGSFSAWGQHDALGSTWLTAYVIRSFHQAAKYIDIDKNVLVAGLDFLVSRQSTDGKFKELGMVIHNSHGSPLALTSFVLLTFFENEEYMPKYKHVIDRAVEFVVTEVHQSNEPYDLAIAALALSLARNRNAYKVLDKLDKLATRRGDHKWWTGSDKCKSSEVETTSYVLLALLEHNISDEPKPIVDWLISKRNSNGGFVSSQDTVVGIMALTKYELQSHASTEAIDIEFWHLNEDKKHVRVTKENEFKVQTHQLPENTNEVKLLAKGQGRAQVQLTYRYNVATKEARPSFKLTTTVKKSHKGRLILGICGTYTPIAASERNKTTNMALMQVQLPSGYVCDIEPFADIEAISDVKRVETKNEDTEVHIYFEKLSPGDRKCLTLEAIYTHAVANLKPSWVRLYDYYATERSATEFYHVDTSLCDICHGNECGNMC

SEQ ID NO: 26800 - DNA, 3288 bp, DROSOPHILA
agctccatctgatgggcgaagtgccaaagatcaagtttgtccgggacaaaacgagcactggtctccatcaggtccacgaggttctgtccaaaatcgatcttcagcacagttactctagttcaaatgcggaagttgaagaaagcgacgcacagagttgtcagacggctgcggatgaggaatggccggagatgcgacaggatttcctcagttttaaccatagcttagttatggacaagattctcggcaagatgcgcaagtccaaagatgcctgggttaatcatagacaaaatattgcgaaaacctaacgtttgttaaatccctcgacttatgtacataatgttaattattaaagtgttattcaatccaatgtaaattgggttctaaagttgaaaataggggtagggtctgtaaacgtttaatcattttccaataagtttgaaatgttggctacttttatcccaactagttcatcatgttgagtggttttaaaatagagtatcgattgcgtttctaaaaaaaagctttaacggcttaaaattgaatgtcaaaggtcaaatcattaccatactcgattatgttattatgcttttaaagcttgcgcactgcatctgtatctgttatcgatataaagcaaaaacgcagaaaagccggacatgcgcataaaatgaatagttttataagcttttagtattggttatatattcccttcaggatatgcatattgtagatgtgcatttaatttaataaatagatagataattacttgtaagttaatgtaatcaaatcagctgtttttgatagttgcgatagtaggcgaccttgcgcttaaattgatatcgatgtcggataaagcactggacttgttatcgaaaccaacacttagcttcggcatacggaaactattcgatatatcgatgtatcgcgagtgattcacccagccctatcaattataccaaaaaaaatcagaccagaccagcttatcgggtacagattgattactttcttgcatctctagttttagtcgaaaaaatccattgaaacgatttggaagcggagtgtggtgatagttccgtgtgtccggagctgtcggcggcgccattgtccagcaatcgggagccaatcgctatgtgccggagagtatgcgtggacaggtgaaccaggcggtgggccaggcagccatcaatgagttgtccaatgccttcagttcgcgattcaagtaatggccgcgtaattgagtgcacagcatgccagagtatgcttaattattaacagaaacagaaacttagagagccagcacgcgaaacccctccccccaccaaccatatcacatcatttttttttttatcaaagatgtaaatcccaaaaagatggcaattcccatccagttgtttcgaaaattcgatggaaaaatttaaaaagtgttttacacatgatcttttggacaattcaacattcaaattagtgctttcgaattaagtttatcggggataccatttactttttaaagtatatttgaacgtgaaataaaaaaaaaaaaatttattttccaaaacgagtatttatgtatatgtaaaaaacagtgctgctagcttcatagttttcgtttccagatggtattacatatatccgtacatatatgatatttcgaatcgcagtgcaggaggcggacgagtgcaggaatgcaataaagccagtatttttttaaagctcaaaacaaaaaccgaagaaatatctaaaaggaaaatcgttaattgcagtgttacaatgcttctacattgatggtaaaaaaaaaatcgaactatgtactcactctaaaaacttgtatgaactaaactatcctcagagcaatgaattatatgcgaacaaatattatttagcaacgcaatgtccgcaagaaattatacaaaaacctattcaatgataaatattatgtgtgtgttaaggttatggtctttaacgattcttgtttatagacgtttgttaataagaaaataaagaaaaattaaattattcgcattgcctttaactacttggattcgtttggtaagctaatgcgatttatctgaaagtaaattatacgaaaatatacatacatcatagagggcagagaagaaattgcttttttctatcatttatttgccaacttatataattgttatccaaagttaactttaacatattgtttttctctttatgttggatggtttttaaaaaaattgcatttaatagttcgttcttttttggttatctgtgtaggatttcgaaaagcttatatacaaaaaaaaaatgttgctttgctgcttacaatcagtctcgtttttatgtttcatccatttcaaagtttcatgatgattatttaaaactattttatacaaaatatttaggatagctaaaaataataacccatagtttggtaaaaaatagttgcgtacatataaaatacatcgattcaaatgtaaatagtgtgatattggccaatcctatagtgatcggactatttggatcctatatataatttcaacttaagcctgacataactatcatgtatgcataactatcatttgacacctcaaaatgtaacgtcttgtatctcgttttgagcctgagcctgcgcctgcatcttgcacgtgtgcgtccgatgtggcgctgcggacccaaagttgtgctgctgctggtgttgctccacgcactcggcaggagctttcggtagcggcaagggtctaattgagatttgcgagagatgctgcgattgatgtatttggaagcgcctcttgtagtataatgttgacatttcttttgggtcaatattcactagaaatggctctagattccgactgtgctccttaaagatgtcctccatgtgcagcatacaatctcgcacctgagcctgtgcatttaaaatcaattgagtggtggtacataacaacactgctcccttgccatactcacttgctccacgctggttagatcggtcatcagactcaaaaggaagtgtagattgtgtcccgatcgcagatgccactttaggccattcattgacgcagctatgctcgatgcagctatggtgctggccgagaacttggcaaacttatgttcttcaaaggaaggggtgggaagtcagtacttaagttggactgttttgtatatggcttaccttttgctgccaacgatataaatgcctgagcatgtccccgcactttgccaatgtttatgtccggaaagtttttgctgcctatcggcaggcgcatcatcagaagctcaaggaagtccaagggagtcacagatgag

SEQ ID NO: 26801 - DNA, 3808 bp, DROSOPHILA
ttcttgcatctctagttttagtcgaaaaaatccattgaaacgatttggaagcggagtgtggtgatagttaggagtgtgtgcagtgaagtaaagccagcgattaaaggaaacagcatagaaaaaaaaaagacccgggagctgagcagtaaaaacacaaacatccggacgagttgggatcgcagttcgatctgatctgatctgatatctaatctaatctaattgtgagggaaatcggacctcgccgcaatggatagtttaattacaattgttaacaagctgcaagatgcgttcacatcgctcggcgtccacatgcaactggatctgccgcagatcgcggtggtcggtggccagtcagctggcaagagttccgttttggagaactttgtgggcaaagatttcttgccgcgcggctctggtatcgtaactcggagaccactaatcttgcaactgatcaatggagttaccgaatatggcgagttccttcacattaaaggcaagaagttttccagcttcgatgagatcagaaaagaaatcgaagatgaaacggatcgtgtgaccggtagtaacaaaggcatttcaaacattccaattaatttgcgcgtctactcgccgcacgtactcaatttaaccctgatcgatttgccaggcctgacaaaggtggccattggcgatcaaccggtggatattgagcagcaaattaagcagatgatattccaatttattcgcaaagagacttgtttaattttggctgtgaccccggccaatacggatctggccaattcggatgccctcaagctggccaaggaggtggatccacagggtgtgcgaaccattggcgttataaccaagctggatctgatggacgagggcaccgatgcacgcgacattctggagaataagctgcttccgctgcgacgtggctatattggcgtggtgaatagatcccaaaaggatatcgaggggcgcaaggatatccaccaggcattggccgccgaacgcaagttcttcttgagccatccctcctatcggcacatggccgaccgtctcggcaccccctacttgcagcgcgtgctcaaccaacaactaaccaatcacatcagggacacgttacctggcctgcgggataagttgcagaagcagatgctcactttggagaaggaggtggaggagtttaagcactttcagccaggcgatgctagcatcaaaacaaaagctatgctccaaatgattcagcagctgcaatcagactttgagcgaactatcgagggcagcggctcagctttggtgaacacaaacgagctctcaggtggcgccaagatcaatcgcattttccatgaacgtctgcgctttgagatcgtaaagatggcttgcgatgaaaaggaactgcgacgagagatctcatttgcaattcgaaatatccatggtattcgcgttggcctcttcacacccgacatggcgttcgaggcgattgtcaagcggcagatagcgctgctcaaggagccggttatcaagtgtgtcgatctagtcgtacaggaactttctgtggtcgtgcgcatgtgcacagctaaaatgagtcgatacccacgtctgcgtgaggagaccgaacgtattatcacaacacatgtgcgccaacgcgagcatagctgcaaggaacagatcctgctgcttattgactttgagctggcctatatgaacaccaatcatgaggacttcattggcttcgccaacgctcaaaacaaatcagagaatgccaacaaaactggcactcgtcaactgggcaaccaagtcattcgcaagggtcacatggtcatccagaaccttggaatcatgaaaggtggatcgcgtccgtattggtttgtgctgacatccgagagtatctcctggtataaggacgaggatgagaaggagaagaaatttatgctgccgttggatggtttaaaattgcgtgatattgaacagggatttatgtcaatgtctagacgtgttacatttgctttatttagtcccgatggacgtaatgtttataaggactacaaacaactggagctctcgtgcgagactgtggaggatgtggagtcctggaaagcatccttcctgcgagctggtgtctatcccgaaaagcaggagactcaggaaaacggcgatgaggaaggacaagagtcggccagcgaggagagttccagcgatccacagctggagcggcaggtcgagaccattcgtaatctggttgattcctacatgaagatcgttacgaagaccacccgtgacatggtgcccaaagcaattatgatgctgatcatcaacaatgccaaggactttatcaatggcgagctgctggcacatctttacgcgtccggcgatcaggtgacgtatcaatggccaccgtgtcgtcgccattgccaccgccggttaagaacgattggctgcccagcggcttggacaacccacgtctttctcctccaagtccgggtggcgttcgaggaaagccaggacctcccgcacagcgattccgaatcgcccaggaggtggggcaccaccactacccggcggtcgtcccggaggatctcttcccccaccaatgctaccatcccgtgtgtccggagctgtcggcggcgccattgtccagcaatcgggagccaatcgctatgtgccggagagtatgcgtggacaggtgaaccaggcggtgggccaggcagccatcaatgagttgtccaatgccttcagttcgcgattcaagtaatggccgcgtaattgagtgcacagcatgccagagtatgcttaattattaacagaaacagaaacttagagagccagcacgcgaaacccctccccccaccaaccatatcacatcatttttttttttatcaaagatgtaaatcccaaaaagatggcaattcccatccagttgtttcgaaaattcgatggaaaaatttaaaaagtgttttacacatgatcttttggacaattcaacattcaaattagtgctttcgaattaagtttatcggggataccatttactttttaaagtatatttgaacgtgaaataaaaaaaaaaaaatttattttccaaaacgagtatttatgtatatgtaaaaaacagtgctgctagcttcatagttttcgtttccagatggtattacatatatccgtacatatatgatatttcgaatcgcagtgcaggaggcggacgagtgcaggaatgcaataaagccagtatttttttaaagctcaaaacaaaaaccgaagaaatatctaaaaggaaaatcgttaattgcagtgttacaatgcttctacattgatggtaaaaaaaaaatcgaactatgtactcactctaaaaacttgtatgaactaaactatcctcagagcaatgaattatatgcgaacaaatattatttagcaacgcaatgtccgcaagaaattatacaaaaacctattcaatgataaatattatgtgtgtgttaaggttatggtctttaacgattcttgtttatagacgtttgttaataagaaaataaagaaaaattaaattattcgcattgcctttaactacttggattcgtttggtaagctaatgcgatttatctgaaagtaaattatacgaaaatatacatacatcatagagggcagagaagaaattgcttttttctatcatttatttgccaacttatataattgttatccaaagttaactttaacatattgtttttctctttatgttggatggtttttaaaaaaattgcatttaatagttcgttcttttttggttatctgtgtaggatttcgaaaagcttatatacaaaaaaaaaat

SEQ ID NO: 26802 - protein, 819 aa, DROSOPHILA
MDSLITIVNKLQDAFTSLGVHMQLDLPQIAVVGGQSAGKSSVLENFVGKDFLPRGSGIVTRRPLILQLINGVTEYGEFLHIKGKKFSSFDEIRKEIEDETDRVTGSNKGISNIPINLRVYSPHVLNLTLIDLPGLTKVAIGDQPVDIEQQIKQMIFQFIRKETCLILAVTPANTDLANSDALKLAKEVDPQGVRTIGVITKLDLMDEGTDARDILENKLLPLRRGYIGVVNRSQKDIEGRKDIHQALAAERKFFLSHPSYRHMADRLGTPYLQRVLNQQLTNHIRDTLPGLRDKLQKQMLTLEKEVEEFKHFQPGDASIKTKAMLQMIQQLQSDFERTIEGSGSALVNTNELSGGAKINRIFHERLRFEIVKMACDEKELRREISFAIRNIHGIRVGLFTPDMAFEAIVKRQIALLKEPVIKCVDLVVQELSVVVRMCTAKMSRYPRLREETERIITTHVRQREHSCKEQILLLIDFELAYMNTNHEDFIGFANAQNKSENANKTGTRQLGNQVIRKGHMVIQNLGIMKGGSRPYWFVLTSESISWYKDEDEKEKKFMLPLDGLKLRDIEQGFMSMSRRVTFALFSPDGRNVYKDYKQLELSCETVEDVESWKASFLRAGVYPEKQETQENGDEEGQESASEESSSDPQLERQVETIRNLVDSYMKIVTKTTRDMVPKAIMMLIINNAKDFINGELLAHLYASGDQVTYQWPPCRRHCHRRLRTIGCPAAWTTHVFLLQVRVAFEESQDLPHSDSESPRRWGTTTTRRSSRRISSPTNATIPCVRSCRRRHCPAIGSQSLCAGEYAWTGEPGGGPGSHQ

SEQ ID NO: 26803 - DNA, 2535 bp, DROSOPHILA
ggacacgatttgctttgccttcatcatcttccagctgcgcatcttcaagtcgcactacttctgtcacatcataacggacaccaaagcaaataacatcctggcctcaaggtggggttttaaatctctggtcattctatcaattaattgaacaatttttatcacagaggagccgacatcattgagagcctacgacataagcagattgcacatcgacacgaccatgaaaagcaggtgctgcataagatcaagcgaaagatggagcgcatccgtgccacgcagcagaagatgctacgacccttggacaaacaaacccacttcgacggtaagtgcttgcaccatcatcacttccaggggtttttttcttcccctatctgtaattttttggagctcgaacttctggtcgcgttttttgcaatttcccccttttgtattttgatcgttggaaattgtcgcgtgtgtgtcttacattaatctttggcttcgtgaagggcgacgcacgccctcagagcacgccatgtccgatgtggcgcctttggtccacaatagcagcttcacctcttgtcaaggatctggctatctgaccccagatgagcatagctccgccacctcaggcacttcatcgccagccagggcatcgatcctctccagcagtggaggcagcgtggaaagcgtggacagcgcagacgctgccgtgattattgaaccggaaatcaatgtgatgccgtgtgatgagattacggactatgtggatgttcagtctgtcagcgaggaggagacaactgtggcaatgcctaaaaaggatcttagctgccaatcaaaggaatgtgttttcaaaagcccagagccttcgaagccaaccacgccgagtacggatgccttgtctactctcctgaccgagggatttttggaaccgaaaaggatctcgttgggattggctcctcctgagctaagtcctcctgttgggatgcagtgcctggcacctccgttggctgcttatgccacagctatggcttctagtgcagccagctctgtgctgtccaccaatctgactccaaatcttcgccgagaacatcggcgtcagtcgtcaaccaatgccgctgtttcctggaacgaaactgtatccatcaaacgatcgcccatgaaaaagcaaatggtaaaaagtggaaagtgcgggatgcaaaccgttcacattgtgttattaagtttaaagtgttgatttgattaaagaatttaattaatttagacagaataatgttataaatatttataagtggtaaggctgaaaagtgtgttcggtttgcatcccaggagaaaacaatcgctcactcatttatcccacttgccaaaacagtcggcggataaggaggaggtggttaccatgcggcacaagtcgctacaccgccgacaccagagcatgggaaacgccagttactctttggacgaagccagtcagtcgcagcgcaagcggttgtccagcaacttatccggagctcgggacgaggccgctctgcgatccgcacagagaccacatagctggggacccgtgggtacgagctcctatatggagtcgctgatgtgcgccttctacgagcctgctctgctgcatggaccatgtattggatgaatcattactctcaaattctaatgataattttgctcaattttaacgaaactctgtacagaaaaaaccatttgttcaatgtgcgtgatctttaatcttcaataaaaccgattggggtcctgtgtagcagaccccaagaaactgcctccatgagtctggcctgtaaataacactaaactagataacttagctcccaattacttccatttgggttaatggttaagtgcgcaatcagaactcctgagcgctgctacaagtgtattataaatctcttcatcgatctaaatgtgattgctagaatcagtttcttaagcttcaggggattcacttgtgttgtaaattaagatttttgatctgcatggatgaaactcttctaaatttttctaaaagctttttataatataatactttttctaaatatttattttatttacctcaaaacggatataaaatctgattatatatttccactgtctataagcatattgaatgccatgggtatcggttcagaaatatacaatttacaacatatgaagcatcggttagccgttgttagattatgttccatcttgatttcaattaaagccaaatgtctaaattctgttcgtttttcaacgttttatttttgattattttgtatttgattattttttagaacatggttatccacttcctgcaccaacagtacgcagaaggaaggaaattaaattacatccacatggtaaagtttttgtttgttgtgcctcatttgttcgctaactaagccgcccccatgccatgtatatatatatataatctctacccgattaactgcatgaaattcggtgtgctgctatgtaaattgaatgcataaagaaaaccctactactcctagcaactatttactaatatctatctaaatgttgttaaacacc

SEQ ID NO: 26804 - DNA, 535 bp, DROSOPHILA
acagctatggcttctagtgcagccagctctgtgctgtccaccaatctgactccaaatcttcgccgagaacatcggcgtcagtcgtcaaccaatgccgctgtttcctggaacgaaactgtatccatcaaacgatcgcccatgaaaaagcaaatggtaaaaagtggaaagtgcgggatgcaaaccgttcacattgtgttattaagtttaaagtgttgatttgattaaagaatttaattaatttagacagaataatgttataaatatttataagtggtaaggctgaaaagtgtgttcggtttgcatcccaggagaaaacaatcgctcactcatttatcccacttgccaaaacagtcggcggataaggaggaggtggttaccatgcggcacaagtcgctacaccgccgacaccagagcatgggaaacgccagttactctttggacgaagccagtcagtcgcagcgcaagcggttgtccagcaacttatccggagctcgggacgaggccgctctgcgatccgcacagagaccacatagct

SEQ ID NO: 26805 - protein, 69 aa, DROSOPHILA
MASSAASSVLSTNLTPNLRREHRRQSSTNAAVSWNETVSIKRSPMKKQMVKSGKCGMQTVHIVLLSLKC

SEQ ID NO: 26806 - DNA, 20510 bp, DROSOPHILA
ttctagcaaaaaaaaaaccataacaatttgtgaaaaaatattaaatctaatctagctaaaaagaaaccgaaaatcacagccaacaacagcagaagattgagtttgttttaatgaaaaaattaactaacaatgaatcaaaaacaatgtcaatattaaattatactaatttattaagcattgtcttcagaaagctaaattacttagcagctcattatacagaaaattgattcttaaagattaattttaagcttactgttttacaatttattaaaccatatttagtagcttttatcggaaattgaatggttactcccatgaactctaaccctctgtatgctgaaatcaggctttctaaaaatgattttaaatgctggaaaaaaatgtgcaagatcataacaaaaacagttaacagcttttgtaatattttgaatatgcccaacatataaaattcaaacgtaaaatcaaatcgatttacataaacaatgaatacatataaaagtgtactgcacgattttatctaaatagagcacaaaaagacaaagcggtagaaaataacttgaaagtaaaataatatatatatcatatacatatatatatatcatatacatatcctaatatatggcaatttaaactaagtaagcaactgaatctaaataaaaaaaattatgttacacaaatcgggagaagacaactatgatgctgaaatctaatccatcgttaactgataagaaactgcgtaaggcctaatatagagaaccctgagttacagaagttgaattgtatgacccagttgggctattgcctccgccactgttgtcgtccgagccaggatcaaggtcatctggcgatagccgccttatcgcccatccagtggctctcactttactcatacagcaactacaatgtccgccgatcccagctgaactgtcgctcaagctttatcagggggtccagaacccaatagatagttggcattcgtgctcattgtcgttgtgtcgccgtcgttgttgtctcattcattcccggcctcgcagtcgtggattttacagcattgcgagcagatccaatctaagagatcctagatcacatgcaaaatgtggtggagccgtaaatttgcctcaaggtctctccgcctccaccggctcaagagcaccggaagcactgcgcccagggaacctgagcaatctctaggcatcattggagtgcccttcgcaaaggggcaggccaagcagggcgtggaactggcgccagatcttctccggcagagcagtctgcgtcaggtgcttcagagcagtcatggtgagtcagctacctcccttcagctttcgaactttgaaatgggttcggctacggaaaacgttttgttggattttgaaaatcgctggcctagaaaagcattagaagggaacaactggtcaatcgcagaatatttccttcgtaattaaaacaaccctttcagtttggatctcatatatttgtttttattgaccagatggcctggtgatacgggactacggaaatctgcagtacgccgtagacgagccccttctccagcagcagcgtgtgcactatcaccacatccgaaactacgcggacttcatggcctgcaatcgggcactgattgaacaggtgaaactcatgctcgtggagaacacgcagtttttagccattggtggtgatcatgcgatcggcttcggtgagtgaccaatctcgattttacgtccaatgatagaatccataacggaatcgtattgcaggatccgtggccgggcacctgcaacacacgccgaatttgtccctggtgtggatcgacgcacatgcggacatcaatctgcatagcacctcgcagtcgggcaacatccatgggatgcctgtatcctttctgttggaacagctccgtaacacctggcagcacgctggcctccaggaaatcgcgcccaactggtgagtgtacgaataatgcgctttttacactggatttgaatgtctgtgtccgattttcttcaaaaaaatgtctcgtcagtcaaagatgagggcaaaaacattattaatcaatacctcaaatcaaacttggtataagaactacatcatgtttgagtgagttaacccgaaaacaccaatacacaacgcagcgcaaaaagtacattatttcagagatcgtcttacggctagacaagtaagtctctcggtcatagtgtcatttattccattgtattgtacttaatatatatattttttgtttttgggtggtggtttgctgaagaggggttcttggcggggggtttgttcgccttatcacagttgccttaacgtactatgacttatttcgctttattgactctgctttgacttctgtttttcgatttttctctggtttcatttttattttttgtgcttgcctcagtctttgcgtgtagttgctatcaacctttaatttgcttatttatttagattattcaatttacacattgctttttgccttgggcagttcggtttttctttcggttttggaaagtcagtcgaaagggtgtttaaaatgtcaactgaagaaagattaaatcagagatcacaatgtaaataaggaagttgcggggtatcccggaaatgaaacaaagatttcagctctacgttttcacgatgtaaaatcgtatctatatagcgctctataactagacattacatataagaccacggggtggggggttggcgtggtcggagcctttgcacttcggcctattggcattgggataaaacttaaattcttcttgactcgaacttaaaatgtacaacaaaggtttattactagaaatattccttatacgagcatgtatatatgacagatcacaaattatcacactgtacggacgaatgactggcacaagatgaaaaccgaaataagaatgaaaatcgaaatcagatttatttacatcagtcggagattcctaattaactcaagaaatatattaatttgcttactcaatcgagtataactccaaataatatatcttacacaggataaatacattcacgcgtactacgattgtatttgaaaaatatgaaatcttttaaataataccaatcaatcaatcatattttatgtttaatgttttaaaagataaaaggcatctgggtatatgtaaaaaaaaatgctgactcaacgttagcaaggttttaaaagttcgctgtatattagtctgactaccctaaatactgataaatagtgattgtgaagacggtggattgtgctttgctggttaaaaattaaatctatatactagaaaaagcctttaatttccaattccttgaaattcaaaataatctgttgctcgcttagattttcttattgaaaatacaattcgaaacgcaagtgattcctgtatgtgtacgtgtgtgtggaatacaaatcatgtatgtgcatcgattggtgggagttccgggatttggaataaaggactgggatctgtggacatctgtggtatatgcttcaaataagtacagttaatattacgtgttaatcaatcaaatatgtacacaatcattatcgctttaaccaagtaatcaattaatttaattgaaattcaacttgaagaaatgtgtttgaaaatggtttttggttgtttcttttttcataaattcaattcaaaatcgaacgaacaacaataacacacacctggaaataaatcaagagaaagaaataaattagaaaattctttataaattattatactttttgctgcaggatatgcatgtgttagctttacagtttttattttgctacaaacagatcaataaaacgagaaagaaaacatttagagaaatcatcagttttgctgccaaatgtttattaggaaaaaatgtgtgcccaaattagttgagatcggcgttagactttttccgatcatcgatgcgctcttctccgattacttaccgaaaatcacacgaaacaaaaatagtaagtgaggatacgtacaatactatgtataacaacgacaacaacaaacttaaaaccggaactccggaaaccaaaattggctacatatcgatcggtaatagatgtgtatgtatgcccttatacatatccattaataaatactaatatatttataaatacatgtgtatacttgcacacatatgcacaacggaaggaacgaaaggggaacaacttaaatgccaaaatcggagcagttcgtcttccttataacgcaataccatatcatcatcttcatagttttatcttccttctcagctggctcaatacactgggagcaaaaaagcgtacgtgaaaatactctgagcgaaatcataagagcaaacaaagggcatactcttttcgagagagaacacacaacaaacttagggaattgggtgtgtaagtgggtgtgtgttagtatgacatacactgtacaaaatatagttggtagaaaggaaccgtaaatcaaccaaaacctttctgagatgaaaaattatttttaaaattgatgacgcaaagaacacccaacctatagtgtacaaaagacaattttaaaatttgaactcaattctaactttgaaagaatatccaaaatagtctgaacttaaactaaaataaaccaacttaatcttgaaacaaaagtttggtgtgtttgatatggattatatagagagaaatacatatatatgcaaaaagcaagaaaaactcataatcgtatatttttaaatacatttataatattaatatctttttctcatttgcttgtattcgtttttttagtgttttccattttgaaatatcatttgaaatgtgataaatattattaattaattaatcgatataaatatgttaataaaataaattaaatagtttcctctttctcgccatcgacgtcgtcattattttaatcataataatatatagaatggtatatttatatacttgttaatgattggtaaaggtatcctttgtgtttcgttaatgctatcgctaagcatctccagttctctgcccatcgaaatgatagataaactgtgctctaagaattacaaaaattacacagaattaagcaatacagaaatgcaggacaaaatcatacacagaaatcgttgcaatatatccccacaaatatataaattaagggagaggtggccgtacttcctccgctaaactaaactatgagattcatttatcataagcgctaaacataatggcattacacaaattaaaagtattcttgtttgcacacaaataatatcgcaactggcagagtctacaccaagcaacaaaaactggaatgcatatctttgggctgtttttacacgggggatacccccttaaatcgtggagttacgaggactaaaccaaacacgactgggaatgtctggggatgtctttttagctgagatcaacggattccgatggcacctcttgttagatgggccttgactagatcgattccttcatcttcttcatgtgactgtcagaggacttaaggtttttaaattagagagagagcgagagagaaagatagacagagagggaaacaagtataggattcgggaaagaagtggttgttaatcgaaaatcgtacagttttaaaaacaaacaaaaccaaaaaataacaaataaaaatgatgctaaaattttcatcaagatttctttttattgaaagaaaatttttcttgggttttttttacttgtttggtgcggaaatcaaataaaatcataagagtaaacatgttcgttgcgaaattagacaaaaagcaaaatacacaaaccgaaaaaaaataggccatactaaataataataatcaaaatataaatattcattcgatagaattcacaggagtttgcagtaacatacgcacagatcgtatatagctagaatatcaactaaatagctgtgttgtgttattgttgctgtgacaattcaagtaggtttagcataaaatcataattttaaactgaagctgaaacacaaaaaggtttctggtaaaacaaaattgaaatgaagaacgaaataaaatacaacgtacaaaattaaatatataaaccgcacattagagtaaaaagagacatattaagagaaaaggggagaatgggaggagagagagtttggaagttatagattttatatagacttctgtagctcgttctatctctctctctctctctatctctctctctatctatctttttgggtctctgctcttgtgttgtgtgtataattagactaattctttatcatatcattatcttcttgtttcttgtagctttgttcaaatcaagggaatatataattcaaattgaattaaataaaattacgtaattataaaatacaataaataatcttttttgtttcgttttcgtttgttttcttggctctttgcttacttaataggtaaattggtaaagaaaaaatatgagatattaatatgtatatgcatgtgatacatatacaatttcgcttaaaaaataattgttgtatatatatttttaaattttgttcttgttgctgggcttgcatttctttcttgttttgcggtgtgtatagagtaatcatacaattatgtttcataagatcaaatatttcatttctcgttttcctcgcctaatgaaattataatttgagatacttgaaaatttgttgttgtgttttgccttcagttgcattttaaaactattgcacaataattataattaatacaattaatttgatcatcggtgacaaaaaaaataagtatacattaaattaattaaattaagaattgtgtctgtgttgcgtgtaaaaatatgtgatgacagaaatacgaactaaacaaaatcaagtacattcctagctttcacaagattttattctgttctcctgtcccacagtgtgttcttatgtgggtatgttatataaataaactagttgattgtgtataatgtattgcattttcatctggaaatctcctttgacgctttccgttcgcctcgcttatcttttgcttagaggttttaagtgggtaaatctttggaaagggaagagcaggcggcttctatcaatcattcaatcattttattagctagaaattgccatagttcttttggttttgatctactattcctccttatatgcggctgcctcatcataataatattcttgttttccatcttctgactagagttcttgttgcgaattttgttcaaacaaaaaatattttttaccctataattataaaaaaaaatatatatatatatatatggtaatatacatacgcgtgattacacatagcgctaggtgacgtaataataataaaagtaaaataaattcctatttttctttttggattctgttcaatgtttgttgaaacttaggtcaagaatttatgctatttggagagtgaactcaaaaagggttgggtcgggtttcctaaggtaaactctataaagaaatcaaacacaaatcatttgtataaatatgcatggttgggtctgactggttttatgggctggatgcaaaagcttattattaaattcgatttgtgtacaaagcaaacaaagaaatcaaacaaaaccaaattcaaatacggaatatatagtccagaatcgaaattatatatgctgatgtttgtgtgtgtgctgtgtcttgctctctcgcttcaactatccatagaagcaaagaaatatacagaagatcaactgataaagtaacgcaaaagatccacgaaagttgtaggtttggacacgggtttgtagggtcttatataagcaggatgcggattaatccttgtcaatacgtagccgctttctttgtcctctagcacctcacttagctagaaaaacctctttgctatacttttgtttgcatccttcgtgagtattttccttttcacttgttttcattttacttttttgtgttatataaaaaatggttgctgttgctctactgtttggttttgtagtaattttttgtgctacgcttggtttttaacgctaaaattgttttggtttagcaagtgtttttttgtttatgcttacttgctccttgaactatacattatataaagtatataaggtgtgcctacgccagcatgcgtcgttatatagcggactatatatctgcaggcacctgtgcgcacacgcgcacatttacagtatcaatattcactaacaattatttacttcagtaaaacattttaaatttgcgcataaattattgtattactttttttttcacgtcgctagctttctgtcaatcatttttttatgatttctatgtttttcttcagttttcactgagtttgcttgtgcttaagggacatgagtttggcttgattcaatcggaattcgtttcgttttcttagtgtagaaaacaaatacaaaacataaaaaacactttaaatttctatatttagttgtatatctaggcaaacatagaattatcgcatatacatatgaatatacacatatttttagaattattaaacgtgctcgtttattaagtatatagttttaatttttatgtttcttgtaatactgtagcagcctccatgttatgcatatatacctattatatgcgcgatcctcctaattgccccttaaatactttttatcctgcgctctttgatcaagccaaactggtgtcctgtaagcacagtacatgtataaagtgtagacactgaattcctctattttcttaattctgctttaggtttagtatcaagattcaaagtttttatggtagaaaaagttgaagtgtaacaaacagatttgctgttttgctttcttttgtttggaagatttcattgctgcgttttacttaaagttaataaatttttaaaatttctcattttcttttttgctaataaagttaaatttgttttcgtttttgtgtgttttgtgtttgtttggttgatttctttgttttgctttgtgactagatcgactgtgccaacctttgacctttcacagctgccactgccacagtgtgttttcattttgcaatattatttcttaaaatctcattgttctttctcaaccccctacctattcgcttctcccgatcttataacttcttctgctcgcttcgtttagttaaggttttttacttaaatgctaaacaagaagaatttttctattgcaacgcttttggccggcggttttggggaggagatttgtgtttttagggggatttccgccgtttcgttgtcgtttagtggaaagagtattttctcctgcctgctactttcttgtttttttcttgtgtgttgtacacatactgttttgttgcgcttagttaccgttataccatgcatatttatatatgtgtgttgtgtggtcaggtttagattcaagataatgggttgtggttgctggtgctcccgctgcgtccttgtccacttccatttgggccgctctacttggctttgttggtcttgaagctgacctgcagcacccgattgcccatggtgtagccgttgagcgcccgaatggccatggccgcctcatcgtagttggtcatcgaaacgaagccgtagcccttgcactgattcgttgtgggatccttgacaatctttaccgattgcacagctccaaatggaccaaacagctgccacagggcagcctcctccgtttccggcgccaagttgtagatgaaaatgggatacgcgccgccaggcccactggccagcgttgtggccgccgccgccgccgctcctagtccattgggcagcattacgtccagcatgtcgcccgccattggtgaaaaccgggccagacccttgttaactggcgtgtgcatggcgcccccgatgcgtcgcaccagttggggattgaggaaagcgggcagctgcggctggatgatcttactggtgctgccgggcgtattggagaattttaccactatggggtctgtgcagctggatggtgtagtaccgttcaaggcaatgatagcccttgtggcctcctcccgcttatcgaatcgaataaagcctactcctttcgtctgcgtatcgttgccagcgttctgcagaatgcgcgatgtgattattgctccgaatggtgcgaagatggcctccagttcctgctgggtcatcgtctttggcagccccgacacataaaggttggcgcctttaatggcatcggacgacgggcgggcaaacgacacctttatggttttgttctgcagtcgcaggccgtttagaacattaacagcctgctcggcatcttgcggccggacatagttaacaaagccgtagcccagactttggcccttgctgggcgcctgcggattgagaggatcgatgtagacctgcgacttgtcgcgtatcagcttcaccgactcaatctcgccgacgctggagaagagcgaacggatctcgtcttcggtcattgtttgcggcaagtagttgacaataaggtttgtgcgcgtctccgtgctgccgttgctgccattttgcgatcccgatcctgcattgccattcgtattgggctgcgcctgctgcggctggggcaccacagcctgttggaccgccgcctgttgcaccactgccgccgcctgctgttgttgctgctgcactacagcctgttgggccacgacagcctgctgttgctgttggagctgctgggtcactgcggcagcggccgcggccaccgcttgctgtgtctgctgctgctgcacctgcaggattgcctgttgcacctgttgctgctgcagctgggcggcggccgccacggcggctgcattctgtacgggagcggcggccgcgtttgttgccgccactgctgcggctgcagcggcactctgcattagctgtgcctgtgtgtctactccgccgccagctccggtatttgccataataaagtccactgagtgataggtgagaggatcgggcagagtcgagaagtttattgttggttgtcacgaccaacgcaggggtaggcgcatggaaagaatagttaaatgtcaaaattaaaacatttgcatgatgtgttagtagttttttgtattattatgggttttagtagttataacgggctaattgattatcaatcagctagggtttgaatagaaaatttgttggtttattctaacgatattttttaatttatatttctttatttacatctgcccagggcgcaattatttaaatcgtttgatatgatatgtatattttttacctatttggtgaacagacaagtaatatatttcttataatgcttgtgagagcggactgtataacataatataagcctacacctttacttgtttaattaatggatacgaaaatgctttagggcgtggggatacggaaaaatgtgacccgggacaattaaaggatattacagcataaatatactgtaatccttaccagactctttaattttccgacgctgaacttttatttaatagacattaggggcatgtttgtaaattaaacacaaacgcggttatcctgggtgcgcacaattcccaaatcttgaatcatacgctaaattataattctgtggatttaaaaacagttggtgattaagtgatgaatgtatgttattcctttgttcaggaaataacggttggtcaacgaagctttgctaacaggcgccgcccagcgccccactttctcatccggccgctctctctgtctctatttagtcctctcttcccacacccgcgcactagaaatcaaagctctgcaaacacaccttcggcactgaagaactaaacttttctgaatttaagcttctgctgtgtctgcgcgattagcgagcttttgttttgcgattcctttttaattaatccgttcactagttttaagttcatgtgatatgtgtactgtaggtgtaggaagtggaggtagtggagcgaacgcgagaccagatccgctgcgtcacaggaacaggatgcttctggggcgagcgcaggactttctggcactgctgcgcgctgtagctgctcttgcgtcccttctccccctcgtctcctttccgcaaattacagcgctctctccataagagtgtgtcgcgctgtgcaccccgcccagttatgtaatgcggtgaacagagggatgacccagagggtcaggacatgcgagaaaccagcccgcaccccttgagaaagcatcaaaacaccataaatgagcaatagacggtagacccacccttagtcaaacaagttgtaatacttcgcttggcgaaacgaagcaaaacgaaacgtagaacggcattttctccaaatgtacgagcgccatttgccaccgataagggttaaaagcacggcattgccaccccctaagccggctccgccatttacatgacaccttggtaaggggtgcggacagcagaaacagaggcttaggcagagggggcggcgaagaggctgagcaagagagacagaggatgctgctcggaacgaaaccagcgaatgtgttggttcactgaactaagtgcgacagagagagggggctgtcgcgaaaagcgatcgctgcggaaatggtagcaatttgatttgcatatagggactacagcgggtctcgatatatatttgagctttagttaacgcattcgacactcccaaagtcgtgctaaaaactacatagctggtttggactggttagctgagactgaaaagtttttagttgctactgtttttactttggtggatgcttttcttaggtttggcgctttttaatatcctctattctcatacatatgtatgtaccgactcgcaccttttattgaggcgcttatggaagagtcaaaaggtcacgcgcacgcacgtcgtcgtcctgtaccacccactttcgtcatggcaagccaattagaggcgggtaacgataacccgaactacaatacggcaagaaggagctacttgtctaacatagacatatgtacatggatacacacatatatatatcaaatatagctaacctcttatgatttaaattaatttttttttttaatattccgcattagtggtttgattgtgttgccttgacacgacaccgcacccttcgaaagttttctctctttcgtcctgcgatctcgtcagctcggcccgtcgtctttcaatactcacttgttttagtttagggagcgagtatgtgtgtagttggttttggggagctggttggttgttgttgttgtttggctggacaaacaaagcgaactaattgctaagttctctttgcaatctcaaatccttgcgcgcgcgctctcacggcgctcctccttgctctctgcttcgattttctcccacactctcttcggttgtccaggactttggtgtttgttgtaatgtaatcgtttttaataaataaacgctggcgtcgccgtctgatgtggacaaaaacaaaaataaaacaaaactataagcggtaaattcgatgggtttggtggttgttgttgtagttttagttgttcgtgtttgcgggcctgtgtgtgtgcgtgcgattgttatcgccaatcgatattatcgattttaccccatccaaagcattgaattcatatttcacaggcgatacaaaaaatatatctgcgtgcagatacgcatacatgtggcgcagcgagaatactttgagatgttggtaaaattctactgaagagaggttatttgggcctgtagcaaccgctctttacctgcaccgatttagatatcgatgttgttgttaggaggtgggcggaggggactcaaactttgtatggctgatattgtttttacaagcacatatgtacacataataaataaatacgcgtgtatatatctacctatttcgagctctcttccacacaagcataaacacagacgaccactgggaaaaaaaaaactaattgttgtcgttttttgagaaaaaactcctttgctgtgaatcgcgaatcctctatgtttaatattgctactacgacatgggtctgattcatgcctgcgtgcatttgcttttatggcaaccggcgttttgttgactgcaagtactccgccacccacacacactcgcccaccctctccgctgcgctcaaaaaatggctacttctaacggttagttggtcgtgttcctccgtttgttgttgcgtacaatgctccttgcacatgaaatcataaaatcgatatgctagctgcgccctcttcggaactggctctcgctctaacactcagcgctcttctctcccgcacacgcaagcccacacacacatacacacacagatttaaatttgagcagcaagtatttacagatacacagctcacagaggcgtagatctgaacacatctactatctccgcactggccgccccctctcactctgactaaccgccgcccatctctccgccactctctttgggaggttcgctttttcctccatcgaattgcatattgttgttttgcctattaatattcgtttgaatgtatacaacttacacacatcacacacccactagcaaaaaaatagatataggtacatatggatatatgcagacacgcggattataagtgagtaaattgcacaattatgcagcgcgacgcgatcattagcaaaaaaaaagtactgtttcaaagttgttgattgatattgttatcattgcctttcattcagttgcacaaattgtggatatcctggggatactcttacatttcgctcggtgtgagatgagattccggccaatggctgttgtcagcttccagttatggttacttcggttggagtcaactcaacggttattgtcatgcactacttaaaaaaaatcaattgcggaaagagcacacaagcacgatatttggtattcgattagaattttccttgcttttattttctttttctgtggcaggagcgttcagaccgcggcgcacgatggttggcgtggaaatgaaataatgaaatgcgaaattgaggcattgacggtttcggtttccattttcacatagagcaacctctcattctcatatctcatagttgcctctcgagcagctctctcggggttgcaatggtgttcggagcgagagtggaaggtagagagcgaaagagtggcgacatgggcgtatctgcgcgccgagatagggggttattccggaaacctttaatatattttaatagctttaatatatagccacctaacattttaccttaagttttgtttctgtaaataccacgtagaagtggagaaagttttgtctgataagaaacgagtctataatcgttgcaaagtggaatatttctaagaaccccttttgatacacccctggctttcggctgctctctcagtggtttatgctgtattcaaagtttttcatgctttttgatacaaattcaaccgatcaaaatggaggttacctttcccgaagacaagagatagatgggggagagagccaagttctcttgtccagttaagcaacttaaaaccactggagcagccctaacttactttgtaaaattaacaaactcatctagaacacattggttttatagttaacccgatgtatgtatgcttcatatgtatttagctatgtatgcttcatatgtacttagcggcccattgggcctagatagcaggagcaattggaaatcattgcaaaatgttggctctttccgacgaggtcgtcaaccgttttatgatgcatgcgaccattatccttacaaatcagtcgcgttgtaagggctgttttgggtttatggttccgtttccgttattattatttttgcactatcaaccaccaacgccaaaggctagggtggtttctcctggcagtattgctcgtacaccccctacgaagcgaaagccagaagcaaggaaccgagacccaggacccatatccaagagccggtatagttttgaagtaatgcaattctggctttttcaatatttcccttcgtttcgtttcgcttcgttcgtgtgcttcattgctcctgtattcgttattcgcgccactagacacgccacatagtatggtacatacatacatatatgtgtatatgtatgtatatgtatgcacatactgtatgccatatatcgccatatatatgtagccaccctcggacacccccaatccttgtgaacttcctgttccctgtgctgattttttccttcgcctcttccagtcggacgctctgttccagtttacagaacaatgtaaggtacagtgaaatcgcgttgtgtgcaactttttcacgagaagaatttggctcggtttatagttgggcatgttatgaggatataaaggacatagaaaattttatcggatttcattgtatgttttatgtacgctgcactgcacttcgggaattgtaacgcaactttgggcagggggtggtttttgatgtcctttcaaagggtggtgcgctgctagtggcaacggaaatggggtggggtggcgctattgctgccctcgaaagatatgcggattcagattcagacagatcgacgtcgcagagagtttggttagcatacaaatatgcaaatgcgatgcttaagtggggaattggcaaatttcaattaaaggaatagtttgttcgaaatgtttcactaataactcttcacagtcctattggatccataatggtatttcaagtttgcggccacgtgctgaccccgtttcattctgtccaccccagaaataggcaatacgcttttttagtcatttttgggaaaaggatgtaatacaatgagactcgaaatcgaaagggttgggtcacataatccgttttagccacgccagaaacaaaacaaaaacagcaaatggcctgcgttacaacaaagcgggattaaaaagcaggcacaacacgaggttacaacaaagctggaaagtggctggggagggaaagggagggtctggtctttttcccggctcaaatgagagggactccgaaaaagccacccttagcgttttaaaatcgtggcggaaaaacgaaccaacccaaatatttgttgtgctgcaccgaaagctaggagccataggaacctggagcgtgcattcgatattctcgattgcattttctgcttcgaaagtaaagctataatggcgaggttacatatttcttgttgacttagccggatcttccagaaccagatccagcgttccatgcattcacccgtttttcttgagacgagttggattagaacgcctagggcgcttttaactttccatgtaccaatgcccaaatggccatgatcccatcatggatctggattgagcagacggaatccaaatgaatcggatctgcagacggcggcagatgcagtttcccccgaatctaattgtaataatcataaaattaccataagacatcgggttcgtagaccaggagcaaagaaggatcgatgcaggaattaaaagcaggcgagggatgcaggcacacaataacaaaatatatgaatgtgggatcacaggacattcgacactgaatcgtggcatgtgtttccaccctccctccttgccgctggcggcattgttttccgtctgccatgtttttgttgttgtttttccgtgttccgtgctcagacaatttcacctttgagtgcagaaatcctggtctccttctcaatgctattcggttgcagtccttagggttgcgatcgtgccaaaggcccaccacctggcctactaatcaggggcacgcatgccgagtggtagtggagcgcaagtcagctagaagttttcaaacattgacttaatccctgagaatttaaaatgataaaaaaaaatattttacatattttatgttgggacaaaatggtcttcagtttgactaagcaaaaatagaaataaattcccgcggatatgtcaaagagcacgcatgataagggaacaaactgatactgatatttttatgtaaggggtataaaatgatcctgccaatagtaataaggatcgagcgctgccctcaaggatcgataggcactccagcgaactcgcactttaagggcttctcctgtttctcctctctttactttttagttcagtgatccctcgactggatcccacgactatttgcttacgtgtcagctgcttgcggcccatccgatcctccaacaattcctgttctgtataggaaaagtctcaaagacttccatcacgaatttcagtagctggtaaaaatgtattcgtattccatgctttttctgatctagctctgttctgcttgccatttcagcttgcccaaggatcagctggtttacatcggactccgggacattgacccctacgaggcgttcatcctaaacaaagtcggaatacgctactatgcaatggatgtgagtgcactgagcgaaaagccgcttatcatcaacccaatttaatttaaacacataactttaacataaaacattctgaacgaaattttgagatgtaggcattgcgtatttaggccctttctctaccttagcacattactaaatttggtccaaactaggaaatatttttttgctgtgtagaaactagagaaaggcatctgcacctaggtagaaagcatgtgccgtccgttttccaaattgcatttcatttccttgcattccagtttggtttttcggccctacgaatccgatccgatccgatccgatccgaactgaaccgatcccttccagtctcgccgccagttgtaaacactttgaaattccggtttcttcccctattcctgttttaaagcaggactggcgagcgaattacacagagatcactcgtcctgcgtccaccgatgtaagctcggcatttataggggttgtcgcagaccctactattaccccctgtaataggacttccgatccgacgcgatcccgaatacgaaaaggaaaatgagaaacggtggtggtgactcacacaaaattacgtgcctggccacatccgcatccttgtcagaacggctcgttgcccattatttatggctcgtgcaaaatcgacatttgttgaaaaatggtttaatgccatcgctcccgttttggctttgcccaagctgcaaatttattatcgatcattaattcaatcggaattggaatatgttacagcagatatgcgaaaatgagacagaaaagttgaaattgtaagaaattgtacagtcgcgataaggaaggataagtacactctacagactctgtggtccaactttttgccttgagagcagtgagggacattctgtaaatgattttatgcatgccatacgaaattcttccgcccttcccttcccaactccctttaattgtcccgtccttcaacagaccatcgaccgggtgggcgtgcccaagattatcgagatgacgctggacgcccttaatccgcagaacaagatccacgtcagctttgacatcgacgccttggacagcaatgtggcgcctagcactggcaccgcggtgcgcggtggcctcacgctccgcgagggaatcagcatcgtggaggcactccgggacaccaagcgggtgcagggcgtcgatctggtggagatcaacccaaagctaggcagcgagcgcgacgtgcgcaccactgtggagtccggcctggagatactgaagagcatgttcggttaccggcgttcggggcgctggagcaacatcgataccggaatccttggtagcgattaaagaatgcaacacccccagttttgaacttattcatatttatgtacagcattcgtgacatattagtgtgtgtttttttttcgtatcttaatgagagaatacaatatttgcgtaaaaaagaagggttagtagtttgcagaatgagattccctgttgcacagaaatgccggctaaaggccggcttggagctttggcggcgtcgtgggcaaataggccgagatgtccacgctggccatcaggttggctgtgtgcagaagctcgttgacgggcggagctgtcccggcctttgcggagagcgaggatagagaaggagcatccggagcagcagccttggctctggtcaatcggttgtacaaaaccggagcgaaggtgcggagtaggcggcttctaatgctcagaagcaaggcatttatcgcccccgagatgacaatgattcctgatataattgagcacaggcggatggcaaaggttactaggtgatcgcgatcgttgcgcacaataattttcagagccgaccagtcgtacttaaagtaaatgccaggggagccgtacgaattgcgctctgaatctatccacagattaaaataattaattatggtcaattgatgtaatttctttgccctcctcacctagttttcgcacgttttcggtgacggcatactgaaaagcgtatatggtggtgaaagtctggtggatctctgtgggcacaaccttcaggaagtattgtactgtggtagcctcctcgtggatgacaatctcgtcgccctccaatggctggacaatccttcccgagtactgtccaaagctgagccggttaatgcgatgcgtaaagttcgcaggcatgcgccgcagttcgatcatccagtggtcctcgaagagtcccacaacgggctgagctccgcccacgaggtggagcacaccggccactttgttgatgcccagcgttccgtgcagacgacacgcatcgaatttgctttctggctgaacgttgtgccggccatgc

SEQ ID NO: 26807 - DNA, 1150 bp, DROSOPHILA
gtcgttgttgtctcattcattcccggcctcgcagtcgtggattttacagcattgcgagcagatccaatctaagagatcctagatcacatgcaaaatgtggtggagccgtaaatttgcctcaaggtctctccgcctccaccggctcaagagcaccggaagcactgcgcccagggaacctgagcaatctctaggcatcattggagtgcccttcgcaaaggggcaggccaagcagggcgtggaactggcgccagatcttctccggcagagcagtctgcgtcaggtgcttcagagcagtcatgatggcctggtgatacgggactacggaaatctgcagtacgccgtagacgagccccttctccagcagcagcgtgtgcactatcaccacatccgaaactacgcggacttcatggcctgcaatcgggcactgattgaacaggtgaaactcatgctcgtggagaacacgcagtttttagccattggtggtgatcatgcgatcggcttcggatccgtggccgggcacctgcaacacacgccgaatttgtccctggtgtggatcgacgcacatgcggacatcaatctgcatagcacctcgcagtcgggcaacatccatgggatgcctgtatcctttctgttggaacagctccgtaacacctggcagcacgctggcctccaggaaatcgcgcccaactgcttgcccaaggatcagctggtttacatcggactccgggacattgacccctacgaggcgttcatcctaaacaaagtcggaatacgctactatgcaatggataccatcgaccgggtgggcgtgcccaagattatcgagatgacgctggacgcccttaatccgcagaacaagatccacgtcagctttgacatcgacgccttggacagcaatgtggcgcctagcactggcaccgcggtgcgcggtggcctcacgctccgcgagggaatcagcatcgtggaggcactccgggacaccaagcgggtgcagggcgtcgatctggtggagatcaacccaaagctaggcagcgagcgcgacgtgcgcaccactgtggagtccggcctggagatactgaagagcatgttcggttaccggcgttcggggcgctggagcaacatcgataccggaatccttggtagcgattaa

SEQ ID NO: 26808 - protein, 351 aa, DROSOPHILA
MWWSRKFASRSLRLHRLKSTGSTAPREPEQSLGIIGVPFAKGQAKQGVELAPDLLRQSSLRQVLQSSHDGLVIRDYGNLQYAVDEPLLQQQRVHYHHIRNYADFMACNRALIEQVKLMLVENTQFLAIGGDHAIGFGSVAGHLQHTPNLSLVWIDAHADINLHSTSQSGNIHGMPVSFLLEQLRNTWQHAGLQEIAPNCLPKDQLVYIGLRDIDPYEAFILNKVGIRYYAMDTIDRVGVPKIIEMTLDALNPQNKIHVSFDIDALDSNVAPSTGTAVRGGLTLREGISIVEALRDTKRVQGVDLVEINPKLGSERDVRTTVESGLEILKSMFGYRRSGRWSNIDTGILGSD

SEQ ID NO: 26809 - DNA, 2804 bp, DROSOPHILA
attctcatacagattgtatctgagagtccttcgagccgattatacacgacagcaaaatatttcagtcgcgcttgggcaaaaggcttaagcacgactcccagtccccccttacatttgtcttcctaagcccctggagccactatcaaacttgttctacgcttgcactgaaaatagaaattaaaaaccaaagtaaacaatcaaaaagaccaaaaacaataacaaccagcaccgagtcgaacatcagtgaggcattgcaaaaatttcaaagtcaagtttgcgtcgtcatcgcgtctgagtccgatcaagccgggcttgtaattgaagttgttgatgagccgcgggattactggattgtggcgaattctggtcagcatacttaacagcagcccgctaattaagcaaaataaacatatcaaattccagaatgcgacggcgccatcatcctgtttgggaattcaattcgcgggcagatcgtttaattcaattaaaaggtagaagtcggtaaaagggagcagaagaatgcgatcgctggaatttcctaacatcacggaccccataaatttgataagcccgagctcgctgcgttgagtcagccaccccacatccccaaatccccgccaaaagaagacagctgggttgttgactcgccagattgaggtgcggattgcagtggagtggacctggtcaaagaagcaccgttaatgtgctgattccattcgattccatccgggaatgcgataaagaaaggctctgatccaagcaactgcaatccggatttcgattttctctttccatttggttttgtatttacgtacttatgggaaagcattctaatgaagacttggagaagacttacgttatattcagaccatcgtgcgatagaggatgagtcatttccatatggccgaaatttattatgtttactatcgtttttagaggtgttttttggacttaccaaaagaggcatttgttttctgggattattcaactgaaaagatatttaaattttttcttggaccattttcaaggttccggatatatttgaaacacactagctagcagtgttggtaagttacatgtatttctataatgtcatattcctttgtccgtattcaaatcgaatactccacatctcacaggatgttgtacttgaggaattggcgatcgtagcgatttcccccgccgtaaagttcctgatcctcgttgtttttgtacatcataaagtccggattctgctcgtcgccgaagatgggaacgaagctgccaaagctgagagtctgcttgaggtgctggtccggacggcgtcccagctggataaccttgctgtacagatcggcatctgcctggagggcacgatcgaaatccttccagtggacgaacttcacctgctcgctgggaatagcgttgttgtcaagcagctcaaggagcgtattcgagttgacgggctgcaccacgttaagttcctgctccttcgctggggattcccctgcgggtaagcgccgcttgcttggactcgtttccaaatcccatagccacgccagcagaggagtaacagagctctgaaaacagttcatggtttaaaaatatcctttaagaaagcccatgggtataacttacgtgctcactgcgtcctatgcgaggaatggtctttaggttctttatggcaaagttctcgcctcgcttgcccagccgcggtacgttcttggtgatctttaggaagaatcctggactactgtcgtctgcctggcttatggccacaagacccaccaagagcgaaacagacaggactgttatgattctcatgctgatgcgactgaagcttcacctgactcctgctccacaattggtggcctttatatagcgagatccacccgcatcttgcgtggaatagaaatgcgggtgactccaggaattagcattatcgatcggaaagtgcaaagcagataaaactgaactaacctgacctaaatgcctggccataattaagtgcatacatacacattacattacttacatttgtataagaactaaattttatagtacataccacttgcgtatgtaaatgcttgtcttttctcttatatacgttttataaattaaaattagtttattttcccaaaacagggctttaccaactaaatgattcggtacaattttttttaaataaataaatatacaaagtatttctgatctgctgctaaatcagagagctttgcgcccactgagcaacctctgtgggaagggcctggtatcgctgcatacagtggtgaatctggctgtatgtcagcgccagcttatgcatctcaaactctttctgcaccttacctacgccccctccagctccaccggtgagcggcatgatcagctctgcgatgcgtaaatgctcgaaggccttcaggacaatggaccgctccacggcctgcattgtggtggacactttggcaaacttggaaaagcgcgcgtaaatgatctcgaagttgaaggaatcgcgatcgtaaatctgcgaatggtgcttgatggcgatgatcaggcacagctctaggactgagagcccgcaaagcagctctatcttgtcgtcgccctcaaactgtgatcccactgcagccattttttcggctgtgatgtggggagattgcggtcggagatgtgccaccaggcggaataggaagttcttgagataggcctcgctaatgtcgaagtcatggagcgcttggagggtgcttcttgcctgctgagtggccaggactttgcatatttgcttgttccaggcatcgcgtagtctgggcgaaaagccgtactccccg

SEQ ID NO: 26810 - DNA, 746 bp, DROSOPHILA
catgagaatcataacagtcctgtctgtttcgctcttggtgggtcttgtggccataagccaggcagacgacagtagtccaggattcttcctaaagatcaccaagaacgtaccgcggctgggcaagcgaggcgagaactttgccataaagaacctaaagaccattcctcgcataggacgcagtgagcacagctctgttactcctctgctggcgtggctatgggatttggaaacgagtccaagcaagcggcgcttacccgcaggggaatccccagcgaaggagcaggaacttaacgtggtgcagcccgtcaactcgaatacgctccttgagctgcttgacaacaacgctattcccagcgagcaggtgaagttcgtccactggaaggatttcgatcgtgccctccaggcagatgccgatctgtacagcaaggttatccagctgggacgccgtccggaccagcacctcaagcagactctcagctttggcagcttcgttcccatcttcggcgacgagcagaatccggactttatgatgtacaaaaacaacgaggatcaggaactttacggcgggggaaatcgctacgatcgccaattcctcaagtacaacatcctgtgagatgtggagtattcgatttgaatacggacaaaggaatatgacattatagaaatacatgtaacttaccaacactgctagctagtgtgtttcaaatatatccggaaccttgaaaatggtccaagaaaaaatttaa

SEQ ID NO: 26811 - protein, 203 aa, DROSOPHILA
MRIITVLSVSLLVGLVAISQADDSSPGFFLKITKNVPRLGKRGENFAIKNLKTIPRIGRSEHSSVTPLLAWLWDLETSPSKRRLPAGESPAKEQELNVVQPVNSNTLLELLDNNAIPSEQVKFVHWKDFDRALQADADLYSKVIQLGRRPDQHLKQTLSFGSFVPIFGDEQNPDFMMYKNNEDQELYGGGNRYDRQFLKYNIL

SEQ ID NO: 26812 - DNA, 5809 bp, DROSOPHILA
tatatccctatcagttagtaaactaatcaatatttatttataatttgctatccagaccaagatccaaacaacagtcgtcgctcagccatcaagcaggtggcttcgggacgtttcggcgtgaccgcatcttacctggctaatgccgatgatctgcagatcaaaatggctcagggcgccaagcctggtgagggtggcgagctgccaggctacaaggtgaccaaggatattgccaagacccgaaagtccgtacccggagtgggcctaatctcacctcctcctcatcacgatatctactcgatcgaggatctggctgagctgatctatgatcttaaatgctccaatccaaatgcacgcatcagtgtaaagctggtgtccgaagtgggcgttggtgtcgtcgcttccggtgttgccaaggtaggtttgcgaatgcattagaaaggtaataagtctcttgaagaattttcttattacaacagggcaaagccgagcacattgtaatctctggacatgatggtggtaccggtgctagctcctggacaggcattaagaatgccggattaccctgggagctgggtgtggccgagacgcatcaggtgctggtgctaaataatctacgatcacggtaagtttccgaccaggagaagccggcacagagccattcccgctctctcctcttgttgttactaatcatgaaccgatacattactgaaagtgcctggttatccagatgacagcgttggaaaacctgttcagaacatgtattcccaaaagcagagatccattgatcatcggaaagttgggctgatccccctacacaaccccattgaaactcctcgtacatgtggccagtgggcggtgggcaggaggacgatgacacggcgcttggggaaggcgaatcttgtccagcggaagagcgctcaatgagaatttcaaattctttgaaatctgacaaatgaaagatgtctcgattgcgaacccatggacatgatccagtgtgaggaaacggatacagtgaaagatcgatccattcaaaatgaagaagtagcgcattctttggacagagacctttgaagtaatgagtatcactcaactgatctccagatcctagctacagaaacccgcttccaaacagctgtaaaacacgattcgatcgatccagtccaaatccaaactccagtccactcgctctactccactccactcactcgctcactcgatcacgttcgtcgcgctgtgctccattcgtaatttcttctcattacattgattcttacccggggctgaatttgctaacattgccttcctttttatgtcgtgtcttcccactataaacggtctggatctggattttgtttggatgaaccttccgcagtgtgattgttcaggctgatggacagctccgcacaggattcgatgtggttgtggctgcactgctgggtgctgatgagtttggtttcagtactgctccattgatcgtcatgggtaagttgtggccattacttttatactctgtgttataagtataatactctttaaaggctgcactatgatgcgcaagtgtcacttgaacacctgtcccgtgggcattgccacccaggatccggagctgcgcaagaagttcacgggtaaaccagagcatgttatcaacttcttcttcatgctggccgaggatgtaagcttatatttcccatagcttctataaattagactaatcatttgactatttttatagattcgcaaaattatggctggattgggcattcgaaagttccaggatctgattggtcgcaccgatttattgcgcgtggccagtcaacgcgatgccaaggctagtaacctggacctcaagttgctcctgcagccagctttggaactgcgtcccggcacgaacatcgttggaggttccgtaaagcaggacttccagctggagaagcgttccgacaacgaactaattgccaaggctcagcaaatattcagtggagcagacgataatgtaaccgtcaagatgcgcatccacaatgaggagcgagcctttggttctactctgagctatcatattgcatggtaggattaagtctgttaacaaggtgatcataatctaatttgttataatctacagcaaatatggagaggctggcttgcccgctggcaagagcatcgacatcttcctggagggttccgctggtcagagcttctgcgcgttcctggcgcggggtgttaatgtgacattgaagggcgatgccaacgattatgtgggcaagggtctttgcggtggtaatgttgtcatcatgccacaagatacggttcccttcgaatcacatctcaatgttatcgtgggcaacgtttgcttgtatggagccactgagggaactgcctatttccgcggtattgcctccgaacgcttctgcgtacgaaactctggtgtaaccgccgttgttgaaggtgtgggcgatcacggatgtgaatacatgactggcggtgtagtggttatcctcggtcttacgggacgaaacttcgccgctggcatgtccggcggtattgcttatgtgtacgatttagatggttcctttaagcccaaggtaaacccggaaagtgtggaactcctgccgttggaaattgagaaggatgtgctgctcgtcaaggaactgttggctgatttcattgagaagacaggctcgaaggtggccaaggagttgcttgacaactgggccgaagcccagggcaagtttgtcaaggtcttcccgtatgaataccaaaaggctctaaaggacatggccgaacaacaagcagtggagcagcccctgaagtccgccatcgagaatggaaacggaaagcatgaaccgcacatcaaggacattgaggaagcgattcaggacgtggtgctcgagcagaagcgtgccgatcgcgtcctggacaagacccgtggctttgtaaagtacaagagggaatcggctccgtaccgagatgctggagagcgacagaaggattgggatgaagtctacaacttcccacatgtgcgcaagaacctcaaggttcaagcagctcgatgcatggaatgcggtgtgcccttctgtcagtccaactccacgggctgtccgctcggtaacatcattcccaagtggaacgacctcgttttccacggcgagtggcaggaggctctgcgtcaactgctgcagaccaacaacttcccggagttcactggtcgagtatgccccgctccctgcgagggttcctgcgttttgggcatctccgagccagctgtaacgatcaagaacatcgaatgcgccatcatcgatcatgccttcgagcagggctggattaagccagagattccggaagtgcgcactggcaaacgagttgcgattgtgggatcaggaccttccggcttggccgcctcgcagcagctgaaccgcgccggtcactttgtcaccgtttttgagcgcaacgatcgcgttggtggacttttgcagtatggtattcccacgatgaagctttccaaggaggtggtcaagcggcgggtagatctgatggctgacgagggtatcgagttccgcaccaatgtccatgtgggcaaggacctcaaggccgagcaactgctgcaggagtaagtataattgaacattttaggtgatctagctgatttttgacgattttgccatgattgggttaaatcagtcctcaagttttaatagaatatttagtctaaaacacctgtacttattactctcgaaattttcaacaggtatgatgccgtcctcctcaccactggctccacctggccacgtgacttgccgctcgccaaccgtgacctgaagggcattcactttgccatggaattcctggaggcgcagcagaagaagcagctgggcggaaagaatgatataatatctgccgctggcaagaatgtgatcatcatcggcggtggcgataccggatgcgattgcattgccacgtcgttgcgtcaaggcgccaagagtatcactacattcgagatccttccggaaccgccacagaagcgtgctcaggacaacccctggcctcagtggccgaaggtcttccgcgtggactacggtcacgaggaggtgaagctgaagtggggcaaagatccgcgccagtactgcaccaccaccaaggagttcgtgggcgaaaatggagccatcaagggcgtgaacaccgtcgaggttgagtggaccaagacggaaacgggccagtggcgcatgcaggaggtggccggttcggagaagtacttccccgcagaccttattctcctggccatgggcttcctgggtccggagaagacggtgccgagcgaactgggcctggagctggacccgcgcggcaacatcaaggcatccaacggacagtatggcacctcgaactccaaggtctttgcggcaggaggtcagttttatgtctactaagtaataggcttagtattaagagttaatcacatcaatcattgaatgatttctgtatctttgcataacaaaaatgttaatttatcttctgtcctttgcagattgccggcgtggccagtcgctggtcgtctgggccattaccgagggtcgccaggccgcacgacaggtcgattcctatctgaccggccgtcccagtgggcttccaggacctggtggcgtcatcgcgacatcctaaagaggatccacagaggcagccagagcagctaatatcaagttttgtgtgcgtgcatcgtccttagcctatagtgcgaaattctttaacgatttgtgatttttattttcgcgattttagtttagtttacactaaaaagacttgagttttttacacaccaaaccaaaacgaaacacgtttcatttagttttattttgatcgcaaagctggctgggaattgttagtggttcgtcgagatgccctccatatgatgatgatgatgatgatgatgatgcggcaggagtcaattaagagtgcaaactgaaattctgattgaagccaatcaatatgtatatcttaacggaaatcgaatatccaacaaaaaatctaaggacaataactagaaacttaccgttatcgttaaaatgaaaattaattgaacattaaatatttagaaaatgcattttttcaatgttgttttagcttgagttgcctaatctatgcaaacgaaatatatgaagtgaaaattgatatgctgatctccaccatcctatatacaatccataaatcgtatatacagaaagagaaatgtattaaactcggccaatatcgaaacgcattttttagatgttgtttttgtgttttgaactgcattcgaccgttgaccgcaaatgtacctaagtggctattgttaaaacaaatctgctctttggcagttgaatgtgcgaatacaaagaattacacaatttatacaaaacatatttaacccaaatgtatacccttatacagacatctctatataaatatatttatgtgcaagtatttgatgaaataaatattcaaattattaaaaagcatttctccgatgagttgatatttgtgttttgaatttggcatgggaaatatatttattaatagcttgaaaagagaggcaacgtctttttgaaattaaaaacctttgttatatgtataccttgtaatttaaaattattggtattttacgtaaagcgtataactttaaaggaatgagaaaccattgtaatgtagaaaatatttaataatatttctttaaattcattgtatggtaacttatgtagttaccgctttatttaattactaagtacaatatcttgttgttttatgccgtaagcttgttacgagcggagctgaagttccagtg

SEQ ID NO: 26813 - DNA, 3254 bp, DROSOPHILA
aaacggatacagtgaaagatcgatccattcaaaatgaagaagtagcgcattctttggacagagacctttgaagtaatgagtatcactcaactgatctccagatcctagctacagaaacccgcttccaaacagctgtaaaacacgattcgatcgatccagtccaaatccaaactccagtccactcgctctactccactccactcactcgctcactcgatcacgttcgtcgcgctgtgctccattctgtgattgttcaggctgatggacagctccgcacaggattcgatgtggttgtggctgcactgctgggtgctgatgagtttggtttcagtactgctccattgatcgtcatgggctgcactatgatgcgcaagtgtcacttgaacacctgtcccgtgggcattgccacccaggatccggagctgcgcaagaagttcacgggtaaaccagagcatgttatcaacttcttcttcatgctggccgaggatattcgcaaaattatggctggattgggcattcgaaagttccaggatctgattggtcgcaccgatttattgcgcgtggccagtcaacgcgatgccaaggctagtaacctggacctcaagttgctcctgcagccagctttggaactgcgtcccggcacgaacatcgttggaggttccgtaaagcaggacttccagctggagaagcgttccgacaacgaactaattgccaaggctcagcaaatattcagtggagcagacgataatgtaaccgtcaagatgcgcatccacaatgaggagcgagcctttggttctactctgagctatcatattgcatgcaaatatggagaggctggcttgcccgctggcaagagcatcgacatcttcctggagggttccgctggtcagagcttctgcgcgttcctggcgcggggtgttaatgtgacattgaagggcgatgccaacgattatgtgggcaagggtctttgcggtggtaatgttgtcatcatgccacaagatacggttcccttcgaatcacatctcaatgttatcgtgggcaacgtttgcttgtatggagccactgagggaactgcctatttccgcggtattgcctccgaacgcttctgcgtacgaaactctggtgtaaccgccgttgttgaaggtgtgggcgatcacggatgtgaatacatgactggcggtgtagtggttatcctcggtcttacgggacgaaacttcgccgctggcatgtccggcggtattgcttatgtgtacgatttagatggttcctttaagcccaaggtaaacccggaaagtgtggaactcctgccgttggaaattgagaaggatgtgctgctcgtcaaggaactgttggctgatttcattgagaagacaggctcgaaggtggccaaggagttgcttgacaactgggccgaagcccagggcaagtttgtcaaggtcttcccgtatgaataccaaaaggctctaaaggacatggccgaacaacaagcagtggagcagcccctgaagtccgccatcgagaatggaaacggaaagcatgaaccgcacatcaaggacattgaggaagcgattcaggacgtggtgctcgagcagaagcgtgccgatcgcgtcctggacaagacccgtggctttgtaaagtacaagagggaatcggctccgtaccgagatgctggagagcgacagaaggattgggatgaagtctacaacttcccacatgtgcgcaagaacctcaaggttcaagcagctcgatgcatggaatgcggtgtgcccttctgtcagtccaactccacgggctgtccgctcggtaacatcattcccaagtggaacgacctcgttttccacggcgagtggcaggaggctctgcgtcaactgctgcagaccaacaacttcccggagttcactggtcgagtatgccccgctccctgcgagggttcctgcgttttgggcatctccgagccagctgtaacgatcaagaacatcgaatgcgccatcatcgatcatgccttcgagcagggctggattaagccagagattccggaagtgcgcactggcaaacgagttgcgattgtgggatcaggaccttccggcttggccgcctcgcagcagctgaaccgcgccggtcactttgtcaccgtttttgagcgcaacgatcgcgttggtggacttttgcagtatggtattcccacgatgaagctttccaaggaggtggtcaagcggcgggtagatctgatggctgacgagggtatcgagttccgcaccaatgtccatgtgggcaaggacctcaaggccgagcaactgctgcaggagtatgatgccgtcctcctcaccactggctccacctggccacgtgacttgccgctcgccaaccgtgacctgaagggcattcactttgccatggaattcctggaggcgcagcagaagaagcagctgggcggaaagaatgatataatatctgccgctggcaagaatgtgatcatcatcggcggtggcgataccggatgcgattgcattgccacgtcgttgcgtcaaggcgccaagagtatcactacattcgagatccttccggaaccgccacagaagcgtgctcaggacaacccctggcctcagtggccgaaggtcttccgcgtggactacggtcacgaggaggtgaagctgaagtggggcaaagatccgcgccagtactgcaccaccaccaaggagttcgtgggcgaaaatggagccatcaagggcgtgaacaccgtcgaggttgagtggaccaagacggaaacgggccagtggcgcatgcaggaggtggccggttcggagaagtacttccccgcagaccttattctcctggccatgggcttcctgggtccggagaagacggtgccgagcgaactgggcctggagctggacccgcgcggcaacatcaaggcatccaacggacagtatggcacctcgaactccaaggtctttgcggcaggagattgccggcgtggccagtcgctggtcgtctgggccattaccgagggtcgccaggccgcacgacaggtcgattcctatctgaccggccgtcccagtgggcttccaggacctggtggcgtcatcgcgacatcctaaagaggatccacagaggcagccagagcagctaatatcaagttttgtgtgcgtgcatcgtccttagcctatagtgcgaaattctttaacgatttgtgatttttattttcgcgattttagtttagtttacactaaaaagacttgagttttttacacacc

SEQ ID NO: 26814 - protein, 915 aa, DROSOPHILA
MGCTMMRKCHLNTCPVGIATQDPELRKKFTGKPEHVINFFFMLAEDIRKIMAGLGIRKFQDLIGRTDLLRVASQRDAKASNLDLKLLLQPALELRPGTNIVGGSVKQDFQLEKRSDNELIAKAQQIFSGADDNVTVKMRIHNEERAFGSTLSYHIACKYGEAGLPAGKSIDIFLEGSAGQSFCAFLARGVNVTLKGDANDYVGKGLCGGNVVIMPQDTVPFESHLNVIVGNVCLYGATEGTAYFRGIASERFCVRNSGVTAVVEGVGDHGCEYMTGGVVVILGLTGRNFAAGMSGGIAYVYDLDGSFKPKVNPESVELLPLEIEKDVLLVKELLADFIEKTGSKVAKELLDNWAEAQGKFVKVFPYEYQKALKDMAEQQAVEQPLKSAIENGNGKHEPHIKDIEEAIQDVVLEQKRADRVLDKTRGFVKYKRESAPYRDAGERQKDWDEVYNFPHVRKNLKVQAARCMECGVPFCQSNSTGCPLGNIIPKWNDLVFHGEWQEALRQLLQTNNFPEFTGRVCPAPCEGSCVLGISEPAVTIKNIECAIIDHAFEQGWIKPEIPEVRTGKRVAIVGSGPSGLAASQQLNRAGHFVTVFERNDRVGGLLQYGIPTMKLSKEVVKRRVDLMADEGIEFRTNVHVGKDLKAEQLLQEYDAVLLTTGSTWPRDLPLANRDLKGIHFAMEFLEAQQKKQLGGKNDIISAAGKNVIIIGGGDTGCDCIATSLRQGAKSITTFEILPEPPQKRAQDNPWPQWPKVFRVDYGHEEVKLKWGKDPRQYCTTTKEFVGENGAIKGVNTVEVEWTKTETGQWRMQEVAGSEKYFPADLILLAMGFLGPEKTVPSELGLELDPRGNIKASNGQYGTSNSKVFAAGDCRRGQSLVVWAITEGRQAARQVDSYLTGRPSGLPGPGGVIATS

SEQ ID NO: 26815 - DNA, 5478 bp, DROSOPHILA
aatgctccaatccaaatgcacgcatcagtgtaaagctggtgtccgaagtgggcgttggtgtcgtcgcttccggtgttgccaaggtaggtttgcgaatgcattagaaaggtaataagtctcttgaagaattttcttattacaacagggcaaagccgagcacattgtaatctctggacatgatggtggtaccggtgctagctcctggacaggcattaagaatgccggattaccctgggagctgggtgtggccgagacgcatcaggtgctggtgctaaataatctacgatcacggtaagtttccgaccaggagaagccggcacagagccattcccgctctctcctcttgttgttactaatcatgaaccgatacattactgaaagtgcctggttatccagatgacagcgttggaaaacctgttcagaacatgtattcccaaaagcagagatccattgatcatcggaaagttgggctgatccccctacacaaccccattgaaactcctcgtacatgtggccagtgggcggtgggcaggaggacgatgacacggcgcttggggaaggcgaatcttgtccagcggaagagcgctcaatgagaatttcaaattctttgaaatctgacaaatgaaagatgtctcgattgcgaacccatggacatgatccagtgtgaggaaacggatacagtgaaagatcgatccattcaaaatgaagaagtagcgcattctttggacagagacctttgaagtaatgagtatcactcaactgatctccagatcctagctacagaaacccgcttccaaacagctgtaaaacacgattcgatcgatccagtccaaatccaaactccagtccactcgctctactccactccactcactcgctcactcgatcacgttcgtcgcgctgtgctccattcgtaatttcttctcattacattgattcttacccggggctgaatttgctaacattgccttcctttttatgtcgtgtcttcccactataaacggtctggatctggattttgtttggatgaaccttccgcagtgtgattgttcaggctgatggacagctccgcacaggattcgatgtggttgtggctgcactgctgggtgctgatgagtttggtttcagtactgctccattgatcgtcatgggtaagttgtggccattacttttatactctgtgttataagtataatactctttaaaggctgcactatgatgcgcaagtgtcacttgaacacctgtcccgtgggcattgccacccaggatccggagctgcgcaagaagttcacgggtaaaccagagcatgttatcaacttcttcttcatgctggccgaggatgtaagcttatatttcccatagcttctataaattagactaatcatttgactatttttatagattcgcaaaattatggctggattgggcattcgaaagttccaggatctgattggtcgcaccgatttattgcgcgtggccagtcaacgcgatgccaaggctagtaacctggacctcaagttgctcctgcagccagctttggaactgcgtcccggcacgaacatcgttggaggttccgtaaagcaggacttccagctggagaagcgttccgacaacgaactaattgccaaggctcagcaaatattcagtggagcagacgataatgtaaccgtcaagatgcgcatccacaatgaggagcgagcctttggttctactctgagctatcatattgcatggtaggattaagtctgttaacaaggtgatcataatctaatttgttataatctacagcaaatatggagaggctggcttgcccgctggcaagagcatcgacatcttcctggagggttccgctggtcagagcttctgcgcgttcctggcgcggggtgttaatgtgacattgaagggcgatgccaacgattatgtgggcaagggtctttgcggtggtaatgttgtcatcatgccacaagatacggttcccttcgaatcacatctcaatgttatcgtgggcaacgtttgcttgtatggagccactgagggaactgcctatttccgcggtattgcctccgaacgcttctgcgtacgaaactctggtgtaaccgccgttgttgaaggtgtgggcgatcacggatgtgaatacatgactggcggtgtagtggttatcctcggtcttacgggacgaaacttcgccgctggcatgtccggcggtattgcttatgtgtacgatttagatggttcctttaagcccaaggtaaacccggaaagtgtggaactcctgccgttggaaattgagaaggatgtgctgctcgtcaaggaactgttggctgatttcattgagaagacaggctcgaaggtggccaaggagttgcttgacaactgggccgaagcccagggcaagtttgtcaaggtcttcccgtatgaataccaaaaggctctaaaggacatggccgaacaacaagcagtggagcagcccctgaagtccgccatcgagaatggaaacggaaagcatgaaccgcacatcaaggacattgaggaagcgattcaggacgtggtgctcgagcagaagcgtgccgatcgcgtcctggacaagacccgtggctttgtaaagtacaagagggaatcggctccgtaccgagatgctggagagcgacagaaggattgggatgaagtctacaacttcccacatgtgcgcaagaacctcaaggttcaagcagctcgatgcatggaatgcggtgtgcccttctgtcagtccaactccacgggctgtccgctcggtaacatcattcccaagtggaacgacctcgttttccacggcgagtggcaggaggctctgcgtcaactgctgcagaccaacaacttcccggagttcactggtcgagtatgccccgctccctgcgagggttcctgcgttttgggcatctccgagccagctgtaacgatcaagaacatcgaatgcgccatcatcgatcatgccttcgagcagggctggattaagccagagattccggaagtgcgcactggcaaacgagttgcgattgtgggatcaggaccttccggcttggccgcctcgcagcagctgaaccgcgccggtcactttgtcaccgtttttgagcgcaacgatcgcgttggtggacttttgcagtatggtattcccacgatgaagctttccaaggaggtggtcaagcggcgggtagatctgatggctgacgagggtatcgagttccgcaccaatgtccatgtgggcaaggacctcaaggccgagcaactgctgcaggagtaagtataattgaacattttaggtgatctagctgatttttgacgattttgccatgattgggttaaatcagtcctcaagttttaatagaatatttagtctaaaacacctgtacttattactctcgaaattttcaacaggtatgatgccgtcctcctcaccactggctccacctggccacgtgacttgccgctcgccaaccgtgacctgaagggcattcactttgccatggaattcctggaggcgcagcagaagaagcagctgggcggaaagaatgatataatatctgccgctggcaagaatgtgatcatcatcggcggtggcgataccggatgcgattgcattgccacgtcgttgcgtcaaggcgccaagagtatcactacattcgagatccttccggaaccgccacagaagcgtgctcaggacaacccctggcctcagtggccgaaggtcttccgcgtggactacggtcacgaggaggtgaagctgaagtggggcaaagatccgcgccagtactgcaccaccaccaaggagttcgtgggcgaaaatggagccatcaagggcgtgaacaccgtcgaggttgagtggaccaagacggaaacgggccagtggcgcatgcaggaggtggccggttcggagaagtacttccccgcagaccttattctcctggccatgggcttcctgggtccggagaagacggtgccgagcgaactgggcctggagctggacccgcgcggcaacatcaaggcatccaacggacagtatggcacctcgaactccaaggtctttgcggcaggaggtcagttttatgtctactaagtaataggcttagtattaagagttaatcacatcaatcattgaatgatttctgtatctttgcataacaaaaatgttaatttatcttctgtcctttgcagattgccggcgtggccagtcgctggtcgtctgggccattaccgagggtcgccaggccgcacgacaggtcgattcctatctgaccggccgtcccagtgggcttccaggacctggtggcgtcatcgcgacatcctaaagaggatccacagaggcagccagagcagctaatatcaagttttgtgtgcgtgcatcgtccttagcctatagtgcgaaattctttaacgatttgtgatttttattttcgcgattttagtttagtttacactaaaaagacttgagttttttacacaccaaaccaaaacgaaacacgtttcatttagttttattttgatcgcaaagctggctgggaattgttagtggttcgtcgagatgccctccatatgatgatgatgatgatgatgatgatgcggcaggagtcaattaagagtgcaaactgaaattctgattgaagccaatcaatatgtatatcttaacggaaatcgaatatccaacaaaaaatctaaggacaataactagaaacttaccgttatcgttaaaatgaaaattaattgaacattaaatatttagaaaatgcattttttcaatgttgttttagcttgagttgcctaatctatgcaaacgaaatatatgaagtgaaaattgatatgctgatctccaccatcctatatacaatccataaatcgtatatacagaaagagaaatgtattaaactcggccaatatcgaaacgcattttttagatgttgtttttgtgttttgaactgcattcgaccgttgaccgcaaatgtacctaagtggctattgttaaaacaaatctgctctttggcagttgaatgtgcgaatacaaagaattacacaatttatacaaaacatatttaacccaaatgtatacccttatacagacatctctatataaatatatttatgtgcaagtatttgatgaaataaatattcaaattattaaaaagcatttctccgatgagttgatatttgtgttttgaatttggcatgggaaatatatttattaatagcttgaaaagagaggcaacgtctttttgaaattaaaaacctttgttatatgtataccttgtaatttaaaattattggtattttacgtaaagcgtataactttaaaggaatgagaaaccattgtaatgtagaaaatatttaataatatttctttaaattcattgtatggtaacttatgtagttaccgctttatttaattactaagtacaatatcttgttgttttatgccgtaagcttgttacgagcggagctgaagttccagtg

SEQ ID NO: 26816 - DNA, 3051 bp, DROSOPHILA
acggtctggatctggattttgtttggatgaaccttccgcagtgtgattgttcaggctgatggacagctccgcacaggattcgatgtggttgtggctgcactgctgggtgctgatgagtttggtttcagtactgctccattgatcgtcatgggctgcactatgatgcgcaagtgtcacttgaacacctgtcccgtgggcattgccacccaggatccggagctgcgcaagaagttcacgggtaaaccagagcatgttatcaacttcttcttcatgctggccgaggatattcgcaaaattatggctggattgggcattcgaaagttccaggatctgattggtcgcaccgatttattgcgcgtggccagtcaacgcgatgccaaggctagtaacctggacctcaagttgctcctgcagccagctttggaactgcgtcccggcacgaacatcgttggaggttccgtaaagcaggacttccagctggagaagcgttccgacaacgaactaattgccaaggctcagcaaatattcagtggagcagacgataatgtaaccgtcaagatgcgcatccacaatgaggagcgagcctttggttctactctgagctatcatattgcatgcaaatatggagaggctggcttgcccgctggcaagagcatcgacatcttcctggagggttccgctggtcagagcttctgcgcgttcctggcgcggggtgttaatgtgacattgaagggcgatgccaacgattatgtgggcaagggtctttgcggtggtaatgttgtcatcatgccacaagatacggttcccttcgaatcacatctcaatgttatcgtgggcaacgtttgcttgtatggagccactgagggaactgcctatttccgcggtattgcctccgaacgcttctgcgtacgaaactctggtgtaaccgccgttgttgaaggtgtgggcgatcacggatgtgaatacatgactggcggtgtagtggttatcctcggtcttacgggacgaaacttcgccgctggcatgtccggcggtattgcttatgtgtacgatttagatggttcctttaagcccaaggtaaacccggaaagtgtggaactcctgccgttggaaattgagaaggatgtgctgctcgtcaaggaactgttggctgatttcattgagaagacaggctcgaaggtggccaaggagttgcttgacaactgggccgaagcccagggcaagtttgtcaaggtcttcccgtatgaataccaaaaggctctaaaggacatggccgaacaacaagcagtggagcagcccctgaagtccgccatcgagaatggaaacggaaagcatgaaccgcacatcaaggacattgaggaagcgattcaggacgtggtgctcgagcagaagcgtgccgatcgcgtcctggacaagacccgtggctttgtaaagtacaagagggaatcggctccgtaccgagatgctggagagcgacagaaggattgggatgaagtctacaacttcccacatgtgcgcaagaacctcaaggttcaagcagctcgatgcatggaatgcggtgtgcccttctgtcagtccaactccacgggctgtccgctcggtaacatcattcccaagtggaacgacctcgttttccacggcgagtggcaggaggctctgcgtcaactgctgcagaccaacaacttcccggagttcactggtcgagtatgccccgctccctgcgagggttcctgcgttttgggcatctccgagccagctgtaacgatcaagaacatcgaatgcgccatcatcgatcatgccttcgagcagggctggattaagccagagattccggaagtgcgcactggcaaacgagttgcgattgtgggatcaggaccttccggcttggccgcctcgcagcagctgaaccgcgccggtcactttgtcaccgtttttgagcgcaacgatcgcgttggtggacttttgcagtatggtattcccacgatgaagctttccaaggaggtggtcaagcggcgggtagatctgatggctgacgagggtatcgagttccgcaccaatgtccatgtgggcaaggacctcaaggccgagcaactgctgcaggagtatgatgccgtcctcctcaccactggctccacctggccacgtgacttgccgctcgccaaccgtgacctgaagggcattcactttgccatggaattcctggaggcgcagcagaagaagcagctgggcggaaagaatgatataatatctgccgctggcaagaatgtgatcatcatcggcggtggcgataccggatgcgattgcattgccacgtcgttgcgtcaaggcgccaagagtatcactacattcgagatccttccggaaccgccacagaagcgtgctcaggacaacccctggcctcagtggccgaaggtcttccgcgtggactacggtcacgaggaggtgaagctgaagtggggcaaagatccgcgccagtactgcaccaccaccaaggagttcgtgggcgaaaatggagccatcaagggcgtgaacaccgtcgaggttgagtggaccaagacggaaacgggccagtggcgcatgcaggaggtggccggttcggagaagtacttccccgcagaccttattctcctggccatgggcttcctgggtccggagaagacggtgccgagcgaactgggcctggagctggacccgcgcggcaacatcaaggcatccaacggacagtatggcacctcgaactccaaggtctttgcggcaggagattgccggcgtggccagtcgctggtcgtctgggccattaccgagggtcgccaggccgcacgacaggtcgattcctatctgaccggccgtcccagtgggcttccaggacctggtggcgtcatcgcgacatcctaaagaggatccacagaggcagccagagcagctaatatcaagttttgtgtgcgtgcatcgtccttagcctatagtgcgaaattctttaacgatttgtgatttttattttcgcgattttagtttagtttacactaaaaagacttgagttttttacacacc

SEQ ID NO: 26817 - protein, 915 aa, DROSOPHILA; identical to SEQ ID NO: 26814

SEQ ID NO: 26818 - DNA, 2416 bp, DROSOPHILA
ccgtgccgattagctgagatttataatctgtataatctatatatataatgtatacaaatttaaaaccgatctggctggaattgagtacacctttgttttaaaacaaagctgaactattgactgttgcctgtgtaggagattaaaggaaatgagtgcttttcaaaatataataaattatcatcttttttttaaaatcaatacaatttacaaagcggctgatgcaattttatttcagctatttattatagattaaccatattctaacatgatttagttaattattccctgagttctaacttttttttaaatattatattgactgcgtataaaatttcatttaatggttacaagaagaatataacgctttctttgtagtaattgttaaaaagattactacagaatattattatttaaaaacatactcaatagtaagtttaatgaactcgtttttgaatgcaagtgtatacgtgttaatttaatttgtagcacgtgcagactttgtattcaaaatgttataagccggtttcaatttcactgagcacaacacatttctatattgaaatatatgcaaaactttgcaggtgcatgtgcttcaaatcgaggtaaaaaacaacaacaaactttgtttgtaaacaaaacaaaaaacaaattattcagttcttataaagaaagacaaatgattgaaagctatattgaactgcaactattttgaatacttctaagaactccaatggttttctctcgaacattaaagcaatcttagcttctacctgttggttcacataacacgcccataaacacgggactggaatttccagatttaaatacgcaaaacaaatgctattgaacgctcaactttctgtgttttcccaagcgctttcgattcgatgggggttatcagtggcctccgtccaaccaatgcacatttgctgctccaagattccaggctgagctatataagatccaatcgaactagccaagagcatcagttgaattcaatcgattgcttgtgcatttagcaaatcaaagccacaacaaccaaaccagaatcaatatgaagttcttctcagtcgtcaccgtctttgtgttcggtctgctggctctggccaacggttagtaatactatattttatagctatttgattactttataaattatttatttcttccgcagctgttcccctgtcgcccgatccaggaaatgtggtaatcaacggggactgcaaatactgcaatgtgcacggtggaaagtaggaaagtaggaaagtaggaaagtactcgccttaatttcgaagatgggccaaaacttacctcaaatccaaagcaccatatttatactctcactcttgtactaaaatgaaaactagtagtaaaaaatacatcgccaattacaaataaaatggtgaaaaaacaaaactattttcgtatttttaataccttgcagctaatataaacaagtagctaaacaagaaatgttcactaaagcatttgattaacacaatttcaatgcaaattaaagccaaatatatacaaatatgtatatatacatattaaatatgatctttaaatacttgctattgaaaaaactttctaaaggctccaaaaggcacgcctcttatgatggacattactcatacgcactgttgcacgcatattaaccttttcttaatttatttgtatatactatactctaaattcctatagccttaaatgacgaaaaataatgttataattttatttttgatgaaaactatataattatttcagaatatagataagaaaacttgttatttaataaaaataaatgaaactgtatttaaaattcgaaaaaattaccattaggtgtcattctaattttaaataattttggtatttagtaattgaaagaagtaagaatttaattatagaaataattgtttttcaaaatacttaaataaagttgagctttatgcctgaatttcattttaaattatttacatagccatattgactttcttacaaaaaaaaactatgactccctgccaatccaaaaccataatctttccaagtaccttggctaaccttttttgcataaaacttgctaataaactgtgtgctaatatgacagtttattgattcggcggaattgaacgcattaaaacgggttcgcaatactgggaaaaacgaatcgcatggggcgccgccaagtcaaatggaatcaggtttgcaatctggccaccttgcacgtgaatagaatcgcgttctggaccagcttggatttccctcttccaatcgcgcagctcggggctatcagtctgcacttgtttacgctcaatttcattgagaacgtcgcaccgctgcactcgggaatttctcgatggaggtgttggctttggcttgagcttgggagaatcccaatctcggccagacttttccc

SEQ ID NO: 26819 - DNA, 354 bp, DROSOPHILA
cgattgcttgtgcatttagcaaatcaaagccacaacaaccaaaccagaatcaatatgaagttcttctcagtcgtcaccgtctttgtgttcggtctgctggctctggccaacgctgttcccctgtcgcccgatccaggaaatgtggtaatcaacggggactgcaaatactgcaatgtgcacggtggaaagtaggaaagtaggaaagtaggaaagtactcgccttaatttcgaagatgggccaaaacttacctcaaatccaaagcaccatatttatactctcactcttgtactaaaatgaaaactagtagtaaaaaatacatcgccaattacaaataaaatggtgaaaaaacaaaa

SEQ ID NO: 26820 - protein, 45 aa, DROSOPHILA
MKFFSVVTVFVFGLLALANAVPLSPDPGNVVINGDCKYCNVHGGK

SEQ ID NO: 26821 - DNA, 6028 bp, DROSOPHILA
ctggtggcctcgcaaaagagtgcccaaaacctgttccccggctacggcgtacgctttattgatccacctaccttcaagcccctgcaattcctgcacacctcggcactcctaatccgggacattgcttttagtgactcacagcacttgctcactgtggccagtcgggaactaaagatcaagatattcgacataagaacacggctttgctcgtctatgttcaccgctcatgacaagatgctgtggtcttgcgccctggatcgcaacgagcgcgaacactttctatacggcggagatctgcgaggtggagtttatatctacgacttgcggtttcccgagaacattctctgcgagttccaagccgaaggtgagtgtgatgaatatgcaaacgttaatacccgcttaaatcatttacttattccctacagtgaacttaagtcctgtgatacacatagctcctgtgcaacccaataagatttttaccagcggtggcttcctggtctgccaacttacggcccttacattctacgagtacgctgcggccagtgatacggctgtgcccactcggctaaatgtggagggaccctttctgtccatgcaatacgatgccgtgcaggacacggtgctcatatcggcacgatccaatccgaatttcccccagtctcgcttcatacttggtcgaatggacaagattgacggaacgccggtgctgaaggtcaaggccaccatatatggatcgaaggccacaccggttatgacgcgaccgacccaactggccgtcgaggataataccttagtggttggctatctccaggatagtaagcagctgatgatgcatgatgtgcggcgggaggagcgagtgcaaacaatgccggtcaacgaggtgatctacgacatctgccctgtggctacccaggccggatcctatttggccgccctcaccgacaataagtgtagagtttacaaagtgaacagttccatgcgatgatatatgtatgtgtgcattagttttccgtgaaaataaccaaaaaaaattttcttttagctaatttctgtgaaatatgtgactactgatataaacgagcttttaagctaagttattagttataaatttttcattatttccgtttattaaacatttgtcaaccttaaggttcgcgtacaagattaatctgaacataattctatattgtgtgtactccatgtttttgtttttgatttttgatttcaatttgtgaatgctcaaagtctgttgtggataagtcttgtataaagcaatagaaaatgttggttcgattaataatatacatataaagctatacaaaaatgttttatccatacaatatccgatttatatatgtatatgcgtaattatagatactcctaaatgaaatgtggaaatgaacgaatgtttaaatagatgtctaaattcattcctgacagtctcgaaatgtttgcaacacttcaaacttttggaaaagtccttcgatctcagacttgcaacgagtctgacatttccaagcccaagtaaatgtttatgaattcggttttcttctctcttgagtcttgagttttgtaaaattctatcaaaaaatgttcgtcgttggtcgtttgctggttttttctttttttttcgtaaatcaaaaacctctgtggcatttactcctataaagttgtatatggtttatagtattgtatatagattagtgtgttgaatagttgaaagacgcagatctatactttttaagtataattttgtatattttgtgatgttttatttgtgtttttgctgtttgtgtctgtgtgtttatgtgttcgttaatgttaagattagagaatacgtactcgtatgaagaaacgtatggagtcagcataacttaagactttcaacttaaactttaagagaactaaatatccgttacacatatatttatatatatataaacattagattaacttatgctaaactaaacacgaaacgaagtcgggaagtattaagctttgattaggtaatcggttcgtattaaatttaaagaaatcgattattacttaaaaatccaatggctaaagtatttttaaattttcgaaatattccagataactttaagtttaatagaaaccgaaggcgcaacaaagccgaatgagataatcgatcccaggcggaccaatacaggtgaaaaagtttagaagcgagggcctatctgttgggattttggtttgcttaatcgacgcgcgcataccgcggcacaatatccttgctgatccagtagttgcagggcaagtagtcctcttccggctgcgcatcctggccaacattgatgacccggcggttctggacaaacgactgcaccgtgccgtgcgagacatagtagtagaacagctgctgcatggccgaaacgaagcggcgctgctctacggtgtgcggctcatagcggccgagaatggcctggacatcggcgtccaccgtggccagctgatcgggtccctcgccttgggtgacaacatagaacggcacactgggctgctgtctcgcattcgtcagcagcgggcaaacgctgcgaatgtccgaaatgatagaaaccagcgacgcatagctgctggcgttgtacttctcgataacctcgtcggtgaggcccaatgctccaatctgggagttttccagataggcacgcacctcctctcgcgtccagttcgcatgcaattcgcgcagtttctcggtgtgcgcctcatgcgccgtggcgcccataaccagcaccggcttgtcgttggcctgttcgcgcttccaggtatcggaaggatgttcaaagaccacatctccatcgagaaccaaccattcgtgacggctaccgctggcattcgcctcctgcggctgcggcagatccacggggaagtgcagccaggtgtcgggagtggcggcccaaagtcgttcgctggacgcttcacgcaggcactggatatcagcacactcgagggtggccatcagctgctcgttttgtttaccagactcgctcaatggtttaccaggcagaattgctgatccagatgatgcccaggccctggtgtacagacccttgaccttttgtgagttaactagaagagtcaccagagtggctccggcccgatgacccagcagggtgacggattgcgggtcgccaccaaaatgtacgatgttcaacttgatccagttcagcacggcaatgatgtcggtgagcgcatagttgcccgaagttggcgggtgtgcctccttggtcagagcgtcgagggctaggaagccgaagacacccaaacggaaattgggacgcacaaagatcacatcgtgcgatcgagaatagcgagccgatggacggagaatacccggcgaaggaccagccaaagattctgctccgatcaggacgaccacaggcaaggggttattgtaccgcacatggggagtaaccacgtcaaggtatagacaatcctcgtcgccaactgtggtgccattgcccaatcgctgcgtgcacaccacactgctgttatgggtttgcagtgtatcattccagcacatattgatgtcatcaatcagttcagccggcttccatctcagtctgtctacgggtggctttgcatacggaatgccacggaaggcaaaggctccatcttccttaacgccctccacaggtccgcaccccgtcactgccattatgtagcgtccttcccgcagcggcggcgaggtcaaagtctcgtgggttagtacataaccaatcacgcccaacaggagcacaaatagcaggatgccaaacacaatcagggcatcgtccacactgcacttgtagccacgcagacgggttagcaaggagacgggtcggttttgctcctcctcctcggcggctagtttttcctccgccgccagcttctcatcctttagctcgccctttagttcctcggtaccgttggtcttgacgggagcccgatccactgtgtcttgatccttaagggaatcatcgagggtctccatcgaggccagaccggccttgcccaagcccagctccacatcatcgttgctcttctttttcggtatcatgttagcgattggcagcttgatggcgttcaaaagtccacgctttggtggtgcatcggaggcatcttcagcgggcgttgcttcagctgtggcttctgcaaaaatggaagcaaattttttagagtttgatttacaaaacttattttgatttaacttaccagacttggcatccgcgtcaccgttgaccagctgcttcttttccttttcggcggatggcttgcgggcaaagaagctgcgcaggcgttctcccagtcctgggcgagatttctgttcgtccttgccggaaccggtggcggcatctccattggcttccttatccttatcctcttccttctccttttcgagcagctcgccctcggccccatcaccatctgccttcggcttgttcttcatgaagaaaccaggcagtttgagacctccgatcggtatctttttgggcttgacctcgcgctcctccttgcttatctttttgtcatcagcgctgtctggctttgtgccattctcggcgggaatatcgataatctcttctccattgcctgatttggatttcgctaattcagcatcgtcgatctttttctcggccactggtgaggatttcttgccggcatttggagatgcgggcttggaggtctgtggactgggtgtcttctccttggcgtcctcttttttgtccaacattttgtccgtttccttgggctcctctagcgcctcttgctgggcggctgtcgtctcagtgggcggggtttccttctcctcgagttcgcccatattgtcgatgaatcaagatcgtttagagaactctgcgagaattctgtaaaagtcaaggaaaagcctttgattagtttatgttctagattgaatgttcactctaggataatataccttgacttagttgtgcaaaaaaaaaataactaagttacactttggttctggttgcaagtgacttttttaaggatctgcgatctaggatctatcacgatcgatggctgaaatgcttctagctgccgctttcagccgcacaggatttttatacgattccggcagaaattcctaacctaaaggacaagcagctgatcctggcaaatggcaacgccggctgctcgctctccttttgtccttgcacaattgcttgagggtttccctccctttctctacctgaatcctctagctttgaatcctacctggaaaatgttgtcccattcaggtaggccgcggaaaattcgctcgtatttccctcaacatatcctagcaatatggcactcttttcggggcgggaagaccacaaatttattaagcgagcagatccagctgcgtacccatcagtttttgatccgatccccgtaccagattccttccttcttaaacttttcttgagcatccctactttttgctgtttggtacgtgcgcctgttcgcttttcacgcgtcccacattcttggaaaaacgctcttaattagcgaaaaactatgaaaccaacgtggaaacatccaaggacatttgacgtgtccttttgcatcattatgccaaaaacgccgctcgcagcgggattgcagtagcaaatcacgtccagactaattgaccgcaccagaaagtgcgagaagtcatgagaattttcttttttaaaaaacatcttcccgactttttttaatgagccgcacattagattgccattagccaaaagagacgaaaaaatcgtgataatttaagaaacatttgggtttctagaaggaattgactccactttaagtctcttctaaatgtataatgaaatgtattataaataatatgattgcctcattttaaaatgggaaaaccatcgaccatctcattatttgcttttatttaaagattaactatattttttagagaccctaaatatgattgacttgcatcgcttatcactccaagtaaaataggctcaattattaatctcatttttgtccagctgacccattgaatgtatatagctccatg

SEQ ID NO: 26822 - DNA, 3894 bp, DROSOPHILA
atagatcctagatcgcagatccttaaaaaagtcacttgcaaccagaaccaaagtgtaacttagttattttttttttgcacaactaagtcaagaattctcgcagagttctctaaacgatcttgattcatcgacaatatgggcgaactcgaggagaaggaaaccccgcccactgagacgacagccgcccagcaagaggcgctagaggagcccaaggaaacggacaaaatgttggacaaaaaagaggacgccaaggagaagacacccagtccacagacctccaagcccgcatctccaaatgccggcaagaaatcctcaccagtggccgagaaaaagatcgacgatgctgaattagcgaaatccaaatcaggcaatggagaagagattatcgatattcccgccgagaatggcacaaagccagacagcgctgatgacaaaaagataagcaaggaggagcgcgaggtcaagcccaaaaagataccgatcggaggtctcaaactgcctggtttcttcatgaagaacaagccgaaggcagatggtgatggggccgagggcgagctgctcgaaaaggagaaggaagaggataaggataaggaagccaatggagatgccgccaccggttccggcaaggacgaacagaaatctcgcccaggactgggagaacgcctgcgcagcttctttgcccgcaagccatccgccgaaaaggaaaagaagcagctggtcaacggtgacgcggatgccaagtctgaagccacagctgaagcaacgcccgctgaagatgcctccgatgcaccaccaaagcgtggacttttgaacgccatcaagctgccaatcgctaacatgataccgaaaaagaagagcaacgatgatgtggagctgggcttgggcaaggccggtctggcctcgatggagaccctcgatgattcccttaaggatcaagacacagtggatcgggctcccgtcaagaccaacggtaccgaggaactaaagggcgagctaaaggatgagaagctggcggcggaggaaaaactagccgccgaggaggaggagcaaaaccgacccgtctccttgctaacccgtctgcgtggctacaagtgcagtgtggacgatgccctgattgtgtttggcatcctgctatttgtgctcctgttgggcgtgattggttatgtactaacccacgagactttgacctcgccgccgctgcgggaaggacgctacataatggcagtgacggggtgcggacctgtggagggcgttaaggaagatggagcctttgccttccgtggcattccgtatgcaaagccacccgtagacagactgagatggaagccggctgaactgattgatgacatcaatatgtgctggaatgatacactgcaaacccataacagcagtgtggtgtgcacgcagcgattgggcaatggcaccacagttggcgacgaggattgtctataccttgacgtggttactccccatgtgcggtacaataaccccttgcctgtggtcgtcctgatcggagcagaatctttggctggtccttcgccgggtattctccgtccatcggctcgctattctcgatcgcacgatgtgatctttgtgcgtcccaatttccgtttgggtgtcttcggcttcctagccctcgacgctctgaccaaggaggcacacccgccaacttcgggcaactatgcgctcaccgacatcattgccgtgctgaactggatcaagttgaacatcgtacattttggtggcgacccgcaatccgtcaccctgctgggtcatcgggccggagccactctggtgactcttctagttaactcacaaaaggtcaagggtctgtacaccagggcctgggcatcatctggatcagcaattctgcctggtaaaccattgagcgagtctggtaaacaaaacgagcagctgatggccaccctcgagtgtgctgatatccagtgcctgcgtgaagcgtccagcgaacgactttgggccgccactcccgacacctggctgcacttccccgtggatctgccgcagccgcaggaggcgaatgccagcggtagccgtcacgaatggttggttctcgatggagatgtggtctttgaacatccttccgatacctggaagcgcgaacaggccaacgacaagccggtgctggttatgggcgccacggcgcatgaggcgcacaccgagaaactgcgcgaattgcatgcgaactggacgcgagaggaggtgcgtgcctatctggaaaactcccagattggagcattgggcctcaccgacgaggttatcgagaagtacaacgccagcagctatgcgtcgctggtttctatcatttcggacattcgcagcgtttgcccgctgctgacgaatgcgagacagcagcccagtgtgccgttctatgttgtcacccaaggcgagggacccgatcagctggccacggtggacgccgatgtccaggccattctcggccgctatgagccgcacaccgtagagcagcgccgcttcgtttcggccatgcagcagctgttctactactatgtctcgcacggcacggtgcagtcgtttgtccagaaccgccgggtcatcaatgttggccaggatgcgcagccggaagaggactacttgccctgcaactactggatcagcaaggatattgtgccgcggtatgcgcgcgtcgattaagcaaaccaaaatcccaacagataggccctcgcttctaaactttttcacctgtattggtccgcctgggatcgattatctcattcggctttgttgcgccttcggtttctattaaacttaaagttatctggaatatttcgaaaatttaaaaatactttagccattggatttttaagtaataatcgatttctttaaatttaatacgaaccgattacctaatcaaagcttaatacttcccgacttcgtttcgtgtttagtttagcataagttaatctaatgtttatatatatataaatatatgtgtaacggatatttagttctcttaaagtttaagttgaaagtcttaagttatgctgactccatacgtttcttcatacgagtacgtattctctaatcttaacattaacgaacacataaacacacagacacaaacagcaaaaacacaaataaaacatcacaaaatatacaaaattatacttaaaaagtatagatctgcgtctttcaactattcaacacactaatctatatacaatactataaaccatatacaactttataggagtaaatgccacagaggtttttgatttacgaaaaaaaaagaaaaaaccagcaaacgaccaacgacgaacattttttgatagaattttacaaaactcaagactcaagagagaagaaaaccgaattcataaacatttacttgggcttggaaatgtcagactcgttgcaagtctgagatcgaaggacttttccaaaagtttgaagtgttgcaaacatttcgagactgtcaggaatgaatttagacatctatttaaacattcgttcatttccacatttcatttaggagtatctataattacgcatatacatatataaatcggatattgtatggataaaacatttttgtatagctttatatgtatattattaatcgaaccaacattttctattgctttatacaagacttatccacaacagactttgagcattcacaaattgaaatcaaaaatcaaaaacaaaaacatggagtacacacaatatagaattatgttcagattaatcttgtacgcgaaccttaaggttgacaaatgtttaataaacggaaataatgaaaaatttataactaataacttagcttaaaagctcgtttatatcagtagtcacatatttcacagaaattagctaaaagaaaattttttttggttattttcacggaaaactaat

SEQ ID NO: 26823 - protein, 846 aa, DROSOPHILA; identical to SEQ ID NO: 20592

SEQ ID NO: 26824 - DNA, 2312 bp, DROSOPHILA
agaatacccattgtctcatttcatctgcataatttgttcgacaacttttacaacttttacttaattatatttatatatttatataaaacttaaaacaagctatttcttaaaaaatgcttcttaccaatgattctaccgatttacctgaaattaataattaataattaaaataataatttatataaaattcttataaaaaaaaagtctgaaatatgcgtacttttaccttctttgaagacttcatcttaagtctaccgattaaatgcttgtgttttcccaaatacacggcttatcaccaattcgcgtggctctctaatccgacgctcgactatataagatcggctccaactagccgagatcatcagttcaatccaatcaattgcccagtgcactcagtatccaaaaccggagaaatccatccagaatcaatatgaaattcttctcagtcgtcaccgtttttgtgctcggtctgctggctgtggccaatggtgagtaaaactaattgaaattgcctatttgatgatttaactaattttattattattattattttccagctgttccactgtcgcccgatccaggaaatgtgatcatcaatggcgattgcagggtgtgcaatgtccacggtggcaagtaggaagtttcaacccaaggattcgaaaaaggacatagtctacaaactagaacacaaaagctgttaccattttttactggaataatacatagaattaaaaatgcaaatcaaagaaatacatacaaatagaggattctatttcctttctaactaaacaaaagatgttttttatttttagtattttcgaattaatcaaaacaaaaagtgtaaatctatatttcccacgaaaaaaatattttgtcagcagctatcaatcaatcgctctcatctcatatggcacttgattcactcctagatccgactatctgctatataagatcggtttcccttaatcgagagcatcagttgtagttgatcgtttgtccggtgtgttcagcttataaaaccggatctattaattgaaaatcaatatgcgattctttgcaatcgtcactgtctttgtgcttggtcttctggctttggccaatggtgtgtagaacctacaaagattaattagttgattacttaagtaaataatcatcttattcaacagctattccgttgtcacccgatccaggaaatgttatcatcaatggcgactgtgtgaattgcaatgttcgtggtggcaaatagaaatttttaatcaaaacttatatttagcatcataataaaaatgtaataaaatgaaagctatattgtaaattgtatttaaatcgcaatcatttatagagactataagaaaaaattcgaatattggtttacagatgattcctccaccacataagtttaaacaatcttcgttttaaaaaaaagataatttcttagtgtttcaataatttattgactttatccgcgaatattgcaaccgacgcaatcactattgcgcaccagtgttccgccgggatagccactggaatcgatggtggttatgccagatcctgcccatcctccgcctccaccccttccgccagatccgcccaaatcgatgtactgaccaccgcgtgactgacgcttcgaacgcctgccaatgtattgagttcctccagccgattgatgcagtgcccagtcaccggtcaggtcatcatcatcatcgtcatcccatgatgggcgaccgcgggctggagatgatctcgagcttggccgggctgtcgtcctacctccacttccttttccacttgttggcttgtgcgtggtggtagtcgtttgatcatgggagcagtttacgcacttgccgttgatggtcaccttgccacctaggtagaagaacggttaatattcaagttaaaaccttttggccttcaaaccgaccgtggacaaaggccaacgtggccaagatcaaaagcgccaataacgtcaggctcttcattatgattccctctaagccgattgatcggcgtcgccttctttttatagccgtgccgattagctgagatttataatctgtataatctatatatataatgtatacaaatttaaaaccgatctggctggaattgagtacacctttgttttaaaacaaagctgaactattgactgttgcctgtgtaggagattaaaggaaatgagtgcttttcaaaatataataaattatcatcttttttttaaaatcaatacaatttacaaagcggctgatgcaattttatttcagctatttattatagattaaccatattctaacatgatttagttaattattccc

SEQ ID NO: 26825 - DNA, 248 bp, DROSOPHILA
gtgtgttcagcttataaaaccggatctattaattgaaaatcaatatgcgattctttgcaatcgtcactgtctttgtgcttggtcttctggctttggccaatgctattccgttgtcacccgatccaggaaatgttatcatcaatggcgactgtgtgaattgcaatgttcgtggtggcaaatagaaatttttaatcaaaacttatatttagcatcataataaaaatgtaataaaatgaaagctatattgt

SEQ ID NO: 26826 - protein, 45 aa, DROSOPHILA
MRFFAIVTVFVLGLLALANAIPLSPDPGNVIINGDCVNCNVRGGK

SEQ ID NO: 26827 - DNA, 2409 bp, DROSOPHILA
accgttccctggcccggcctacccgtcctgtaggattggccaccgactacgacgttttccgccaccggcggactgcaatcctggcatactccgccgataatcacatttccggctgcggaataataaaataataagcgaaattgtgacattgaaaggcgcgcccatctgattcttacccgtagcctgggaagccaggacaacgaaaattgcaaaggacagaatcaggcacttcattctcaatctgcgtgcaagacgaatctattcgagacacatggaatctgtgagcttttaagcattcccattcgctttgttatgaaaaccagattgcagtggaggcacaaccaagggtggataggtgcgggattcgcccccagaaaccagttcaatttacagataactcttgacaggggttttccacaagcttcttactttgcttattgctagctagaaatcgaatgaaagcttatttgtaaaatatagaatttttagattgttttgatttttacattctagctcatgtttatcatgtttgtgataaaatatacagatttttatgccatcaataatttaatgtcttcggttatcattaaatttgcttttcttgacaattatatataaatataagaatacccattgtctcatttcatctgcataatttgttcgacaacttttacaacttttacttaattatatttatatatttatataaaacttaaaacaagctatttcttaaaaaatgcttcttaccaatgattctaccgatttacctgaaattaataattaataattaaaataataatttatataaaattcttataaaaaaaaagtctgaaatatgcgtacttttaccttctttgaagacttcatcttaagtctaccgattaaatgcttgtgttttcccaaatacacggcttatcaccaattcgcgtggctctctaatccgacgctcgactatataagatcggctccaactagccgagatcatcagttcaatccaatcaattgcccagtgcactcagtatccaaaaccggagaaatccatccagaatcaatatgaaattcttctcagtcgtcaccgtttttgtgctcggtctgctggctgtggccaatggtgagtaaaactaattgaaattgcctatttgatgatttaactaattttattattattattattttccagctgttccactgtcgcccgatccaggaaatgtgatcatcaatggcgattgcagggtgtgcaatgtccacggtggcaagtaggaagtttcaacccaaggattcgaaaaaggacatagtctacaaactagaacacaaaagctgttaccattttttactggaataatacatagaattaaaaatgcaaatcaaagaaatacatacaaatagaggattctatttcctttctaactaaacaaaagatgttttttatttttagtattttcgaattaatcaaaacaaaaagtgtaaatctatatttcccacgaaaaaaatattttgtcagcagctatcaatcaatcgctctcatctcatatggcacttgattcactcctagatccgactatctgctatataagatcggtttcccttaatcgagagcatcagttgtagttgatcgtttgtccggtgtgttcagcttataaaaccggatctattaattgaaaatcaatatgcgattctttgcaatcgtcactgtctttgtgcttggtcttctggctttggccaatggtgtgtagaacctacaaagattaattagttgattacttaagtaaataatcatcttattcaacagctattccgttgtcacccgatccaggaaatgttatcatcaatggcgactgtgtgaattgcaatgttcgtggtggcaaatagaaatttttaatcaaaacttatatttagcatcataataaaaatgtaataaaatgaaagctatattgtaaattgtatttaaatcgcaatcatttatagagactataagaaaaaattcgaatattggtttacagatgattcctccaccacataagtttaaacaatcttcgttttaaaaaaaagataatttcttagtgtttcaataatttattgactttatccgcgaatattgcaaccgacgcaatcactattgcgcaccagtgttccgccgggatagccactggaatcgatggtggttatgccagatcctgcccatcctccgcctccaccccttccgccagatccgcccaaatcgatgtactgaccaccgcgtgactgacgcttcgaacgcctgccaatgtattgagttcctccagccgattgatgcagtgcccagtcaccggtcaggtcatcatcatcatcgtcatcccatgatgggcgaccgcgggctggagatgatctcgagcttggccgggctgtcgtcctacctccacttccttttcc

SEQ ID NO: 26828 - DNA, 340 bp, DROSOPHILA
aattgcccagtgcactcagtatccaaaaccggagaaatccatccagaatcaatatgaaattcttctcagtcgtcaccgtttttgtgctcggtctgctggctgtggccaatgctgttccactgtcgcccgatccaggaaatgtgatcatcaatggcgattgcagggtgtgcaatgtccacggtggcaagtaggaagtttcaacccaaggattcgaaaaaggacatagtctacaaactagaacacaaaagctgttaccattttttactggaataatacatagaattaaaaatgcaaatcaaagaaatacatacaaatagaggattctatttcctttctaact

SEQ ID NO: 26829 - protein, 45 aa, DROSOPHILA
MKFFSVVTVFVLGLLAVANAVPLSPDPGNVIINGDCRVCNVHGGK

SEQ ID NO: 26830 - DNA, 4062 bp, DROSOPHILA
gatccagccaaccagtgcagtgttgattgtgttgccgtgtggacgctttttggtgcgttggtcgtgggctgaaatgcaaattaccagcgaaaaaagctgtaaaagcttgcaatagccactgtgatattaaataaaaaaattattttaaaattttaaatgattatgttgcatcggcccaggccaacttccaaaggcaaaaacagcagcctgcactagaaatgtgcttttaaacgtgtgttgtgattataaatatattaaattaaatatacctggtgacaataataagtgtctagatatgtgcctcattttctagcactttcagatattttttaattaccaggctttattatcacataactacacaaaaaaaaagcagtgaagaagcacattccacaaattattaaacatacaaattaatatgcacttttttttatttatttataggtgctacacatttgcggattaacacagtgcttaatttaaatcatttcatatatagctaatctatttttttttctattttctagatggctcaggttatgagttattgtaaaacggttttggttaaaaaaaaaaaaaactcacccatcacaaaaaaccatcaacacacatcagccacaccatcaacatccatcatcaaacaaaaatcaatgtgttcatttgccgagcttttcaattttatttgtttatgccaaagatgtgtttaccgaattaataaaattttttacaatgtgtacttttatttgtttaattttaaaaaaatgcgaaattatgcgttttgctttacttatttatttacttgtagtgtattttgcctatttattgcatgccattcatctaacaacattttttgccctaatcccagcagtcccagtgttaaaacttgctttttcatttgacgcagctcaatccaaacgattgacatagaccaaagcgaaggaacttcgaacggagtgacttgaacgaaaaaacccagaaactaaattaaccaatcgcaaccatgtttccaattgcagatttgagcaggaaggagaacaccgcacccgatgtggcgtccaccgccgagattcagcgcagtttccagcgcagcattctcaatggcaagcagcgggatgagcagaagatccagttgcccggatctcggcgcaagcgcttgtccgtcaccgaggtctccgacatgctgttcgagttctacaagaccaaatcggccaaggtgcccaaggcggagcagccgcaccgtcaggtctcgccgacatccggtgagatcctagatccctcgaccatttcggccattgccgtttatggtacggcctccgagacggcctcaaaaaacttgaatgctgatgaagtgatgcgagttcagaacgccacagctacgcgtgtggtgggtgctgccgctggcgccgccgcctcatttcatccaaggcccaaatacaccctgaagacagcggcatcgtccacggagcataccacggccatacccacttcggtgctggtggccaatagtgcggcggctctgactccgaaaccgcaggcagccgtaattgccgaggccctgatgcgaaatggactgcacaacttccagcagcagttgcgtgcccaggagatactgcgccaacagacaccccatcgtcgcatcaaggaggaaaacgatgtcgaaatcgctgggggcgacataacacccactaaaattctggagaacctcttgcgaaagcagcaagagcgcgacctccgccactctgagtgtgagaacgaaccgggctattcgaccgaggacgacgaagagggtcgctatcatgccttcgatgacatacacctgatggagcaaagcggtggcaagttcggcaacaactccggcatgggcatgttcaatgccaatgcccatggaggatcggccagctcgattctagatgcccatcaggccttccgcaacctggagtttacactcagcgattatggcggcagcagcagcaatggcagcaccaccagtcccaatggcatcggcctggatggcgaacccgtatacgagtgccgtcactgcggcaagaagtatcgctggaagtccacactccggcgccacgagaatgtcgagtgtggcggcaaggagccatcgcatcagtgtccctactgcccctacaagtcgaaacagcgcggcaatctcggtgtccatgtgaggaagcaccacaccgatctgccccagctgcccagcaagaggagatcgaagtactcgatgaatcgcgaaaacgggatgagcggctccatgtccgatgactcgcagggcaagctgatcatcgacttcaatgggaagggagagcttgaaaccaaataaatttgtacggggaccgagtgatgcttccatttgatatacaatatattttacgtctggtgtcttgttttgtccattggatttgtggaaatttatttcttgtcattcatgtgtcatcccaaatatttaatgtttacttgtagtaatttatgtaatgtaagcaaatgcaagccaatctaatcaagcatataatcaaattagtcttaaagccttttttctaacgatgcatttatgcgttaaagcatcagttaatatctcttaaattgtataaaatgatcattcaccaaatgtcaattttatacttacgattaagtgtgcaaaatattatcaaacaacactcaaatattttctaaggtctctactatttaagatatcacgatgttgtccagaaaaaaagtatttagaaagggttcgcctcgccgtgtgcgtatttccaaaaagttcccagcatcttgcccagaaaccctctgccatccaacgatctcttgacttggcttgattaagctactaagaccaaaacttttggtaactactcgataagctcaatcgatgccatttacaatgatatacattatgactgaattagttaagagaattgcattgaactgacaactgaacaaaccattaattaaccaattgaaaaccaactattcctcgccctgaagacattcgtttcatatatttatggactttaagactgagtttattgtatcttaaaaattattaacccatgaccaaaaaaaaaacaaaaaaattggaacattgtacgattcccaaaccaaaaaccaaacacttattatgcctaaatgttttaactgatattaatgtttgtatcttaccattaagcttgtgtgccgtcacattgaatcgcccgatattttatgattgtatacttaataagattataattcctaactgcatatcacgtggtcttcaccgatcgacgaagacacgattacgaactgtgggcagtgtgactgctaaaataagacatgattttataatgaacttttcatatacaatgtttacattttaaataaaacgcagatatcttttaatttttaaaaatacgtgtgtatagtttattattaggcgcaagagactttgtactatgattattgagtcgaactgcgttaacaaatacttttgaaatttgattctgataccaggagattgcaatatgactgtggagtgattcatttacatattaaaaagctaacaccgttgaaaatttaagaaaaatgcaccagtcgcgaaatttatgatcatccactgttggctgtagtgtgtgtgtgtgtgtgtgcaagactgtggagatgcattcccatggagcggttgcattgaatcattctttcaatacgagcagccaatggccacggtgaggaagtcctcgaacccaatggtgatggttccattctgctgggtgtcgcgctgcctgaaggcctccgtgaaacgctgcacctgcacgcagagcactatgaactgatccacggacacctctttgtggccctgggggtcgctcttcttcaccaggaagtttatgaattcgggcgagaatcgaaagcccatctgggtgaaggctgccaacaagtttggtaattagtgtaaaaggccataaaggaattggagattcagttgttgtgttagcttaccttgggtcagctcctgttcctcgatatgtccagaggagtcctgatcgtaggtcttgaagacttgctgcaacagtgatacaatga

SEQ ID NO: 26831 - DNA, 2062 bp, DROSOPHILA
atgtttccaattgcagatttgagcaggaaggagaacaccgcacccgatgtggcgtccaccgccgagattcagcgcagtttccagcgcagcattctcaatggcaagcagcgggatgagcagaagatccagttgcccggatctcggcgcaagcgcttgtccgtcaccgaggtctccgacatgctgttcgagttctacaagaccaaatcggccaaggtgcccaaggcggagcagccgcaccgtcaggtctcgccgacatccggtgagatcctagatccctcgaccatttcggccattgccgtttatggtacggcctccgagacggcctcaaaaaacttgaatgctgatgaagtgatgcgagttcagaacgccacagctacgcgtgtggtgggtgctgccgctggcgccgccgcctcatttcatccaaggcccaaatacaccctgaagacagcggcatcgtccacggagcataccacggccatacccacttcggtgctggtggccaatagtgcggcggctctgactccgaaaccgcaggcagccgtaattgccgaggccctgatgcgaaatggactgcacaacttccagcagcagttgcgtgcccaggagatactgcgccaacagacaccccatcgtcgcatcaaggaggaaaacgatgtcgaaatcgctgggggcgacataacacccactaaaattctggagaacctcttgcgaaagcagcaagagcgcgacctccgccactctgagtgtgagaacgaaccgggctattcgaccgaggacgacgaagagggtcgctatcatgccttcgatgacatacacctgatggagcaaagcggtggcaagttcggcaacaactccggcatgggcatgttcaatgccaatgcccatggaggatcggccagctcgattctagatgcccatcaggccttccgcaacctggagtttacactcagcgattatggcggcagcagcagcaatggcagcaccaccagtcccaatggcatcggcctggatggcgaacccgtatacgagtgccgtcactgcggcaagaagtatcgctggaagtccacactccggcgccacgagaatgtcgagtgtggcggcaaggagccatcgcatcagtgtccctactgcccctacaagtcgaaacagcgcggcaatctcggtgtccatgtgaggaagcaccacaccgatctgccccagctgcccagcaagaggagatcgaagtactcgatgaatcgcgaaaacgggatgagcggctccatgtccgatgactcgcagggcaagctgatcatcgacttcaatgggaagggagagcttgaaaccaaataaatttgtacggggaccgagtgatgcttccatttgatatacaatatattttacgtctggtgtcttgttttgtccattggatttgtggaaatttatttcttgtcattcatgtgtcatcccaaatatttaatgtttacttgtagtaatttatgtaatgtaagcaaatgcaagccaatctaatcaagcatataatcaaattagtcttaaagccttttttctaacgatgcatttatgcgttaaagcatcagttaatatctcttaaattgtataaaatgatcattcaccaaatgtcaattttatacttacgattaagtgtgcaaaatattatcaaacaacactcaaatattttctaaggtctctactatttaagatatcacgatgttgtccagaaaaaaagtatttagaaagggttcgcctcgccgtgtgcgtatttccaaaaagttcccagcatcttgcccagaaaccctctgccatccaacgatctcttgacttggcttgattaagctactaagaccaaaacttttggtaactactcgataagctcaatcgatgccatttacaatgatatacattatgactgaattagttaagagaattgcattgaactgacaactgaacaaaccattaattaaccaattgaaaaccaactattcctcgccctgaagacattcgtttcatatatttatggactttaagactgagtttattgtatcttaaaaattattaacccatgacc

SEQ ID NO: 26832 - protein, 442 aa, DROSOPHILA
MFPIADLSRKENTAPDVASTAEIQRSFQRSILNGKQRDEQKIQLPGSRRKRLSVTEVSDMLFEFYKTKSAKVPKAEQPHRQVSPTSGEILDPSTISAIAVYGTASETASKNLNADEVMRVQNATATRVVGAAAGAAASFHPRPKYTLKTAASSTEHTTAIPTSVLVANSAAALTPKPQAAVIAEALMRNGLHNFQQQLRAQEILRQQTPHRRIKEENDVEIAGGDITPTKILENLLRKQQERDLRHSECENEPGYSTEDDEEGRYHAFDDIHLMEQSGGKFGNNSGMGMFNANAHGGSASSILDAHQAFRNLEFTLSDYGGSSSNGSTTSPNGIGLDGEPVYECRHCGKKYRWKSTLRRHENVECGGKEPSHQCPYCPYKSKQRGNLGVHVRKHHTDLPQLPSKRRSKYSMNRENGMSGSMSDDSQGKLIIDFNGKGELETK

SEQ ID NO: 26833 - DNA, 5956 bp, DROSOPHILA; identical to SEQ ID NO: 26191

SEQ ID NO: 26834 - DNA, 2036 bp, DROSOPHILA
gcaattgttattgcgagttgagttcgaagaaattagtaacactgggagaagataattgccatagcctcctcccaccacgcaccccaaactcagcaataaatgaactttataatttgattggctcttcgcattgataaaccagcgttgtgaccttcgcaggagcacccatttcattgtcagtgtcaagcgggaaaaaatcaatggaggacctgacacctttgaccaaccttcaacagattcccgagggagcgccgcgcaagaaaaagatgacggaacgacagccgttgctcctccagagcgatgcctctgactacgagggcagtcgaggatcggcagcacgacccgtgcgcagctctccgccggacaacactctcgtcaacgtgcacagcgaggacagcttagcagcctctggatcgggagatgatgaaattggatcgacggataagtcctataaccccacccatcatcgcgacctggagcatccgacgtccaacttcgataccctggttcatctgctgaagggcaacattggtacgggcattctggcaatgccggatgcctttaagaacgccggactttatgtgggactctttggcacaatgatcatgggagccatctgcactcactgcatgcacatgctggtcaactgctcccacgagctgtgccggagattccagcagccatcgttagatttctcggaggtggcatactgcagttttgagtcgggacctttgggactaagacgatactccatgttggctcgacgaattgttaccacgttcttgtttatcacgcaaatcggtttctgctgcgtctacttcctctttgtggcgttgaatatcaaggacgttatggatcactactacaagatgcctgtgcagatttacctgcttataatgcttggacccatgatcctgttgaatctggtgcggaatctgaagtatttgacacccgtttcgctggttgccgccctgctcacagttgccggactggccattacattctcgtacatgctggtggatctgccggatgtgcacacggtcaagccggtggccacttgggcgacgttgcctctatattttggaaccgccatctacgcgttcgagggaattggtgttgtcctgcccttggagaacaatatgcgcacacccgaggactttggcggcaccacaggtgtcctcaacacgggcatggtgatcgtggcctgcttgtacacagctgtcgggttcttcggctacctgaagtacggcgaacacgtggagggcagcattaccctaaatctgccgcagggcgacacactttcccagttggtgcggatttcaatggcggtggccatcttcctctcgtatacgcttcagttttatgtgcctgtgaacatcgtggagccctttgtgcgaagtcatttcgatacaacgagggccaaggatttgtcagcaactgtgctgcgagttgttctggtcacttttaccttcctgctggccacctgcattcccaatctaggctccattatctcgctggtaggagccgtcagcagctcagctttggccctaattgcaccacccataattgaagttattacattttacaacgttggctatggacgcttcaattggatgctatggaaggacgttttaatcctgatctttggactctgtggctttgtgtttggcacctgggccagcttagctcaaatcctgaacgacagaacccactgagtttaatcgaaataagcgaatcgaaaacagaacctggctagttctgcctacaaatgtgtgcgaatttatgacgaaggctttatgtagttacactcagactacgaatatgtttaccattagttgtttaccatttcccaactggtatcggtccagtccagtggcggtgctttagtgtgattaatttatatttatggcaaattagttgcatttttttttgttgttatcagccagctgcaatcgtaccagacaataactagcattttaagtagaaagtttttcaacatttgttcagtttgtcagttggagattatttctgtgtta

SEQ ID NO: 26835 - protein, 482 aa, DROSOPHILA
MTERQPLLLQSDASDYEGSRGSAARPVRSSPPDNTLVNVHSEDSLAASGSGDDEIGSTDKSYNPTHHRDLEHPTSNFDTLVHLLKGNIGTGILAMPDAFKNAGLYVGLFGTMIMGAICTHCMHMLVNCSHELCRRFQQPSLDFSEVAYCSFESGPLGLRRYSMLARRIVTTFLFITQIGFCCVYFLFVALNIKDVMDHYYKMPVQIYLLIMLGPMILLNLVRNLKYLTPVSLVAALLTVAGLAITFSYMLVDLPDVHTVKPVATWATLPLYFGTAIYAFEGIGVVLPLENNMRTPEDFGGTTGVLNTGMVIVACLYTAVGFFGYLKYGEHVEGSITLNLPQGDTLSQLVRISMAVAIFLSYTLQFYVPVNIVEPFVRSHFDTTRAKDLSATVLRVVLVTFTFLLATCIPNLGSIISLVGAVSSSALALIAPPIIEVITFYNVGYGRFNWMLWKDVLILIFGLCGFVFGTWASLAQILNDRTH

SEQ ID NO: 26836 - DNA, 3170 bp, DROSOPHILA
tttttgtgcgtcccatgaaacaaaagtagaaataaacaataataattataaaaaaatgtattcttgccgtcaataacttattttctgagttttttgtgttcgtgagagtaaaatttctttttaaacacatgcaagttaaggacttcttacaattgtgattgtaagaagagcaacaagagtaattttccagacagaatcattctgcatacgctcgacacaaattccattcctctgtctcaattaacatgcatccaggacgacactttccttcttttgtctcttccatcgtctaatcagcgcctttgttggccctttcacttgcattgctcttttcagttttggggatcagacggatgcactctgccaaaggcatttttcaatgactcttcactataaagtcctggcaaaggtgaaattgcagacccatttaagggttgttagcccccttttcacagacaatttttttttttttttgcagctcttccaccttctgccggttactcgagttcgccgctgctagggaagcattgtcaaaaattcattattgaacactttctgccatcgacggagatgatagcacgggaatatgcatgaggttaccacacagagggtgtggatgggcaagtgcttttgccgaagagcatttggccaactgaatatgctcgtcgttaataattcaagagcttttaatgccatgaatattcatcaaattttgagcatgatttgattttattgcgtattttcaatgacgtggcaaaaaatccctcacgttctattaaggggttagccaccatattggctgcaggcttaaatattggggcttaaatgtaagcatactggcatactttttgtccatcgacttaacatgttttaggaagtaaaaattaaaaattctccgacgcaaacttcaggtcagcatatcagaaggtagttgctagtgagcagtaacagtattatatgacctcttaaatatgattagaacatattatttgtaagaggcctaccagagtataggataaggattattccaatcgaattccggctctttatctggctttggtgtcggttggttcctatcgttgccgttttgcgtcaaaaatatacgacggataaattcgatatggctcatgacatcagtgaatacacttggtctctggcaccttttgttagtaatggcgatacctacttgaacaaagcggaatgcatttctatatcgaaccattgctcccacaggaccaccagtatcgccgatgcaaagattgctgttccaatttccggcacaaaactgattgctcaaaacgctgccaaaagcgcacatttttgaaggctgtcgcgaaatgtccagtgtcctgagctcactgctgtcatgcatcgattcagttcgtccccatccagtaccagttaacactttaatgctatcgatatgatgtttccacgacgcatcccacataatgcaaataggcctgatgttcgctgttaaagaaaatcagttaaaaatccggtgcattggatgtaaaaaatagaagactacatttaaatttatattggatttcaaacaaacctacctttataaactacattggacaccagtcgcagtagggctatatcattggcatgcgtgtttggatcgtaaaagcgatgttgaaaggtcctattcacttgatgctcttctcgatatccttttagctttctattatactcgcccagacgaacaacgctgcagaggacaacaacatatttatttttatccatatttataagtttttcgctttaacaaaacttacattgtggtattcggaataaagcagtgagctgcagttagtaccagtcctaaaaaaaaaatcgaaacaatatttttaccacttgagaaccacacaacttttatgcgaacgaaacattgataaaaaaaaactttcttcaagaaaatgtatatgtactcactgcgagatataagagttccgccgcaaatgaattgattactcgaagtatgcaaaaaagccatccaaggactagagtttctaaccgcgactttgccgttaactatgcgaggtcctagcttcaacggagaccgtgtaccacattccgaatcaagaaattgcgttgatccaaggagaggaaaaactgtcaatagcagcagaatggatgccattccgattacaacgatctccattgacggaatgccaacggatcagttgggtaagtcgattttataaatgcttagcatgcgtacaattcaaagaatttaagatcacgcaatgaatgcgcattcctggaactgcaagtttagccattagtcgccattgcttggtgataagagggttgccaatttttttaatataatctgtttttccagttgtttaagtataagctgagtttcatgcgaggcgattaagaagtttaccttatattttcaatcatttaagaaataatattagcaatttatatgttatgttcaaaaaacgatgaaacggtcgattatattaccttactatatgatgaataggttaagctaagtcgaggccaggcaaccttaatacatttgcggaatataatcgaccatctaacgtacaatcggtgtaccaccactttttatggccacacgtggctgtctgttttgtcgtcaacctgtccaacaatgtaagctcttatttccacataaccatcccctcatttttatttcaaaacttttcattttggtgaatcgtaaacttggttgaaaatgcaccataaaatattatatattgatagatgcatatatcgatggggggtgttttggggtaccttgtgccatcatcgatttttgtactacccagaatacaataagcctgatagacagaacaaaaaacgtagctcctaacctaattcacagctaatcactctgattactttgagtattcagttcaggcccattaaatggctatttgcttatcaatgccgtctcaacccaatggagcacctctccaacaccccaccccaatgacctgtgacccttgacactcactcatcaactgctaccccttattcgactaactccagtcattttggaccccggacctaaaggcccatccatgcatggagtacgtgagacaggtctatgtgtcatcagctagaatgcaaagcagggagcttcgtcaaatgaaatcaaatgatttgccgtgcagccgatttat

SEQ ID NO: 26837 - DNA, 900 bp, DROSOPHILA
atggagatcgttgtaatcggaatggcatccattctgctgctattgacagtttttcctctccttggatcaacgcaatttcttgattcggaatgtggtacacggtctccgttgaagctaggacctcgcatagttaacggcaaagtcgcggttagaaactctagtccttggatggcttttttgcatacttcgagtaatcaattcatttgcggcggaactcttatatctcgcagactggtactaactgcagctcactgctttattccgaataccacaatcgttgttcgtctgggcgagtataatagaaagctaaaaggatatcgagaagagcatcaagtgaataggacctttcaacatcgcttttacgatccaaacacgcatgccaatgatatagccctactgcgactggtgtccaatgtagtttataaagcgaacatcaggcctatttgcattatgtgggatgcgtcgtggaaacatcatatcgatagcattaaagtgttaactggtactggatggggacgaactgaatcgatgcatgacagcagtgagctcaggacactggacatttcgcgacagccttcaaaaatgtgcgcttttggcagcgttttgagcaatcagttttgtgccggaaattggaacagcaatctttgcatcggcgatactggtggtcctgtgggagcaatggttcgatatagaaatgcattccgctttgttcaagtaggtatcgccattactaacaaaaggtgccagagaccaagtgtattcactgatgtcatgagccatatcgaatttatccgtcgtatatttttgacgcaaaacggcaacgataggaaccaaccgacaccaaagccagataaagagccggaattcgattggaataatccttatcctatactctggtag

SEQ ID NO: 26838 - protein, 292 aa, DROSOPHILA
MASILLLLTVFPLLGSTQFLDSECGTRSPLKLGPRIVNGKVAVRNSSPWMAFLHTSSNQFICGGTLISRRLVLTAAHCFIPNTTIVVRLGEYNRKLKGYREEHQVNRTFQHRFYDPNTHANDIALLRLVSNVVYKANIRPICIMWDASWKHHIDSIKVLTGTGWGRTESMHDSSELRTLDISRQPSKMCAFGSVLSNQFCAGNWNSNLCIGDTGGPVGAMVRYRNAFRFVQVGIAITNKRCQRPSVFTDVMSHIEFIRRIFLTQNGNDRNQPTPKPDKEPEFDWNNPYPILW

SEQ ID NO: 26839 - DNA, 2610 bp, DROSOPHILA
ccatgctccgcttcacgctgatcgacttaatgggtgagtttgggatcaatcacagctgcgatgacatgtaccccctacccttcacttgtagtttcctatggaggaatagccggtttgatcatgggcatctcggtgctaggttgcatcaacgaactcttggatcgcttcgcctgttgtcgcataccccatggctcctaggcccaagctggcaccatgaagtaccagccatcggcagctgggttctcacgttcccacacttacctgtaaccgaagcacacacaaatgcaccactcacctggttcttgggatgcgcacataaacaaatccagaaaataaaacgcattcggagagctacctgcatggcagtggaaaattttcaggtgcagctccaaccagacataacaaaactgtaggctttcttcagaaaaagaaattgaataagaatattgtttttaagtcccagaaatccattttcaatttagaagtctgtttttgtaacttgaaacattgagtaaataaattccttatagagcacatacttatatatgccttcaataaaatgccgaaaataaatgtaattgcaagtatttttaattttctgcacagcgactgtattttttgcagtgcacccaaatatgctgcgtttgctaaacgtgggtattaatctgttttcagcaacaacaaaaataagcgcgccaatttgccaaagattaaaggggagctgtcttatcagcgactgagcccatggaggttattagaaggcatccatccagattccagattctttgttgtccacttgtgcccccaagcataaaagcccatcacaaaagaatcagatgcccagcttggagttgagcataaaaataaactggggatctacaagcataatcgcgccttggagacccctcaggtaccaagtccattcccgaactcaaatcggatccctcgctctcgtataaataggggctgcctggccctatttcaaaacagtcttcgctcgatcgctggaggaatacatacataggtggaaagaaagtgaaaatgaaggttttcgttgccatctgcgtgctgattggactggtgagtgctcgatacagataaacggcgaccaggaccagaataattcaacgccttcccttgggttataggcctccgccgactatgtggtgaagaaccgacacgacatgctggcctaccgcgatgagtgcgtcaaggagctggccgtgcccgtggatctggtggagaagtaccagaagtgggagtaccccaacgacgccaagacccagtgctacatcaagtgcgtcttcaccaagtggggcctgttcgacgtccagagcggtttcaacgtggagaacatccaccaacagctggtgggcaaccacgctgaccacaacgaggccttccacgcctccttggccgcctgcgtggacaagaacgagcagggatccaatgcctgcgagtgggcctaccgcggagccacctgtctgctgaaggagaacctggcccagatccagaagagcctggccccgaaggcctagtggcttaggtcctagttggacggatgtaacgataagcattagtttagttaataaagtaattgatttcccatacaagttcgagcattccttctcgattcagtggggaaaaacagaatgtagatatttcttcttcaatgggggcctcaatttacttattaacaactccgagtagcaattacattgaggatatgcttttaggcagccaaactaaactaaaactttggccaactacttccattcgtcatgttgctgtacaccaaggaacttgtgattccgcggccgagaccaggactactgcgcttcaggaacaatccgcgtggtattaagtttcgggaaaaactgtgcaactcctttgcccactccaacatccatgggatgcagcacgtcttcggggagcagcatctctggcagcgctgcctgtggctcgccatcgtcctgggagcggtgatcacaggattcagtctgtacaccgtgctgatgcatcgccacagcgagcagctcctggtcagcctgatagagaccacccagttgccagtgtaccacatcgactttccagctgtggccgtttgcccctggaatcatttcaactggcagagggctccgtcggcatttatccgctttctgccacgtcatccgaatgccgagctccgggaaacatttcgccagctactcgccagtatggacattatgaacttctccaactttaaccggatacggattctgaccaaacgaaatctgacgggaattagttatctaaaaatgacggacctgatgaacttcatgacctatagatgcgatgaactcttcgtcgccgattcctgcgtcttcgatgagactccctacgactgctgcaaacttttcgtacgggagcagacggtgaagggccagtgcttggtcttcaactccatgatttcggagaactcgcgcaaaaagcacctgattaaccagttctatccccacaagctgagcaccgctggcgaggattcgggcctgaagttcacgatcaatgcaagctactcctttatgaacaacatagacgctctgactccatttggaatgaatgtaagtccct

SEQ ID NO: 26840 - DNA, 544 bp, DROSOPHILA
atcgctggaggaatacatacataggtggaaagaaagtgaaaatgaaggttttcgttgccatctgcgtgctgattggactggggcctccgccgactatgtggtgaagaaccgacacgacatgctggcctaccgcgatgagtgcgtcaaggagctggccgtgcccgtggatctggtggagaagtaccagaagtgggagtaccccaacgacgccaagacccagtgctacatcaagtgcgtcttcaccaagtggggcctgttcgacgtccagagcggtttcaacgtggagaacatccaccaacagctggtgggcaaccacgctgaccacaacgaggccttccacgcctccttggccgcctgcgtggacaagaacgagcagggatccaatgcctgcgagtgggcctaccgcggagccacctgtctgctgaaggagaacctggcccagatccagaagagcctggccccgaaggcctagtggcttaggtcctagttggacggatgtaacgataagcattagtttagttaataaagtaattgatttcccata

SEQ ID NO: 26841 - protein, 117 aa, DROSOPHILA
MLAYRDECVKELAVPVDLVEKYQKWEYPNDAKTQCYIKCVFTKWGLFDVQSGFNVENIHQQLVGNHADHNEAFHASLAACVDKNEQGSNACEWAYRGATCLLKENLAQIQKSLAPKA

SEQ ID NO: 26842 - DNA, 3715 bp, DROSOPHILA
aaccaaacaaaatccaaactccgtcttctccaacacgaagtattcgcagcaattgaaggaggaactgcgccacaggcaggatttcggtaccatgatatccgagcattgaagagtcataaatatggccagctcagttaggttcacaaagcccaccgcctccaggttatcgtcctccagctcggccaagcttgaaaggtaactgccaaagcgcaaagtttccatccgagaaacaaggacggtgaaactttcgaccagttccacgctggcattggtcggcaggaactgctccttggccgcctccagcttgttccagttgatgcggttgtccgtgcagattcccacggccggaaatggcaccagaaacacggggaactgcggatcgtggaccaccgtctgcagcttctgggaaacgaatcgctcggagagcaggaggtagaaaaagaaggacagcccgatgctaatgatgagcagcatcgaccagatgattctaaatacaatgattatatacaatttaaaattgaatgtagatatgaatagaggataaaccacaaacctctccaagttatgcaggtgggaatcgtacagatagcgaacgcagtgaatggtggacttctcgcagtagctccgaaagtggacctttaacaaatccgcgaggcacctctcgttgtcaccaaaaccggctgcctctgtcggtttgaccgaattatctcccttggccattccggtgacgagtcactcaatcactgagcttttggccggaattcggggatcccttttaaggccacgttccaaaggccaggtgacttgtaattgtatgtgaggggacaaagttccgacggccaggccatccattatggctcacaagctttgtaattgagtagttatgtttcctgccatttgataagcccgctgacagaagtggttgtctgcgcattgattagcggatcgaactaccaattagcgcgattttcccacagtcgcagttcgtccgctgagtgaaatgagtgccaccgcctggaagccagaaccctcctccgaggataatgatgatgaccacaaggagtcaaaaaaaaagctgaagaaggagggggcaggtggatgggcttcgaccaggcggtaagtgatacccttcgctccaaaaatatccatgactctggccgtgcataatctcttgtgttccaaaagtaatccatgaaattcggtttttttttaatctatagatacgccagaatcccccttaaaataatggccgctctggccaccgtgtatgtgagcattctttcctcggagcggtacttctactactgggtgcagacctccatcgaaaggactgacatgcatgtatccgagatcgatttcccagccgtgaccatcattccgatcaatttgagcatcctgaaagccgagaagctctccaaggcctataacttggttcagtccgtggtctggcaaacaccgatgtccgcccgcctcacggatgagaacttcacggagttctccgaactggaaaactggaacgcgcagagctggggaatctaccaggcgctgcagatgaactgccagcacttcttcaccgagtgccagtggcgtcgcaaggcgatgaactgctgtgacctattccgacccaccaagaccttcaatggcttcgccttcgagttcaactcactggtctcctcgggaagagatgaaacgtggccctggtccgtggcttcatgcggatcatatagcggactcaatgtgaagatcaaacggcagcagggtctgtatacgttgaatacaatgggggtgagtccgataagacatatgtacatagatagtgcgtcatgacatggagtaattaccacaccaggtgatagtgcacgaaccgacccagttgctgggcatgagcattgactattcctcagaggatcgcatcgtggttccggtggaaccacttcatttcacagccgagttggatgtccgggcacgtcccgttcaaatgcgtcgttgttactttgaggtcggtttccttagccaaatatatactagctcttaaacttaattttaccttagaatgagataccaacgggaaagtcccggtcggagtgcatctacaagtgccacgtcaactacatcatcagcaagtgcaactgctccttggaactgccggtgaaggccactcaagatgaggacaacattgcggctgcaaaggaaagcaacggacgtagaatttgcggtgtgaaggatctggcctgcttcaatcagcaccgacgtgggtctaattctaaacttaaatcatatatatatgatatatatgtactgaattccgcttagtttccctcttttccatgagcaacatcatcgaagagtcccgtgataatgtgttctccaccgtggattgcggttgctttcctcagtgcggtcacacccagtaccacacgtcaacctacacggagaagatgagcgcccacaccaaccttgccgcagcgatcgagatagatgtgtacttccaggaggagaccctcttctcttaccgctccatgctccgcttcacgctgatcgacttaatgggtgagtttgggatcaatcacagctgcgatgacatgtaccccctacccttcacttgtagtttcctatggaggaatagccggtttgatcatgggcatctcggtgctaggttgcatcaacgaactcttggatcgcttcgcctgttgtcgcataccccatggctcctaggcccaagctggcaccatgaagtaccagccatcggcagctgggttctcacgttcccacacttacctgtaaccgaagcacacacaaatgcaccactcacctggttcttgggatgcgcacataaacaaatccagaaaataaaacgcattcggagagctacctgcatggcagtggaaaattttcaggtgcagctccaaccagacataacaaaactgtaggctttcttcagaaaaagaaattgaataagaatattgtttttaagtcccagaaatccattttcaatttagaagtctgtttttgtaacttgaaacattgagtaaataaattccttatagagcacatacttatatatgccttcaataaaatgccgaaaataaatgtaattgcaagtatttttaattttctgcacagcgactgtattttttgcagtgcacccaaatatgctgcgtttgctaaacgtgggtattaatctgttttcagcaacaacaaaaataagcgcgccaatttgccaaagattaaaggggagctgtcttatcagcgactgagcccatggaggttattagaaggcatccatccagattccagattctttgttgtccacttgtgcccccaagcataaaagcccatcacaaaagaatcagatgcccagcttggagttgagcataaaaataaactggggatctacaagcataatcgcgccttggagacccctcaggtaccaagtccattcccgaactcaaatcggatccctcgctctcgtataaataggggctgcctggccctatttcaaaacagtcttcgctcgatcgctggaggaatacatacataggtggaaagaaagtgaaaatgaaggttttcgttgccatctgcgtgctgattggactggtgagtgctcgatacagataaacggcgaccaggaccagaataattcaacgccttcccttgggttataggcctccgccgactatgtggtgaagaaccgacacgacatgctggcctaccg

SEQ ID NO: 26843 - DNA, 1323 bp, DROSOPHILA
atgagtgccaccgcctggaagccagaaccctcctccgaggataatgatgatgaccacaaggagtcaaaaaaaaagctgaagaaggagggggcaggtggatgggcttcgaccaggcgatacgccagaatcccccttaaaataatggccgctctggccaccgtgtatgtgagcattctttcctcggagcggtacttctactactgggtgcagacctccatcgaaaggactgacatgcatgtatccgagatcgatttcccagccgtgaccatcattccgatcaatttgagcatcctgaaagccgagaagctctccaaggcctataacttggttcagtccgtggtctggcaaacaccgatgtccgcccgcctcacggatgagaacttcacggagttctccgaactggaaaactggaacgcgcagagctggggaatctaccaggcgctgcagatgaactgccagcacttcttcaccgagtgccagtggcgtcgcaaggcgatgaactgctgtgacctattccgacccaccaagaccttcaatggcttcgccttcgagttcaactcactggtctcctcgggaagagatgaaacgtggccctggtccgtggcttcatgcggatcatatagcggactcaatgtgaagatcaaacggcagcagggtctgtatacgttgaatacaatgggggtgatagtgcacgaaccgacccagttgctgggcatgagcattgactattcctcagaggatcgcatcgtggttccggtggaaccacttcatttcacagccgatgagataccaacgggaaagtcccggtcggagtgcatctacaagtgccacgtcaactacatcatcagcaagtgcaactgctccttggaactgccggtgaaggccactcaagatgaggacaacattgcggctgcaaaggaaagcaacggacgtagaatttgcggtgtgaaggatctggcctgcttcaatcagcaccgactttccctcttttccatgagcaacatcatcgaagagtcccgtgataatgtgttctccaccgtggattgcggttgctttcctcagtgcggtcacacccagtaccacacgtcaacctacacggagaagatgagcgcccacaccaaccttgccgcagcgatcgagatagatgtgtacttccaggaggagaccctcttctcttaccgctccatgctccgcttcacgctgatcgacttaatggtttcctatggaggaatagccggtttgatcatgggcatctcggtgctaggttgcatcaacgaactcttggatcgcttcgcctgttgtcgcataccccatggctcctag

SEQ ID NO: 26844 - protein, 440 aa, DROSOPHILA
MSATAWKPEPSSEDNDDDHKESKKKLKKEGAGGWASTRRYARIPLKIMAALATVYVSILSSERYFYYWVQTSIERTDMHVSEIDFPAVTIIPINLSILKAEKLSKAYNLVQSVVWQTPMSARLTDENFTEFSELENWNAQSWGIYQALQMNCQHFFTECQWRRKAMNCCDLFRPTKTFNGFAFEFNSLVSSGRDETWPWSVASCGSYSGLNVKIKRQQGLYTLNTMGVIVHEPTQLLGMSIDYSSEDRIVVPVEPLHFTADEIPTGKSRSECIYKCHVNYIISKCNCSLELPVKATQDEDNIAAAKESNGRRICGVKDLACFNQHRLSLFSMSNIIEESRDNVFSTVDCGCFPQCGHTQYHTSTYTEKMSAHTNLAAAIEIDVYFQEETLFSYRSMLRFTLIDLMVSYGGIAGLIMGISVLGCINELLDRFACCRIPHGS

SEQ ID NO: 26845 - DNA, 3347 bp, DROSOPHILA
ggctatgtgccgctgaggagaaccgacctaaagcacctcatctaccacctgtgtctgcacttcctggaacgcaagttcgatatgctggagtgcgagcggttcttcatgggcgacctggactactatctgctggagctggcctacgtgttctacttcaacaacaacaactcgacgctggagcagaatctcaaccagaagttcaagcagctcatcgcggctgcggacagcaatcaagcggccacgtccgccggccaggagctcgagcagctgcaggacaccgatgtcatattcgatagctttacggtcaagttcaagacgatcctgtgccagcgcctgctcagctactcggactgcgatgctgccaattagcagtggctgggccctggagcttcgtttccggttcagatcctggatcctctgaaatttcgttcaacacgcatcagttgagggcccgtctgtcttgtttaatatgtttcgttatgagttctgacctagaaccgaggactgcccccagcacacacaaccccagactcacagactcccggactcccaactcctagaacccatcttcccttacatttttacgcgtaactatatatatataccataattgttgtttgcggttatttatacatcaaatgctttttacagcgctgttatttaaacgaaatatttaagacaaacaaattgtttaaagaatccaatttttgtaacgctttgtttgccattggccacgcctgcttttatttgtttactcaataaactacacaaaaatctgagaccgaaggaaagtaatccaaaactgctcatcgaacagatcaacggaggctgcaggatatacacatgaaacatacaaatgatacaaatttttgttttttattcgatattcagcttgtgatttgcaattatttaataaaaccagagtagtagtaatataattatatacacatataaatgattaacaataaaatacgtttatacaagtaaaagaaagtcaattttacaacttgagcttgatgttgtccgtagtccatcgcttgctctggaggcttttcagcgcattctcgcagtagaactgctcctcggatcgctcgggcagggtgtccttgagctgctgtagctcctgctgctgcttcaacccggccatggcatctatgaccgccttgatgcacttcacccgctgggctagcgccagtttctcaacgctgttgcccatcttggagaggaatagctgaaggacggtcgagggagcctgcagctcgtacagccggagcacggccagcgtcagatcgaagctgatgtgaaactgtttggtcttcagcggatgccaactgggcacccgctcaaatatgcactccagatccgcataagcctgtgcctgcgccctttcattgagcgccgtccactcgtactgggccggcgatatttgctggtcggcggcaaaacgctgaggtgacactggtttgagcatatcctgctctttccaattgctgttcacctggcagcaagcatagagcacttccactggagtgggttgatcccgaagcagcttgccgagcgcgctatccttctccattagctgctgcatcttgagggcagcgtgaaaaacctgctcgtagagaggtattacacccactcccgctgtggcataggcatccaccaaaagctggaggtgtttcttcctggtgctcgtatctccggaagcgagcgctgcctgaaactgcttaagagccgcctcctggtggcgtccaaatagctgcagtagctcaatatggcccgccaggtcgccactttccttcaggtaactcagatactgctccaaggccttgggtctctccctcagaatgccatgaaactgcgtggtattcagagttctcttgaggaagagcaacactgtaatgacggcatgcccaccaccttgtgccatcagggtgtccagcagctgctgcttctcatgcagcgacttgaacatctccaagggcgcagtctttccttgcagcagcttctgtgcagtggcttctagattggggctgtacagggtgctctgaagctgtcggcgcagcagcttcagctcctcctccggcgagacacccttgggcaggaccctgtcgtccagcgcctgttcctgcagcaccagtttcaatgcctcctcgctcagaatggatttgatcgagagattcagggcgacactgttattgaagctggcctccgaaatggtgtcgtcggcgaggatgccattgctgaccagatccggggcgaggtccacctcgtcttcgtcgtcgaagctgaacgctgcgcgagaggatcggttccaatagctttcgctgtccaattgcaggtccattgttattattcgttattaaatgtaaggttctattttgtgacgaccagtgtggctgcgctaatgaatttaccgtttaatgcacagacatggtcgcactattttcggctattcaaatatttaaaaatagtttcagtgaaatccgttatgaaaaagctgttaattgtttataatcttcgttgaatcaaacgattgacacagaaaattaagcaatttagaatttagaacttctttccaaattggctagaaacgggaacgcatttgatttgtgcaataaactagcaacggctaattcagcagaacatcaagtttcatcataaactcttttcgctttcttttattcacaaatagttggcttttaatgaaccttaaagtttttattattttgtacgattaaatccgcgtagattttttcactttaagcgagaaagcatttacgtgcacgtttttatgcgtctttcatgggtgccaactgctaaaatagtgaaactgcccgaatcaagtatgttgcattactttgacttattcaagacctggtctagccagggatgcagtgcatcgaggcgggagtagactcccggcttgtccgccagggcgcaccccactccccacgacacgatgcccaccagctgctccctcaccgacaagggtccaccggagtccatctggcaggcatccgtgccgcccttgaggtagcctgcacagagcatccgatccgtcacagttttgcccagtaggttcctgcaggcggtctgattcacgatcggcactcgggcatatctcagactgtccgagggaggaccattcatggacttaaatccccagccggcaatggtggcataggtgccttcggctactctctctgggtttatgggaatggcctttacctacagagcaaattgctgaactaactcattttagctgagagtatttcaaacctttctagatagtgttaggtttttggtcaacctgatgataccgatgtcatagtccatggtcttgggat

SEQ ID NO: 26846 - DNA, 1347 bp, DROSOPHILA
acaatggacctgcaattggacagcgaaagctattggaaccgatcctctcgcgcagcgttcagcttcgacgacgaagacgaggtggacctcgccccggatctggtcagcaatggcatcctcgccgacgacaccatttcggaggccagcttcaataacagtgtcgccctgaatctctcgatcaaatccattctgagcgaggaggcattgaaactggtgctgcaggaacaggcgctggacgacagggtcctgcccaagggtgtctcgccggaggaggagctgaagctgctgcgccgacagcttcagagcaccctgtacagccccaatctagaagccactgcacagaagctgctgcaaggaaagactgcgcccttggagatgttcaagtcgctgcatgagaagcagcagctgctggacaccctgatggcacaaggtggtgggcatgccgtcattacagtgttgctcttcctcaagagaactctgaataccacgcagtttcatggcattctgagggagagacccaaggccttggagcagtatctgagttacctgaaggaaagtggcgacctggcgggccatattgagctactgcagctatttggacgccaccaggaggcggctcttaagcagtttcaggcagcgctcgcttccggagatacgagcaccaggaagaaacacctccagcttttggtggatgcctatgccacagcgggagtgggtgtaatacctctctacgagcaggtttttcacgctgccctcaagatgcagcagctaatggagaaggatagcgcgctcggcaagctgcttcgggatcaacccactccagtggaagtgctctatgcttgctgccaggtgaacagcaattggaaagagcaggatatgctcaaaccagtgtcacctcagcgttttgccgccgaccagcaaatatcgccggcccagtacgagtggacggcgctcaatgaaagggcgcaggcacaggcttatgcggatctggagtgcatatttgagcgggtgcccagttggcatccgctgaagaccaaacagtttcacatcagcttcgatctgacgctggccgtgctccggctgtacgagctgcaggctccctcgaccgtccttcagctattcctctccaagatgggcaacagcgttgagaaactggcgctagcccagcgggtgaagtgcatcaaggcggtcatagatgccatggccgggttgaagcagcagcaggagctacagcagctcaaggacaccctgcccgagcgatccgaggagcagttctactgcgagaatgcgctgaaaagcctccagagcaagcgatggactacggacaacatcaagctcaagttgtaa

SEQ ID NO: 26847 - protein, 447 aa, DROSOPHILA
MDLQLDSESYWNRSSRAAFSFDDEDEVDLAPDLVSNGILADDTISEASFNNSVALNLSIKSILSEEALKLVLQEQALDDRVLPKGVSPEEELKLLRRQLQSTLYSPNLEATAQKLLQGKTAPLEMFKSLHEKQQLLDTLMAQGGGHAVITVLLFLKRTLNTTQFHGILRERPKALEQYLSYLKESGDLAGHIELLQLFGRHQEAALKQFQAALASGDTSTRKKHLQLLVDAYATAGVGVIPLYEQVFHAALKMQQLMEKDSALGKLLRDQPTPVEVLYACCQVNSNWKEQDMLKPVSPQRFAADQQISPAQYEWTALNERAQAQAYADLECIFERVPSWHPLKTKQFHISFDLTLAVLRLYELQAPSTVLQLFLSKMGNSVEKLALAQRVKCIKAVIDAMAGLKQQQELQQLKDTLPERSEEQFYCENALKSLQSKRWTTDNIKLKL

SEQ ID NO: 26848 - DNA, 4738 bp, DROSOPHILA
taaacgcttggctttcttgttatatctgatcattaacttgtatataggctatgattccccatgaaagtccaccctacggcacgtactccggtacttgcacaggcaatcaataaagatttttttttggggagttcgggtggcgggtgctttgtcgcgatgcggcaacaacagctgttgcaacgccagacgaccccccaaaaaaaggaaaaccgagcagcagccagacgccggcaaccggggaacctcatcatcgtcatcgtactccagcaccacccgtttcaagaagcaatcaatgcacttctggccatgtgccaagtttctcttccgaaaacctggagaggagcagagaatcggccaaaagagaggagcagcggtgtataagagctggttgggttccattcggttgcggttgaaaagctaaagttaatttaaagttcaacccgtttggtttctaacttttcggaactttaaccgtgtattttgggtttggtttatatagtttggtacagtagtaaaagatacgaaacatttgcgttgaaatcaatttcaaattgttgtttaattaagaagccaagttccttatttacgtaggtgctcacagtggaatataagaaataattgttcctaaaataatcctttgtacacgaatacaagaacttactcaatagtttaaaatgcttacctatatttttgtaacgaaatataattcattttacatacaaataaaaataaaccgaatttatttgcattcagcttggtaaataatagagtaactgcgtgactgcatgcgatgcaaaattatctttgaagtgcagacttttcgagttgtgccgcgtcactcgtttacccaaggcacccacactgtcgcactcgcagacacacacacacacgcataccagtgcggccgtgtagcaacaacaatgttgagcaaggtgcgctgagcctcgctctttcgaatctttctctccgtttcggtttcagttcacttctggctctcgtgcaaagcgcatcgtacagcggatatatcgcatctgtatcgtatcgtaaaacgaatcgtattcgcatccgtgtcggtcgcatctgcgtgctagtgtgtgtgagtgtgcccgggtgtgtgcgagttggtgtgtccgctgcaatggtcttggctatttgaagcgcaaaagtgcagtatttactgtttggtgattcactcaatcattagaatacccaagagataactatcatatcttggggttttcccaacgaaccgatccgataaaatggaaaccctgtaaactcatgctcccccgccttaaaaatcggttcagtgatttacgtgtgggtgtgggtgcagtgcttaaattatacacgtaaaatttaaacaaataaaggctgttaaaaaatcgtaaactcgagatccagctagtgccgaattcagtgctaaagtgaaacttctttgtgcaaacaacaaaaaccgttaattgccagcgccattcttttaaaggccccgacttataaagagtgttttcagtgcctatatggttttacttaagtcttttgtttatcgttgtacccatattgttttcagtttatcaatatatagataattatctaaatggaggagctttgttaattgatataacaagccttaagcgttaatgttcccatctcataggtccaagtcagaaaaccaatcccctttcactttaaacagatcagaatccaaggattaggtcgcttattctttttccaaactaatgaacaattaaatggcacggcgttgttggtcgcaaagtttccattgcccgatgcagagacccaaaaccaaaataaacggaaccctttcactttaaaatccacagaaccccaaagatcgaaaacgagtttcgcaaaagagcaaagagccgagcggcggccatgcttatattccatatcgaataactgaatagccgaccaataaagtgttacttggcacatccaacatccaacgttcaactagcaatccaacttacaatatccagcatccaactagctccgttgcattggcctatattcaaaatagatcagagatcgactcgagagaccggaggagatgtggatgaggtggtgacgaggagctgcggaggagatcgccatgtgagaagagcaaaactagtttcccatttgcgcgcttatgctaagtaataataataaataagcgcagtagtctctggcttgccgttcgagaagtgacctaaaaatactggtttcgagtgcggttttggcgtgagaacgtgtagcacagcgaaggcaccaccaccaccaccaatggccaccacagccgccggatcagcagccaccaccaccaacacgatggtggtgaagcggccaggaccaccagtgccgcccaggcccaaagcagcagctcagctggccaatggagcaggagcccctccgatcattcagaagaagcccaccttcgtgagccagctgagtgcagtgggtcgtaccttggtctacaagtcgccaacggtcaatctgcccaagaaacaggcccagacccagacgcccaccacggcggtgccaacgccgccggtgaagcccctgaagctgcgcaaggcaccggatgtgcccacggccaagcccagggattcaatgacctcggtggtcacggtcaaccggcataactcgataagcgtgatcgggagcacgccacagaccacaccccgcaaggacacccgcttgagcctgggaaaggtggacttcgagagggcgggcctccagccggccagtcagccacttcccaggccacggaaaattgttcaagtgcccgtggccactctagatgtggaagacataccagtggtggctcccagcccatcatcaaatggactcttcaggcgatcaaagaccaccctggatggcagccagaaggattcggcatcctccccgcacaatggaggaggattcctgtccggacggaccgtggagatcaagaataatctgaagaacgccgccgagcgtttgttctcggagataatcatcaaccagagccagaaacaggcagccaccgacaccaccatcataaccaagcacgaggccctgaagcaggagtccgatgtcctggccatccagtcatcgggcaactgcatgaggatcaatgttaacggcggccagacgagcaccatgaagagctcgatcagcgtgggcaacacgccgcaaaagaagcaagccttccacgagatgctcatctcggagctggctgccatgcggaacaagtcctgctccctggagcagctacccaccgccaagtcgccgccacccaccacttccacgcccaaaagcgtggcatctcgcaggcgctacaactctatagatgatgccgacaccgaggatgtggatgcggacaacgtggaggatgccgatggtgacgtcgacgaggaggacaccctcacctacgcagtcaataaatcgctgaaggagaacattggcaaggagggctcgtcctcgaggaagcgctgcccctcgggctgctccacagactcctcgccctacggaaccgagcgatcccagcgcatccgcacctcggattggatcgaggtgggcgacaacggcacggcagttactctgactagctgccacatcagcctggaggactcgggcatggaggacgaggagcggctggacgacatgtcctcgggagtgggcgacagctgggacagcgtcaaggaggccgagagcgagaagcgttctcgcaacggaaagcggtgagtctcgaaactattactataattaaaattatatctagtaagtgcatctaatgagattcgttgataatgaaggaacagatagttttagcatccataaatgaagctataacattatttattgctattgccgttcattaaacgttaatgagtatggaaattagctgtttgccgagggaaaacaaaatcttgaccatcaattgaagatctttaaaaacggccccatacgttggaggtcgtaatagtttcgagctgagcccgatcatccaagatcgcccattgctaccgcaattatttcaccgagtttcgctgggctccattgacatggttttgatcggctgtgcgcatcccacggaatccgcatccgaatcgcggtccaagtcccaatcccgagcacctcttcatcgtcaggtgctccattgttgtgcagctcgcatccaagtgagatctctcacagcagcgggtttggcttacattaatttatctctgctgacatcattccgagtgtggcttgctgcttgctgctcgctgcatgttgcttgttgcatgttgcacattgcacgttgcatgtgcgagcttttgggcccgatgccgattgcaattgcagcaagtagccgcaaaggcttgcgatattaacaatttaggtttctcgttagtattttaacggcggcaacaaaaacaacagcggcatcagcagcagcagcagcagaatcgaagtggccaaaacccgtttggaggcgctcttttacgactcgaatttggattttagcgggtacacacactgggccagaagtcatattaacatataaatacaaatactcgcatgtatgtatttccatattgccgtatagatagatatattgccatagtccgctggcggtacgtgtttgtcgcggcgaaaagtgattatcgtgactcacttggcttggcatttgcgccatcgccacacgaccaagatacttcatatatcgtgcatatatgtatgttccaatatttgcttattcacacga

SEQ ID NO: 26849 - DNA, 2138 bp, DROSOPHILA
caaagcgcatcgtacagcggatatatcgcatctgtatcgtatcgtaaaacgaatcgtattcgcatccgtgtcggtcgcatctgcgtgctagtgtgtatcagaatccaaggattaggtcgcttattctttttccaaactaatgaacaattaaatggcacggcgttgttggtcgcaaagtttccattgcccgatgcagagacccaaaaccaaaataaacggaaccctttcactttaaaatccacagaaccccaaagatcgaaaacgagtttcgcaaaagagcaaagagccgagcggcggccatgcttatattccatatcgaataactgaatagccgaccaataaagtgttacttggcacatccaacatccaacgttcaactagcaatccaacttacaatatccagcatccaactagctccgttgcattggcctatattcaaaatagatcagagatcgactcgagagaccggaggagatgtggatgaggtggtgacgaggagctgcggaggagatcgccatgtgagaagagcaaaactagtttcccatttgcgcgcttatgctaagtaataataataaataagcgcagtagtctctggcttgccgttcgagaagtgacctaaaaatactggtttcgagtgcggttttggcgtgagaacgtgtagcacagcgaaggcaccaccaccaccaccaatggccaccacagccgccggatcagcagccaccaccaccaacacgatggtggtgaagcggccaggaccaccagtgccgcccaggcccaaagcagcagctcagctggccaatggagcaggagcccctccgatcattcagaagaagcccaccttcgtgagccagctgagtgcagtgggtcgtaccttggtctacaagtcgccaacggtcaatctgcccaagaaacaggcccagacccagacgcccaccacggcggtgccaacgccgccggtgaagcccctgaagctgcgcaaggcaccggatgtgcccacggccaagcccagggattcaatgacctcggtggtcacggtcaaccggcataactcgataagcgtgatcgggagcacgccacagaccacaccccgcaaggacacccgcttgagcctgggaaaggtggacttcgagagggcgggcctccagccggccagtcagccacttcccaggccacggaaaattgttcaagtgcccgtggccactctagatgtggaagacataccagtggtggctcccagcccatcatcaaatggactcttcaggcgatcaaagaccaccctggatggcagccagaaggattcggcatcctccccgcacaatggaggaggattcctgtccggacggaccgtggagatcaagaataatctgaagaacgccgccgagcgtttgttctcggagataatcatcaaccagagccagaaacaggcagccaccgacaccaccatcataaccaagcacgaggccctgaagcaggagtccgatgtcctggccatccagtcatcgggcaactgcatgaggatcaatgttaacggcggccagacgagcaccatgaagagctcgatcagcgtgggcaacacgccgcaaaagaagcaagccttccacgagatgctcatctcggagctggctgccatgcggaacaagtcctgctccctggagcagctacccaccgccaagtcgccgccacccaccacttccacgcccaaaagcgtggcatctcgcaggcgctacaactctatagatgatgccgacaccgaggatgtggatgcggacaacgtggaggatgccgatggtgacgtcgacgaggaggacaccctcacctacgcagtcaataaatcgctgaaggagaacattggcaaggagggctcgtcctcgaggaagcgctgcccctcgggctgctccacagactcctcgccctacggaaccgagcgatcccagcgcatccgcacctcggattggatcgaggtgggcgacaacggcacggcagttactctgactagctgccacatcagcctggaggactcgggcatggaggacgaggagcggctggacgacatgtcctcgggagtgggcgacagctgggacagcgtcaaggaggccgagagcgagaagcgttctcgcaacggaaagcggtgagtctcg

SEQ ID NO: 26850 - protein, 480 aa, DROSOPHILA
MATTAAGSAATTTNTMVVKRPGPPVPPRPKAAAQLANGAGAPPIIQKKPTFVSQLSAVGRTLVYKSPTVNLPKKQAQTQTPTTAVPTPPVKPLKLRKAPDVPTAKPRDSMTSVVTVNRHNSISVIGSTPQTTPRKDTRLSLGKVDFERAGLQPASQPLPRPRKIVQVPVATLDVEDIPVVAPSPSSNGLFRRSKTTLDGSQKDSASSPHNGGGFLSGRTVEIKNNLKNAAERLFSEIIINQSQKQAATDTTIITKHEALKQESDVLAIQSSGNCMRINVNGGQTSTMKSSISVGNTPQKKQAFHEMLISELAAMRNKSCSLEQLPTAKSPPPTTSTPKSVASRRRYNSIDDADTEDVDADNVEDADGDVDEEDTLTYAVNKSLKENIGKEGSSSRKRCPSGCSTDSSPYGTERSQRIRTSDWIEVGDNGTAVTLTSCHISLEDSGMEDEERLDDMSSGVGDSWDSVKEAESEKRSRNGKR

SEQ ID NO: 26851 - DNA, 2737 bp, DROSOPHILA
tctatgacaacaatgtgatgggctttcatgagggcaatatcggagcggccaatggcttcatagccaatgccagcgaacccaccaagccgggtcacgtggacaacagcaacatccaggcggaggaggtgtggccaggagtggtttacgctctggctgctaccatgatacaggagggcatgttcgaggaagccttccagaccgccggcggaatgtacaagaccctgtcccagcgcatcggcatgaatttcgagaccccggaagcgttgtacggtgagaagcgctatcgctccattggctatatgcgtccgttgagcatttggtccatgcaggtggcattggagcgacggcgagcccaacgcgactaagtcgagagtacaatctaatccgaagtctacacaaccaaagatatttctaagccagcacaaagattttcttagcgtttagttcgattcttcttttgaggctgaatgtgtaacgagcttatcgagatggtgcgagtcgaggaagatgttgtctctgaagtggttttcaaatttatagctttatctgtacttttaagctgtggaatctgttggcgcttactccatgtcttctctagctttaaagccagtcacaaatcaaactgctactctctgttgaagtacaactacgcaatggtattcaaatggagcacaagtcgtatttagatgttagctaagagaaatatttaaatcaattataaatgttttaattaattattaatgtcataagcatatatgtatttcaatgtgtaagcagttgctgtctgcaataaatgtgaccgagttgtcagaaataatttatttagagttgagttattcgactatcagatactcattactcagctagtgggggtgtcaaaacgttggaaattgggatgttgccaaaatagtggaaatagtcaagtcaaatgataaaattagttgtgcaattgtaaatatttatttgtttcgattcgctgacattatttcatcgatagcatttaagatccattcacggaaatatgggacactagtgtagattgaactatacgtgcaatcctttgtacccccggatacaacacccacaagttgttggtcaaacaccaacggtccaccagagtctcctttacaagccgcccttccaaaagatccggcgcatattcttgacggttcagttaatccacaatagtacggccattgaatgtaaaggtttactccttgaagatcgatgggatgtgagtaataagaagaacttccccagccagagacgaaggcaatcgatccaggcgggggatttgtcttggccaatggaatgggctgaacttggtttgtgaactcaagtggcttacttagccgcacgatggcgatgtcgtttcctaatccctcatgcgtccttatagcggccacatcgacaacacttccattggagttcttcaaggcggatcctgcccgaacttgatatccctggccctggacgcaatgggccgcagtaatgatgatatctgcgctgtaaatggagccaccgcataaatgtttgccatcacgttgtatggacacctgccatggtgcctcctcgattccaatgggttgtccaccgataatgcgttcttccggccggattactggtcctgcggacagggaattgagcgccaatagcaacaggaagctttggatgaacatcttgaccagtttgtatgatactttgaattgcagtggcttcacgtccaaagtaaccagtcttttatacacaactcagttagcaatattctatttgaacctcagtaatagtttatgtatctagatatagaatattctctattcttgtaaagcaatcaaaatattgaaaaatacttcattcgctaaatataaacatcataaataatttagctgccttttgctttcaagaaatttttatcgctaacggtgaaaatgtggaggggcaataacatttctggaattttctaattaactaagtttgcaatttggtttgttctgcgtttataaatgttgaaagaaaatttccaactgattaagccatccgaagtggtagaatgactgcagagagtcgtccaaactaaacaaactaaactttctgtccgcaggacgagtaatccgactggtggttaaaaaacctattgaaatcgaaaaggttccctgattggtttccttacaatattatggaaaccttacttgttaagggtcctttaaaaatgaagataccatcataacagcggtcccctggtcgtaattaataacgttttttgaatattggcttttaatcgtgttcaatttcgtggcaaaacttttgaaaaaagtatcttaactttacaacaactttttaagctttcacggtgatggcatcaggtcattcgtcagttcatcatccttctgatacactttgcggatttctttcatggcttatccagttctgcaaaaacttatcgtactccctccggctgcggcaaagaattacaagagaggagggtcgacaaccgtgcgatttcagttcttccatgcgctcctttgtggttttcaggctgtggcatagaattcgaggattttgagcgacctcaaatctggtaaactgggcctcatcgagtaggtagtctagcacctctttgatctgaaggcaaaattgtatagcttatgattgtttgagttaacccattgtgacttaccttggtaactcgcacggtgtgcacctgcggatgtttgtccatgattgccttggcttcact

SEQ ID NO: 26852 - DNA, 550 bp, DROSOPHILA
actggttactttggacgtgaagccactgcaattcaaagtatcatacaaactggtcaagatgttcatccaaagcttcctgttgctattggcgctcaattccctgtccgcaggaccagtaatccggccggaagaacgcattatcggtggacaacccattggaatcgaggaggcaccatggcaggtgtccatacaacgtgatggcaaacatttatgcggtggctccatttacagcgcagatatcatcattactgcggcccattgcgtccagggccagggatatcaagttcgggcaggatccgccttgaagaactccaatggaagtgttgtcgatgtggccgctataaggacgcatgagggattaggaaacgacatcgccatcgtgcggctaaaatatgcgccggatcttttggaagggcggcttgtaaaggagactctggtggaccgttggtgtttgaccaacaacttgtgggtgttgtatccgggggtacaaaggattgcacgtatagttcaatctacactagtgtcccatatttccgtgaatggatcttaa

SEQ ID NO: 26853 - protein, 163 aa, DROSOPHILA
MFIQSFLLLLALNSLSAGPVIRPEERIIGGQPIGIEEAPWQVSIQRDGKHLCGGSIYSADIIITAAHCVQGQGYQVRAGSALKNSNGSVVDVAAIRTHEGLGNDIAIVRLKYAPDLLEGRLVKETLVDRWCLTNNLWVLYPGVQRIARIVQSTLVSHISVNGS

SEQ ID NO: 26854 - DNA, 7424 bp, DROSOPHILA
gtttccgagggactataaccaccatagtccttgtaagttggtcctgaaatgtgttgattacatctacaaaaatccgtagagtttccgctacttcttgatggagttttggaaacctttcgctgtggcttatattcctccccgctgttgaccctcttcttcaatttctgaaatccctctggagctggagatttcatatcttcagtataattccttgtcacatcttcgctaattgtctgggtttcggccaccgaaaccgctttgtttttcttaaagcgttttctagccttcttttcgatagtgcactgacaggaattatccgacttcaggggcgtattaagttgatgatcataaggggtacgattgagaatcgaacaattgataatctcgtccagcgatcctttagaaacctttttcagttcctctttagctctgctgatgttaagttgccacgtggatgggtaattgctggtactatttcgcgatcgagagctgcccctggaatgttctttggttttcaaactgtgaccacttaatgcccggttgtcctctgaaaagagtagagtaggtcagccctttactcatgtgatatactcagcatctataaatataccacttggcttcagtttcccccacaaaagtgagtccctcgattgaagctcacatcctggcagatttcctgccgtctttctctcccgcaaaactctaagtggactggatgccaaaatcctgtgcagtttcagtgctgctctcgacgaggatctctcctgatctctatcaccatgatccaggaccgattcggttaaaaccttgcctccactaacgcttttggctaaggctcgtcgcaggaggatttgctgagcagtgcgacgccttttggctaggccagtcatttctaaggaatgaagttcaagaacggaagctcagaggttcagttacattgttgggtttatctgacagatagaaaaaagcaaccgcactggaataaataaacgaaggaggtatgtaagatgatccttttactttggctcaaaagagcacacaaaaagacaaatttctctgataaagggctttgttaattagaattccgaataatttatattttgttagcttcctctgagatctccaacaagtgtcagatggcgtcaaaaaaaacaacttatatgaagctttttggcgtccgctaagtaaatgttgaggatctttacaggttatggctgagatttgacttcgtcgggggagaatttcaaaagcgaccacatccttcacagttgtagtcgcaggtgtaacagctctttgcaaaaggtgcgcagctgcagggattatagcacgggttgcaaaatggactgcgtccatagtcaagacatcttggcttaggatttaggacaaacggaggaccggcaaaccggtcgtagtagactttgggtgcccacttctttcgcttcctgcgacgcttcttcttcttcaagtagcatatgcactcggcgttgggtataagctcgcgaagagtttgctccaagttggtgagatcgcactcgcagccaaactccgtgggaaactcattcccggccacacaggtgcatttgccctcatgattgcagatgcattccgcgtcctcgtcgaaagattcatcgttttccgcatcgggagatggagcacatttgcaacagcgacaggtattcgcctttccagttgagatacaaattggcacctgttacggatatttggatgtttatagtgccgttctaccgcgaatgctatcacttgacatacctgtatgcacttgtacgtcttgtttttggcatcggtcacagttacttcccgaatttccggcgggcttcctctttccgataaatattccattgtgttgggtggtgttcccatatttccacttcttcccacttcttgattgtccatttcgtttccgagagatctcagattactacccatcaggcttggaccttgacaactacaagtatttccgactcccatcccaaccaggcgcttaaaactctttcttttcgtggtttgctggtcatcattttcttgggcattttgtgtttcctccggaggaggagtctgttgtttttcagggcactggcaatttcgtcgggtttcgggttggcgatttaaattgtgttcctcggcataggcaccatcgtagtatctaaaatatgaatgaagattaaaggtcaaattgaaatagtaaacatagtaatggtatcattttaccctcttggctgccccctccagtcatttcgattgttttgatacgcttcgctgtgaataacaaaaaataacttcaataaaatataaaccctaagcagaaatttaatgtttataaatacctatatcggcgcctgtcactgtgggaaaagaaaggttaggcgttacttttgctttataacaccataatgactcactagtaagcatattcattctcattctggggtcttggtcttccactgggtcctgttccatttccaggaccggacggtgggtaataatagctaaataaacaaaacataattaatatttaacataattttgtgaaaatgtagcttttagagaaattatttaaattctattgtaagttctttagttctatatgcccaaatggtttcgaaacatacccttgtagtccaccgcccggatctggccgaccactagatcccggaccgggatatcctctgggtcccggacaagaatatcttctgggtccctgaccaggatatcctctgggtcccggaccgggatatcccctgggtccacgacctggatatcctctgggtccgggtcctggatatcctctgggtccgggacctggatatcctctgggtccaggaactgaatattgttggcctggatattcccaactttgtccttggccatacggtggtggatcgttcttgctaaaaaaaaaagttatttacgtatggctttcaaagtgctcgctcctatgactcacttgactacgatcagcaggatggtgggttgagcttgaggctgtgctgtaacccgcgatggtgaattccctcccttgcccccctggggagctggagtagtgccaccgcgctgagtgggagaagaagccccatcgttaactggactgctgaccccacttcggtttggggtataagctatttcatctggattactttggtgatttttgtaatgattggtggtatgcctttcattcacatcggaaatggtaaccacactttcgactgattgaagtgtggaaatgtgattgttgttgtccttatcagttttgcgatcagacgtgaatccaatgggctccggccagggaaggaaatcggagtgcctcagtacacagttcttgcagcgacaggggctcttctcccgcttctcagtcggtttctcacagaacataatggcatctggttgtcatcaccaccaacatcctaacccaagcccctttaatgatctgtttgtatacaaaatttcaaatcgtttaaatttgatgggactgtaaaagattgctttaagatcattttgctccaacattattgattcctttaggtggcgccttttaaagtttatatactggactattggagcgtttttgattgaccctgtctttggaccttattaaatgcttagaattccttttgaccttagatattgtggaaatagatactttcctaattggatccgttcccgccgatgttatgtttggttggacctgcactcccttgttgcattggacattttcaaacatgactttatgggttcctggcgaattttccatttggttttcacttttagcattatttcgcttttttaaggaggacgttttgcaaatccttacaatatttattggattccgatgagtttcaccattgagctctgtagtgctgaccgccatatcgctggtggctatgatatttacaaaactattttcactgttgggttcagggtcacatcgatgggtttgatcttccgatgtcgttagcatagccttctccaattccttaaagtagtcctgctccacttccagctcagctagtttattgctcgcacttcgataccaatcatcatcgtccacctgctcctcttcctccatgtaggaataggtgaggtttcccgcttcttgacgataatcgcaactagatctataacttgatgttagaggggaatccagcaagtacatggattcaccagtaggatggtaatactccccgagatcgtccccttcttcgtctgatttaatacttggtggtggggccttgagacatggaggaggatatccagttgatgtcagggaagataccgctgtttcttcgttttcttgccctaaggaatagacttcctggcttctaagtgcgccgcaatgatctctacagcattcccttggacaccacatggttgtgccagcatcctttttggatgtttgctggatttctgagagcttgtttctttttaacggcgaatttgatgcttccaagatctttggcagatcctcggtactacttccttgattctgcatatgcacgtaggtagtggactttgacagccgttttcgttttcgctcctttaaccaaggcaaacgttcgagatgggatttcttttgaatataattttctggaaggggatagttatcgaaggatgaaaacggtggaacagattgaacaatcagcggttgcacaggcagctgcaacacctgaatcgctggtagttttcctcgcaactggtttatttgattaaggctagcctgcatctccatttgcttgaaataattgcctatatagttgtttatacggtcaattgcttcacacataacatcggttagaactgaatggtgatggcttgcttcagagctagaggtttgatcttcattattatcgctggtattcgatttttcatgacgttcttctagtatttcgacctttttgtcttgcaataatctatctaatcccagtaaaatatccccgagctcatgaccgacatgcggtttagttgtatcgcacgtttcttccggtggaaatgagcttacattatcatattcatacctttctccagcatctaagcggttaaaaggcggaaatatatttccataaacattaggcattgcgttggtgctaaaatcgaatccccattggtttcccatctgcatagggtcatacattggaggatatgctataaagaagggatcccttcttcgtcttcttcgagaccttggcgccacaaagccattagcttcgatattaaagctcaatcgacgggttcttcgcatagtggtggttcggtttacaataggtgcagcggtatccagtctcatctgggatcttcgttgcctctccaacatttcaaaaaaccctcttatcaacaataaagtgctcacttgccaatagcaggtggagaactaatattttaaatgaaaattttgacagcttgtctaaaaaagtgaatacacttcacatagagctaaaaatatactattgattacaaaggaaggttcactaattacagcagcaaattagaatctttagttaagcgcaaagaatttttttattcgtctttgaaagtttgttttttgtttaagaagtgcttagaatgatgagttaagaatggatacaagtataaataagtgtgagtaatcactgcagttcagcggaatcgaatgaagtatggaattttaatatttatagttgaatcggaaatcgatcttcactttttcaggcccattggcttgctgcgtactccgatgcgggtattctcgccggggatctggctgcgaaaatgagcccactccttctgatagtactgaaataatgccaccggatcgcagtgcatggattttcgacgttggtgaactaaatggggaaagatgggaatgactattaagttattttaaaaaatatcaatgtgttaaaaattacttacccgaaccagatctccgattggaggcgctacgcggatgcgacttgctccggcggcggcgttgcatcctgaggcggtcttcattagcctccgattcgctgctagaaatagatggtgccttttcccggcgggtcttgctgcggctgcgacgccttccgttcacctgagatttttggggaactgcattgttagccgacattggaggcacagaagcatccatcaagagttgttccttaaaaaggcgagctaagtcagcaaaactggccccaccatcggagcgctccttaagatcgtcatccttgtcagtcttgcactccttctccttggcagatggacacggacatgatggagccgcattctccttatccttatccaaacttagtttggcacgcgagctgacggtgccgcgcttatgcaggccgctgaaatcgctctcctttgcgttctccgccaggcgttcctcatgcttgatgagcttgcgcaagtctatattgggatgggatcggatcagagaagtagccattagcagggaaatgaggatagcggatagtggatatgagataggtgcggttaatcaggatggcaagatgtaactagaaaatgacgtgcatataactaaccgaatctgtatggttaaaaaaactggacatcgactattccaacctaagaacatgaagctttgacccagatcagaagagagaaattacacaaatgtttttttacttgacattactactatcagcccatgcgatgtgcattcaataaattaaaactttcctttgtatgtttaattgaatatttaatttaatttactctttgttttaatatttttacaattgcttttggttttttgtttaaagttaattgtttttctgttacatagtttacgtttttctccttttttattttgcttgagcgttgactttgataatagtacatagctaagaaaatgatttccacaattaaaaacaaaaacgattaatggaatctttactacttaaaaactaggttgaaaatgagcgattttggaatagtccgaattggttgatgagaattcttttggggggcagggaatttgagctaaactaagattaaactaaggcttatgtacgtattttcgtgtgtgattgtttgtgggtttttattatgctacacttagctgataaatgggatgaactcttctaacgatctaactcgattaaatttgacggacttcatttgacagttagagttttcagaaaacattaatgatattcgcttttacacaattttggcagtggttctttgtctcaaacgagtatattaaatgggtacattagaccgtttatcatttaatttccactttgccaaatcagaaaaattaaaactggaaaattgactgaattgaaatcgctgtgactttgtggttttggagggatttgtggcctaaaaatacctaaaaactgaaacttattactcatcgtggctgtacacactaaaagctatacgtgattggtgctgaatgatgcgtttcttgatctgga

SEQ ID NO: 26855 - DNA, 4077 bp, DROSOPHILA
atggctacttctctgatccgatcccatcccaatatagacttgcgcaagctcatcaagcatgaggaacgcctggcggagaacgcaaaggagagcgatttcagcggcctgcataagcgcggcaccgtcagctcgcgtgccaaactaagtttggataaggataaggagaatgcggctccatcatgtccgtgtccatctgccaaggagaaggagtgcaagactgacaaggatgacgatcttaaggagcgctccgatggtggggccagttttgctgacttagctcgcctttttaaggaacaactcttgatggatgcttctgtgcctccaatgtcggctaacaatgcagttccccaaaaatctcaggtgaacggaaggcgtcgcagccgcagcaagacccgccgggaaaaggcaccatctatttctagcagcgaatcggaggctaatgaagaccgcctcaggatgcaacgccgccgccggagcaagtcgcatccgcgtagcgcctccaatcggagatctggttcggttcaccaacgtcgaaaatccatgcactgcgatccggtggcattatttcagtactatcagaaggagtgggctcattttcgcagccagatccccggcgagaatacccgcatcggagtacgcagcaagccaatgggcctgaaaaaagggttttttgaaatgttggagaggcaacgaagatcccagatgagactggataccgctgcacctattgtaaaccgaaccaccactatgcgaagaacccgtcgattgagctttaatatcgaagctaatggctttgtggcgccaaggtctcgaagaagacgaagaagggatcccttctttatagcatatcctccaatgtatgaccctatgcagatgggaaaccaatggggattcgattttagcaccaacgcaatgcctaatgtttatggaaatatatttccgccttttaaccgcttagatgctggagaaaggtatgaatatgataatgtaagctcatttccaccggaagaaacgtgcgatacaactaaaccgcatgtcggtcatgagctcggggatattttactgggattagatagattattgcaagacaaaaaggtcgaaatactagaagaacgtcatgaaaaatcgaataccagcgataataatgaagatcaaacctctagctctgaagcaagccatcaccattcagttctaaccgatgttatgtgtgaagcaattgaccgtataaacaactatataggcaattatttcaagcaaatggagatgcaggctagccttaatcaaataaaccagttgcgaggaaaactaccagcgattcaggtgttgcagctgcctgtgcaaccgctgattgttcaatctgttccaccgttttcatccttcgataactatccccttccagaaaattatattcaaaagaaatcccatctcgaacgtttgccttggttaaaggagcgaaaacgaaaacggctgtcaaagtccactacctacgtgcatatgcagaatcaaggaagtagtaccgaggatctgccaaagatcttggaagcatcaaattcgccgttaaaaagaaacaagctctcagaaatccagcaaacatccaaaaaggatgctggcacaaccatgtggtgtccaagggaatgctgtagagatcattgcggcgcacttagaagccaggaagtctattccttagggcaagaaaacgaagaaacagcggtatcttccctgacatcaactggatatcctcctccatgtctcaaggccccaccaccaagtattaaatcagacgaagaaggggacgatctcggggagtattaccatcctactggtgaatccatgtacttgctggattcccctctaacatcaagttatagatctagttgcgattatcgtcaagaagcgggaaacctcacctattcctacatggaggaagaggagcaggtggacgatgatgattggtatcgaagtgcgagcaataaactagctgagctggaagtggagcaggactactttaaggaattggagaaggctatgctaacgacatcggaagatcaaacccatcgatgtgaccctgaacccaacagtgaaaatagttttgtaaatatcatagccaccagcgatatggcggtcagcactacagagctcaatggtgaaactcatcggaatccaataaatattgtaaggatttgcaaaacgtcctccttaaaaaagcgaaataatgctaaaagtgaaaaccaaatggaaaattcgccaggaacccataaagtcatgtttgaaaatgtccaatgcaacaagggagtgcaggtccaaccaaacataacatcggcgggaacggatccaattaggaaagtatctatttccacaatatctaagcccattggattcacgtctgatcgcaaaactgataaggacaacaacaatcacatttccacacttcaatcagtcgaaagtgtggttaccatttccgatgtgaatgaaaggcataccaccaatcattacaaaaatcaccaaagtaatccagatgaaatagcttataccccaaaccgaagtggggtcagcagtccagttaacgatggggcttcttctcccactcagcgcggtggcactactccagctccccaggggggcaagggagggaattcaccatcgcgggttacagcacagcctcaagctcaacccaccatcctgctgatcgtagtcaacaagaacgatccaccaccgtatggccaaggacaaagttgggaatatccaggccaacaatattcagttcctggacccagaggatatccaggtcccggacccagaggatatccaggacccggacccagaggatatccaggtcgtggacccaggggatatcccggtccgggacccagaggatatcctggtcagggacccagaagatattcttgtccgggacccagaggatatcccggtccgggatctagtggtcggccagatccgggcggtggactacaaggatactacgatggtgcctatgccgaggaacacaatttaaatcgccaacccgaaacccgacgaaattgccagtgccctgaaaaacaacagactcctcctccggaggaaacacaaaatgcccaagaaaatgatgaccagcaaaccacgaaaagaaagagttttaagcgcctggttgggatgggagtcggaaatacttgtagttgtcaaggtccaagcctgatgggtagtaatctgagatctctcggaaacgaaatggacaatcaagaagtgggaagaagtggaaatatgggaacaccacccaacacaatggaatatttatcggaaagaggaagcccgccggaaattcgggaagtaactgtgaccgatgccaaaaacaagacgtacaagtgcatacaggtgccaatttgtatctcaactggaaaggcgaatacctgtcgctgttgcaaatgtgctccatctcccgatgcggaaaacgatgaatctttcgacgaggacgcggaatgcatctgcaatcatgagggcaaatgcacctgtgtggccgggaatgagtttcccacggagtttggctgcgagtgcgatctcaccaacttggagcaaactcttcgcgagcttatacccaacgccgagtgcatatgctacttgaagaagaagaagcgtcgcaggaagcgaaagaagtgggcacccaaagtctactacgaccggtttgccggtcctccgtttgtcctaaatcctaagccaagatgtcttgactatggacgcagtccattttgcaacccgtgctataatccctgcagctgcgcaccttttgcaaagagctgttacacctgcgactacaactgtgaaggatgtggtcgcttttgaaattctcccccgacgaagtcaaatctcagccataacctgtaaagatcctcaacatttacttagcggacgccaaaaagcttcatataagttgttttttttgacgccatctgacacttgttggagatctcagaggaagctaacaaaatataaattattcggaattctaattaacaaagccctttatcagagaaatttgtctttttgtgtgctcttttgagccaaagtaaaaggatcatcttacat

SEQ ID NO: 26856 - protein, 1277 aa, DROSOPHILA
MATSLIRSHPNIDLRKLIKHEERLAENAKESDFSGLHKRGTVSSRAKLSLDKDKENAAPSCPCPSAKEKECKTDKDDDLKERSDGGASFADLARLFKEQLLMDASVPPMSANNAVPQKSQVNGRRRSRSKTRREKAPSISSSESEANEDRLRMQRRRRSKSHPRSASNRRSGSVHQRRKSMHCDPVALFQYYQKEWAHFRSQIPGENTRIGVRSKPMGLKKGFFEMLERQRRSQMRLDTAAPIVNRTTTMRRTRRLSFNIEANGFVAPRSRRRRRRDPFFIAYPPMYDPMQMGNQWGFDFSTNAMPNVYGNIFPPFNRLDAGERYEYDNVSSFPPEETCDTTKPHVGHELGDILLGLDRLLQDKKVEILEERHEKSNTSDNNEDQTSSSEASHHHSVLTDVMCEAIDRINNYIGNYFKQMEMQASLNQINQLRGKLPAIQVLQLPVQPLIVQSVPPFSSFDNYPLPENYIQKKSHLERLPWLKERKRKRLSKSTTYVHMQNQGSSTEDLPKILEASNSPLKRNKLSEIQQTSKKDAGTTMWCPRECCRDHCGALRSQEVYSLGQENEETAVSSLTSTGYPPPCLKAPPPSIKSDEEGDDLGEYYHPTGESMYLLDSPLTSSYRSSCDYRQEAGNLTYSYMEEEEQVDDDDWYRSASNKLAELEVEQDYFKELEKAMLTTSEDQTHRCDPEPNSENSFVNIIATSDMAVSTTELNGETHRNPINIVRICKTSSLKKRNNAKSENQMENSPGTHKVMFENVQCNKGVQVQPNITSAGTDPIRKVSISTISKPIGFTSDRKTDKDNNNHISTLQSVESVVTISDVNERHTTNHYKNHQSNPDEIAYTPNRSGVSSPVNDGASSPTQRGGTTPAPQGGKGGNSPSRVTAQPQAQPTILLIVVNKNDPPPYGQGQSWEYPGQQYSVPGPRGYPGPGPRGYPGPGPRGYPGRGPRGYPGPGPRGYPGQGPRRYSCPGPRGYPGPGSSGRPDPGGGLQGYYDGAYAEEHNLNRQPETRRNCQCPEKQQTPPPEETQNAQENDDQQTTKRKSFKRLVGMGVGNTCSCQGPSLMGSNLRSLGNEMDNQEVGRSGNMGTPPNTMEYLSERGSPPEIREVTVTDAKNKTYKCIQVPICISTGKANTCRCCKCAPSPDAENDESFDEDAECICNHEGKCTCVAGNEFPTEFGCECDLTNLEQTLRELIPNAECICYLKKKKRRRKRKKWAPKVYYDRFAGPPFVLNPKPRCLDYGRSPFCNPCYNPCSCAPFAKSCYTCDYNCEGCGRF

SEQ ID NO: 26857 - DNA, 3302 bp, DROSOPHILA
ggcggattctcctgtcttggatgatctcgccatcggtctccgtcgcagctacttttttgtgctatattaatatttcttttgagatgcctttataacataaatatttgtaaatcaaatataattttaatttaaaatttgatgatacaataataaacataaaacacaaagaaattttataaatacgtccacaatacgtagtccactcggaccgcattgaatcggtccaaaagaactttttactttttgccttgcggcgcctaaattgggatgcaaaccgtatattacctccttattccagtagactacttttaattaatttaccgtccctagctaaccgtagaactaagtttggatcagtctttatttgtaagcttattcgtgttgatgttgagaaactgtataccccttatcttaaatcattgtagatctaactatgagatgcatgacccttacatagtattatgttctgactatatctcattatcccattatctgtaatcttgactctctgccgcccttaaagcaatcaattttaatttttttgtgtaccatggtaaccatggttcgtggaggaacattgttccacaatatcggagaacccgttgccaaaccgaaacctaatcaactttatggttcaagccccgttacttctctttgtaaaaaaataatataatatttggataaatattcgatgtggacctgaaagaagaatgctctttataaggcaaaatgtacgcttaaaaccaaatcttataagttatcatacttgtcatactcaatttttacatataatactggaattaaaatacatgtgatataacagagggcgtggtctcacaaaaatgcttttcttaaaagaagagcaaacctaatatttggaattaatgccaaaattaattttaattttttatttaatttattttttatttaaatagtttaattcgcaaatatgtggttatataaaataaattagaatagaatacaggtcaagcttttgtgctaaagttattaaatgcagtccttagccttttgtccaggaatgcctaggagctcctgactaagagtcctgagtaatgggtgcttgccgcaaccgcaaagtccacgaaagtcatctaaatcaagggcccaaatcatgccgccacctagctgcaagctcttaataaactgagattttcttcgaatagttgtgacatcatcgtatgatatccactggttgccactatatgcataggatccgaatataccttcttcatccctcaccactttccagtcatcgttgacgactttttcgcaaatttcatagtacgccaagaatccatccgctctagtaaaggttcctgccttccccggacccactgttttatcatttagtgaccggcgattttggtcagctagcgtaaacgtctgtccgtacattggcattcccataaccagcttgtcgtttggaatacccctttccaaccagtaatggatgctgaagtttccgttaaggtataggttttcgtcaccccctctgtgaaagagtggggctatttggccagtgcgcatatcccagtgaccgtgaaagtcgtacgtcatgacggccacccagtcaaagtacggagagagctcaaacacattgtacccggcatcaataaccattttactgggcgagactgctgccgaaagaataagaccgttttccttaaaggcttccgacagttctttgacaagagcaacaaatccatccttttccgtgggattacctctgttgcagttaacttgccagcatacaggaaactcccaggctaagtccagaccctcaaaaccgtgttgttctagaaaacttatcacacttgcgacaaagcgcctcctggactgtgaattaagaacaagacgtgcgtacttgctgcccaacgagtcattccatccaccaatggctaacatgactcgaaggcctctttgcttgtattctacaactcgctcatagaaacggttgtctatatcggtccaggagtcatgcgtcttaatggttaacgacttgctatcaagcaccgcgaagccgtaaatgaggtgggtgcacaagttggcgtctatatcttcaggcacaaacttgccctgtgacgaacggtaccatgcccagctcgtaaagtaacagactactttgtatgagttattgatgattgggggctctgtaatgacacttgtaggattggggcgatggaccgctggctcctgagttctctggtttgatcccaatgaggactgaacattggtaggccagtcgcagtaggttttattccattgaagtcccaaaggacagctgaaaatacaaatcaataaatacaagataacttataattaaatttgtcgcaacttgattttaaaataaatactttgccttacaagccccagccactattaattctaggacttgtttattgttcagcacaggtattttcaaaactactacagattacgcataccaagatattttgtctgaaggataattatacccgttactcgtaaagtgaaagggtacactagattcgttgaaaagtatgtaacaggtataagaaagcatttccgactatataaggtatatatattcttgatcagaatcaatagccgagtcgatccagccatgtctgtctgtccgtatgaacgtcgagatctcaggaactaaaaaaagctagaagattgagatttaccgtacagattctagagacatgacgcagagaaagtttgtcgacccatattaccacgcccaatataaagcccacaagctgcacaaaactgccacgcccacactttagataaatgtgttagaaatttgtcacatttttattagtcttgtaaatttttatagacttgcaaaaaaaattttgcccactctaacaccctgcttaggctgacggcagagtgcacgagctcaagcgataaagcgagagaggagtttgcaacctgctttatggcttcaactcgctcagagcgtacgactgttttgttgtattctgtgctttaattgccgtttattttcaaaacacgtttttttgttttgttccatttaatgcttgttgttaattatgttattaattataacatagttattttgtataataattataattaaacatgttattattaatttttggcaaggcagtatagggtctttaacaaaatttggacaattctccgtcaaacgactactatttttatttaaaatataatcaaaagtcgaaatagacatcagagcacagttatagaaccatattgagcggcttcgtaagccataatataaatggttgaattcgcctttttca

SEQ ID NO: 26858 - DNA, 1302 bp, DROSOPHILA
ctgtcctttgggacttcaatggaataaaacctactgcgactggcctaccaatgttcagtcctcattgggatcaaaccagagaactcaggagccagcggtccatcgccccaatcctacaagtgtcattacagagcccccaatcatcaataactcatacaaagtagtctgttactttacgagctgggcatggtaccgttcgtcacagggcaagtttgtgcctgaagatatagacgccaacttgtgcacccacctcatttacggcttcgcggtgcttgatagcaagtcgttaaccattaagacgcatgactcctggaccgatatagacaaccgtttctatgagcgagttgtagaatacaagcaaagaggccttcgagtcatgttagccattggtggatggaatgactcgttgggcagcaagtacgcacgtcttgttcttaattcacagtccaggaggcgctttgtcgcaagtgtgataagttttctagaacaacacggttttgagggtctggacttagcctgggagtttcctgtatgctggcaagttaactgcaacagaggtaatcccacggaaaaggatggatttgttgctcttgtcaaagaactgtcggaagcctttaaggaaaacggtcttattctttcggcagcagtctcgcccagtaaaatggttattgatgccgggtacaatgtgtttgagctctctccgtactttgactgggtggccgtcatgacgtacgactttcacggtcactgggatatgcgcactggccaaatagccccactctttcacagagggggtgacgaaaacctataccttaacggaaacttcagcatccattactggttggaaaggggtattccaaacgacaagctggttatgggaatgccaatgtacggacagacgtttacgctagctgaccaaaatcgccggtcactaaatgataaaacagtgggtccggggaaggcaggaacctttactagagcggatggattcttggcgtactatgaaatttgcgaaaaagtcgtcaacgatgactggaaagtggtgagggatgaagaaggtatattcggatcctatgcatatagtggcaaccagtggatatcatacgatgatgtcacaactattcgaagaaaatctcagtttattaagagcttgcagctaggtggcggcatgatttgggcccttgatttagatgactttcgtggactttgcggttgcggcaagcacccattactcaggactcttagtcaggagctcctaggcattcctggacaaaaggctaaggactgcatttaataacttta

SEQ ID NO: 26859 - protein, 305 aa, DROSOPHILA
MLAIGGWNDSLGSKYARLVLNSQSRRRFVASVISFLEQHGFEGLDLAWEFPVCWQVNCNRGNPTEKDGFVALVKELSEAFKENGLILSAAVSPSKMVIDAGYNVFELSPYFDWVAVMTYDFHGHWDMRTGQIAPLFHRGGDENLYLNGNFSIHYWLERGIPNDKLVMGMPMYGQTFTLADQNRRSLNDKTVGPGKAGTFTRADGFLAYYEICEKVVNDDWKVVRDEEGIFGSYAYSGNQWISYDDVTTIRRKSQFIKSLQLGGGMIWALDLDDFRGLCGCGKHPLLRTLSQELLGIPGQKAKDCI

SEQ ID NO: 26860 - DNA, 15723 bp, DROSOPHILA
caatatcttttgggtgcttctacaatgcagtttcagctaaagttcttaagtttcagtaatccttgcatgcacaactgagcttacctattttctaatgttttatataatttacaaattactttttataagcgatatcgtgcttaattatttattaccatttttcattagattctcaatttagaaccattatttcaagctgagataaaagctaccataaaggaaaattttaaaggtttttgggacagtaatttaaaaaatcatttaattaacactgcgcttttaagttgtatatccctatccctctatttaaatcttggatctatatataatttgcaaccaggcaattatacaaacgggcacgggtttctattcctttaatcgagaataaatagcacggtatttaattcagccaaatcaaatcctaggagctatattaatcaagtattttattagataatatttttttctaattttatacaatttatagatttttgtgctatttatttaaatgaaatatttaaacatgttaaacatgttattcattttgttaatgaattgtgactatgacactttgatgactgaaatgattgaaatattgtttcgaaaatagataaaaacaaccctttaaacgcttactgggtttttaagcctgaacaaaatctgctaggtgcaccccaatttatactacggttttttagtgtgaatcgattttcggagcacccttgtatatatatacagcttaatattaagctttttatttctgttttttatttttccttctctcatatacgtattacgagtatagaagcttaaaaaagttaattcaaaatataattaaagaaaatttttccaattttcaaaagagtgaggccgtatcagttcagtgagtctatgtctctggagttcctgatatcgaggcattctagtcgcttcataccaggaaaaatccaggaaatcgactatggcgtcacctgtttttttctaatattatttgaaataaaagagaaaagttagtttacctcatagtaagcaagaaatccagctgctctggtgaactctccagcttcacctggtgcaggggctttggcatttaagccactgctgttggtattttccaaagtgaacgactggccgtatagcggaatacccattactaatttttgtgatggtgctcctttttccatccaatagtttatagaatagttctgccaaacaaagaattaaaaaagtattttacttcgaaatttcattgcttaccacgttaaaatattcaaagtcatcatcgggatgatgatacagcggtgccacatgtcctgtttttttatcccaatgtccatgaaaatcatatgtcatgacagcgatccaatcaaaatagcgagagagctgagggatgtcgtatccggcatcaatgattttcctgctaggcgagacagcagtggacaacataagtccacgagggcgaaacgcttcagaaagctcctgtacccaggcagtgaaaccgtccttttcctcggtagaccctttgttgcactccgtttgccagcagactgggtactcccaatctaaatcaaggccctcaaagccgtatttttcaataaactcgagggcgtggcgcacaaaacgggaccgggccattggacttcgaactaggcggctgtacttatcgccttgcgaatcgttccatccaccaagtgctaagctaaccttgatgcccttgcttttgaggctggtgacccttgtgtaaaagttgttttcaacgtcagcccaggaatcatgtgttcgtagtacaagttcggaatagtctaacactgcaaacccataaattacgtgagtgcacagctccgtgtttatgtcgtcgggagtaaagcgacctattcctttgcggtaccaggcccagtttgtaaagtagcaaataactttgtagtgactatcacgaggtttgggaactggtttttctgtggggtacgttggacgcaaatgactactgggggtttgtggagtcggaggcttcggcatagcgttcagctctgcctcttcgctgctctcactaccttttggattgcattttgcagctgctggccaatcgcagttcccaattctttcattatagtgcagccctggtggacagtcactagcctgaaggcggttccataggcagaagagatatttcgaacagtttcctggatagggtactctcttttcgcctttgcacgggtcttcttcgttggcgctactcgatttgattatttttaaatattttttgctagttacgcattgtacgttctcaggccagtcacaaagttttttgataccgtcccaatgcaagtctccgccacattcactgggtaccagtgccttattaacgcagatgtaatatttccggcagtttctgtgtgggtagtaatcaccttcagtgcactccaatatagttggacgcatatattgtggtcggcttgaggtagaatttacctgatgatgtgtggaaatctctgacggtttcttattaggtttcaaagtcgtctccggctttttagacgtttgaatcgggtttggataagaagtacttaggtgttgatcgagttttagtgagcattgggcggacgacggccagtcacatcctttagcttcgttgttccagtgaagaccgcttggacaaaactgttgctgtaactctcccgcaaaaaaacagtgatagtaagcgttacaattatttgagtcagcgaagaactcgccgcttttgcaattcgagggctgtaccactgggttgatccctgctggaatgaggattgtggtgtgagttggttgtgctgtagtcttagtcggctcgcgcggacgttttgtagttgaactccaccaggggaaggtgctcgtgatagtggtacttacaggactactgctgatctgcccgcttggcaaggaagttgtatgatcgtgattttgtcccaatcccccagaaccatcgctactaattgttgtcatttgaggcggcactggtgtcgccaataatgtaggacgcttacagttcggttgagttggcggctccgagtccaagcgacccaatgctctattaatggccctaagtaaaggataagattcattgcaacataggtttcggaagtcatcaaggtcaatggtccaggctgccactccggcaaagttgttgttagccgcatatcgagctttggcttgggcactggtggggtcttcatatcctacccactggtcgtttagcatagcgaatggaccgaatatcacgtttaaattccgatcacttatccaattaaactttgttaggcgctgacaaatctcgtagtaagctagcattccaggttgctttgtcaattcaccggcatctccaggtccagaggctgccactcctgggcctgcaagaatttggtgggcggttgccaatgtaaaactctggccgtaaaacggaatgctcaatacaagtttttctcttcgcgctcccatttttaggagtaactgcatggtatagtttgtattgtactgaggataagtgtccgatgataagccgtaaagtggactcacatgacctgttttctgttcccaagctccgtggtaatcgtatgtcattactgtcatatagtctacaatgtctgacaaagcgggaaaatcataagcctcctttataatctccttgtagccagagatggccactcccaactgaaatttcggatcaacactttgaaactcggtgcgtagttcacgaagaagcttagtcaggtttggcctgtcagtcacaggtccccttgagcaatcgctctgccagcacttcgggtagttccagtctaggtggagcccgctgaatccatgacgtagtaaaaagctgctcacactggatataaaaacacgtcgcttaagattgtcactgactaatcgggagtatttggaaccgctagagtccgtccatccacccaatgcaattagtacaggcacacccagcgatgtcactcgacggtagtattggttatccaagtccacccatgaatcgaattctcgaattgtaaggtgatcaggatccagggaggcaaaagaatagataatagcagagcatagattaggatcaatctgctctggcacaaaatgagcctcaccactacggtagaatgcccaattcgacatgtaacaaagaacttttttagtcattttgagatcattcctgtttgccaaccccaaagctccgtaggactgctggtgttgcaggtcagagtaccgatcaagtttatcggtgtgttcgatgttcatcattttaagcaactcctgatgcggcgagccggctcggtatgacttcggataatagtcttctgagtttccgcgggcaataaaagctgcgtacttatcggaaatggtcccaggatctaaattcacatgtgttaactttttgctttttagatcaactcctgcaacatcgctaacactgttataatatttagtgaaaatttctatgtgttccagtccgtcttcatcatttggcaatgactctacagaatcacgcacaaaagaacgtacatcagggttctttctgaacctagacgtgttgctctgataaagcttgggaatactctccactgcactcctcagcggtaggaaagcgtccccaaactcaggttttgtgctgttacggagtaggagtatggcatcaatatccaaaggaatgctctcaaccgcagaacgtatgaatgcaggtttatagttggattccgaatggatctgcagtttatcaacgcgaatgtgggcttttacagatatagccaagactacctgttaaacatagcgcggttggaataaataatacatgggatgcaggagataacttaccaccacaagcacacttgggacatacggatgcattttgaaattttgtataattcctgcaaaaagaatactattttacatgcaaggaaaagcaggttgttaatgtaatactaacactaaagaaaaaaaaatatttttatatatataaataaatatatcgataggtattgggaaataaatgagaaaaactttaaaaattgttaaaaaaaacagtgtgcgtgatttcagaattgtaaaaaggtgtggtcgttacaagtctgttagagtgggcgtggcgatatgtggaaacaaacttgcgtttatgtctctggaagctacatgcttaatctcaacattctagcttttatagttccgagatcgaggcgttttgttttaaggtgtcaaccttctagatgtatagttactaagatctcgatgttcatacggacggagagacggacatggtcagttcgactcggctattgttctattatttgtaattaattcaagtggtccaatttgttgatatttttcacatttttattagtcttgtaaatttttatagatttccaaatttctaaatccacccaaaactgcaacgcccccatttttgaaaaaattttcgatattttttcatagctttattagtcttataagttttgtgcaaacaagcggaggtaacgaagcggcgaatggaggacaaagtaacgatactttgtatgttagttttagtttcaaatgatcagttataataaacggtctcttgcaatctacaaaacttaaggaaaataactgtaattatataataataataattatatataatatagctgtaagaaattttagtcgtgtttaaatatatatttctataatgttttgaaacctaactcgtttgcctctgactaggatgtattccctgtgagccgcggttagcgaccaaaaggggccattcaggatgacaactgtttttaatttttggtaaagaatggcaaaggaaggacgggcatctacatgcatgatcctacaccacatctgagaaccaagcgatagcttgtagggtaaacgaatcttctgcccgttgtctgtgtcgtgaatggcgatttgccgtccgtttcttaattatcgtagcacgcaatcaacatcgataatcatcagaatgaaattaggctgagattccaggacaagaccatcaccccacctaaccgacatggagcagctggaaattcgcgtgtgcgtcctggaatatctcataacaccaccctagtcttatgaatcgttacaatacaatacaatacgctttttaaattaatgtactttatattagttggatacggggataattgacaacgatttacatgtgcatatattacaaaagcgggtgactttcccagcgaatggatttgctttttctgccatccgaatttatatttgttatcccttatccagcggtggtttttaataaattcctaaaatgtattagatttttaaattcaaaatcatcatgacccgatatataaccaaactaaaagtaaacacaacttctacttggagaccaaaccatgatcaacttattgcgcttcaatcaaactgcatcagtcaaaaaatttgaattttacaacgctgtgaaataatatgttttatactaaacatatttgaaagatcaagaaaatccaaaagaaaagcttctgaccgaggttgcgtggattagaattaagatctgtctgaatcgggacgagatcgtgaacagcttcaaatcaaagataagctattaataaagagtcttgtaatagtatacgtgaaaaagtctattatgggaataaaaatcagaataataattataataataattggctgcaaaatgggaactttaaacaaaataataattgaaattcaaataacaattttaaggtaccaccagaaccaatgtagatagatagttctataaggtaccaaaatattactattactatcgtcagactaataattataaaagggggtataataaaaataatttttcacaacaaaataaattttagacgatatctagcacaaaaacctgaaccgcaaatcccattaaaaagggaagcaactcggaccgtaagtcaaccagcccagaatggtattagaatatctaactaactgatgaagatcattttttagatcagaaccctgagtcagatataaaaaaacactattataaacactataaaaacaactattaacaatgggaaattggaattctcgcgtatgccatttgggttaacaaacgcaccgagaatatttcaaagagctatggaggatttattaagagaaaaagtcggaaaaacttgtcatgtttatatggatgatataataatcttttcaaataccgatctcatttaaataattttcaaatattttacaaaaagccaatatgaaaatctcacttgaaaaatgtaaattctttaaattagaaacagcattttttggttatattgtttctcacaatgtaattaaaacggatcctcagaaaatttccacaattatgaagtacctatatgaacattagagaagttttctaggcctcaccggctattaccgtaaatttgtccgaaattatgcaaaaattgcccaacctctaaccaaatacttaggaggaagtaataaaaaaatttctaggagaatgtctacaaaaatgaaaatacagttagatgacccagctgatgaagcttttaacgaacttaaagataatttaatagcacaagtggaatttgttcaacctgattataacaaaaaattcactttaacgacagacgcatcagatgtagctatcgggagcagttttatcacagggtaataaaccaattactttcatatccaaaacattaaataaaacccgaacaactttatgccacaaataaaaaagaattgttggcaatagtttgggctctgaaaaatctcaagaattacttatatggtgttgttggtatagaaatacaaacagaccaccaatctttatcattcacaatctcagataaaaacccgaacgtggaaatgaaaagatggcactctttcatagaaagttataccccgaaaataatatataaacccggaacaactaatgtcgtagctgacgcattatctccaataaaaataaataatattacaaacaacgacatagaacaatcaatcagctttgtaagatgtaatacatgagacccgtaaaccgttaaatcagtttcagcaagaactgtttttaacaacggggaagtatacaatacatgagtaatgtagagtttttgataagacacgacatataatcgaacatgacccaccagaaaatttattaggaatattaagagaatatttaccaccaattaggaattcattgcatattagaaggtctttatcatattcaatttcctttaaaaaataagttcagtaacaaatttctttttactaaaatatttcaacatgacgtagagaataatgaagataaatctattataatagaagaaacacatagtcgagctcatagaggactagacgaaaattacaaacaaatcgattgtttatattattggataaaatttatttatcaaattaatgtaatacataagaaattgtacaatttgcaacgaaaacaaaaatattaggcatccaattaaaattcctattggggaagctcctaaaaaaggagaacatttacacttcgatatttatttcgcgcaaaatcttattttcttaacttgcattgacgcgtattcaaaattcctagtagtaaaagaaattcaaaataaactaaacatcgataatgaaataatggaattacttcaacaatttccccacgccaaagtaattatgactgataataaaccacgcttcagctctgcacaagttaaatcctttgcacaaagatgtggtttaactttacatttcgcagaccccagacacagtacctcaaacggacaagttgaaagtgcacattcaacattaacagaattagctcgttgcatatagaaaggatttaatctcactgactattcagaaataattattaaagccgcaaaaggattcaatcagagcattcattcaacaacaaatcaaaaacttttgaaattctctataataaaattgaacaccgaaaacacttcaagaattcttaagaacacacaagaaaaaatgtttgaaacacataatgaaggtcgtaagggaaagttaatatcatgtagggcggcaagatgtttatgaaaagaaacatggtgaaagaaataagctaaaaacaagatataagaaacaggttgttatagaaaacttacctaacaaaataatattcaatagtagaaacagaattatttacaaagacattattaagttttaacaaatattatattaaaattacagaaaatgcatttcctaatgcttataacaccattcgtaatgatagtcaatcaatgatagtcagaaataattgattactccaatcactaatttttcctgttcaaagacgaaaaggatgttcttacttatgaatcatatgccaaattattccacgtaactaatttaagtttttataaataaataatcgatctagaatcaggatatataaaaaaggttcaaataaaaggtcacaatgggaaataacttacgaactacaattaatcgaattaattttgtcacagctgatataaactagatcaaaaaggggaataaatgagttaggcactgcttggaaatggttagctggaactccggatcatgatgatttcattacaatacagaataaaataaaccaattaattgaaaacaataaccaacaatttattatcaattccaaattgtttaacgagataaaatcactttacgatcaagaattgtcgttaagaaaacatcgtttacgattgttaacatttgacttgtaaaacataattgatactattacactggagaaaacaaaaatgttatataatgaagacattaaagaaatattgtattaaatcaccaacaaaagcctgtaattattgcagatttaatggatatgtctgtattcaaaatttactacataaaaaactcataattatttatattaaataccctgtaataaaaaatatatgcggatatttattatgccagatccatttcacggtaatgatggaataagttatcagatcgtcaaatgcgaaaatactttttatgaaagatctaattttatgaacgaacatttttattaactaactaaagataaaaattttttatccgcttactaaattgaggaaatcaatttgcactaaaatacgaggaaaaataataaattaataaaaaataaataaatactgacaaagaattttcaacagaattaagagagcgtttaaccgatattcacaatgaagcggggcgcgtcattttagaaggggaaagttatccaagccataaatatagcactctgccccagttgataaacaaatttcaaactccaatctgagaaccattgcctttgcttttgtttttgtcgccaacacttagccacccgatcaataaccaatcttaaagtaaacacagcttctacttggagaccaacttattgcgcttcaatcaaactgaatcagtcagcaaatttgaattttacattgctgtgaaataatattgtatgttttattctaaatatatttgaaagtttcagaaaatcttaaagaaaagcttttggccaaggttgagtggattagtattaaaatttagataatcagtcttaatcgatacgagattgtgaacagcttcaaatcaaagataagctagtaataaagtgttttgtaataaatctatattatttttgatcaattgatcaaaataattctcgttttgcattgccttaacgttccaattatttgaatatagcatatgaatagtaatttcaaaaatgtcttaaaattattgtgtcaaattacagtaaacattgtctagtacacatcgattcttaagtgcttgtcgtcgtccctaaagaaagcaaatttgcattaaataggtcgcatatttttatatatgtatatagtgacatatgtagtgctcaaccacataacatatatttcaacatatacctacctatacttagcaacaatagaacatagaaccaagaatgccttagcacataagataaacaattattagaaccccaacttcttcataaacatccgcagtcttattcgttattcccactagaagggtgaaaactgcttacacaactttaagggtcaaaactttccacgtagctcaaactcggctgatctgtatccatgcgaaaaccattcaagagagcgcctaattatcgtaaacatacaataaatgagagcctatgtacgctcaatatgaagaagtaaataagctcaggcaagggtttgcaaagcgtttgctttgcaaattggctttagattttattcatacttcaattgtgtaagacgtgaatttgtctccgacgttcgcttaagtttttggataatacaaattttttttttatgaaccaacaaaccgcgaagttataattatatatattttaaacggtgtttttttctttttttggaacatttttgttttcatttaaaaaagttataaaactattccatattgatggactttatattaatggagtaaaatatactgctcacaatgccctattgaagttttgcatcgaaattcgacaaaactccaaattatgtagataaattggtattagctcaaaaaagctggattcagaaaaattgaatttttgaaatttgaaagatggaaacgtttgcccatttagttctttttccacgtccaattttcaagatctgatatattttttaaatcgcaattacatcgtttgcaaacgcttgtccaccctttaaagttatactttagactatactttagaaaatataagacaataaagacagtctcggtctattaagaattaagagaataaagcgtttgcctatctcttaaattaaatattattcatcgtcgacgactccgttgagattactctcctcgcattactctctctcctcgcatcacaacccaagtaatcgcatcaaccagaatcttcttttcaaaaaaacaagaatcaaaacaaatcttcataaaaaggcaaaaataagttgaactactcagcacagtgcaaacaacccacaatttacgaaccgaaatttattgtaataaccagaacagatggggaaagtttcgaaaatttcaccatttgtgattaaaaaagtcatcgacttcacatgcgttccaaaatactcgacctggaacattacaagtcaaaactatagggctttaccaagcagttagattaatgaacatgaagacgttccataattttaaagtaaatgtatccaagcacaacacgttgaacttggacacatcacgaaatttttctccaactgttcttcagctgaacacaccaccgaatgcacaaggaacacattctgcattaactgcagtccggtagacaaatcatgtccagcctttctcaagcaaaaaacgatcacagctatcaaggtcactgagcgagtggattttaaaatagccaccaaaatgtattacacccggcagaccgacccatcaacccaagtaatacgcaaaaatatctaaatgtaataaagcacccaatacaaacacccaaatggaacaaaataaaaatcccaaacaacgacctttaatgaactacgacgacgttttgaacaacaaaccttaaactttccgaaaccgtcaacacgtcttctagagtaaattttaagccccatttatcaaaaatgtctctaactgtaattcaatggaatttaaaatgatgtgtacacaactacaactaactacttattctaatcaaaaaatactccgcacacataatttccctccaagaaagccgcatacaatacacaaataatttaccaaccccaataaactacaaactgttaacaaataacagttatgcaccaacaaatttggtggcgtagcactactactactactacaccatccacaacatcacaagtgatctcaaagcaatagcctagcaatatatacaatctaagccaaaacaagagagaacgctatagttgagttcatcgactatcagatacccgttactcagctagtgtgaatgccaacgcgaaatgtaataatttttatgggatatcgattgatattggggaataaaatgagaaaaaatttcaaatatgttcaaaagtgtttgcgtgaccggtttggcggctttaggggtctagagtgggcgtgtcaaaaagctttttggcaaatcgattgaaatttacaaaactattaaaattatgaaaaaatatccaaaaaattatgaaaaatgtgggtgtggcagttctgggcggtttaaggtcgttagagtgggcgtggcaaaaattgattatgcaaatcgatagaaatttacaagactaatacaaattagcctttattgttcctgagatctcgacgttcatacgaacagacgggcatggccagatcgactttgctatcgatcctgtccaagaatatatatactttatatgatcggaaacgcttcctagtatagccttatgctctacgagtaatgggtataaaaatctatatttaacaaacaaaaaacttataaagctttactttataaaaaaaactaggtaagattacagtcatttcagtagaaaaaggccaggtggacaagaaaatatttaaataaattaacaaaacgcacaaaacagcaaggacaaaactattggaaaacatttttatattttttcaattattattgtcttatcacaagcctcaaaaactgtcacgcccacatttttaaaaaattaaaaatttttttttcgtttattatttgttctggccaaattctatcggtataccaaaaactttttaccgcggacactcaaacgcacttttgaatttggtttgattaattatttgtttttccgacttctgtcaatatgcctaaaataattaagaagatatttgaaaatgctatgtaattgttcttaatcggtaagaaaaatcggtataaaccatttttttttaatatacaattactacagaaagataactttctttattgttgtgtttttatatatatgatgtatatatataattagtaccacaaaaattatctgttgttcatagaaaaaaataatattgtttactcacgttatataaatcctaaattgccatggctgtccatccgtttttcattagttcttaactataaataaataaatcgttcagaaaattttatcttagttaattgtatgaattttatatattaccatccatttgcttaattcaataaaaatattttcttcgtacatttttgttcttttcgcatatttattaggcttttatgaaccggtttgcttatttggtgtaaaattaattttatatatttcttcgtgaatccagacaaagtacgacagcgaattaacgtatagcaagaaacagtaagaagcgtatggaagagttaaaaaaaccaaaaatcaaaaagaggtttaacaagttttcagtttatctacttgaggcagggaaccaattcgggttttggccgttttgtgggagttcattgaacgccaagaactttgatcggtcttcatatcctcgttttgctttcacgatggaacaactgagaatgcgtgttatttttgttgttgatcaattaatcaagtattttactaacttacattaacattacatgcttttctcttttctacgttttaaacgtttttagacatttctattggcatttcaacgaaagtacattttcccttagggcgcggttacgaactaatgtcacacttttataaaaaatctagcaatgccatgctatgctatcacttactgagttgctgaaggcggcggtaacatccgataatttgcacacaacctttcacaagtgtgatcactataaaactgtaggtgtttgagctgaggacgcttctatttatacttatacatttttcaataaaaaaaaaaaagggaatgccaccaggagagagcagcattattgaatcagagagttctatgtttctttctttactcactcagccaccagtgtcctatcctaattgtgtgtttccgcccaacaactacagaaggcgagaggcgaatatgtggcgggacacttgccaacgactttaatcgtcaagtctattatattaacgaaaaaagaactaagaaagtagacgccttataggatgatcgctttaaatattttttaccaaattagaacataatgtatcgaattaatgcatattttattttttaagttttatgcatataatatgaatatacatatgtatgtatatttatgtatgtctgtacgatttctatcggtataccaaaaacattttttcccgcccactcaaacaccaccaaagcgccacgcccttgttttaatcttaagatgtttttctcaatacactcaaatttttgaagacatataattctggattaatttgataaaactttataattcagctttcgtaataatattccattaaatgctttctattaactcattgtttctctgtaattaatcataaattgtagagtaaatggctgtactagattcgttgaaaagtatgtataggcataaagaagcgttgccgacaatataaagtaaatatatatattctggatcaggatcaatagccgagacgatctgactttgtccatatgaacacgtcgatttcaggaatgttgagattaggcatacagattgtagattgctacagccactctaacgcccaaaactaccacgaccatactttaaaaaaaatgttttcttcgttttatggtttgtcttgccaaattctatagttatacaaaaacctcttagggcacgtccctccctacagcaacaaaacgcccagaatggacacgcctacatttttaaaacat

SEQ ID NO: 26861 - DNA, 3899 bp, DROSOPHILA
atcacacttgtgaaaggttgtgtgcaaattatcggatgttaccgccgccttcagcaactcattaagaactaatgaaaaacggatggacagccatggcaatttaggatttatataacgaattatacaaaatttcaaaatgcatccgtatgtcccaagtgtgcttgtggtggtagtcttggctatatctgtaaaagcccacattcgcgttgataaactgcagatccattcggaatccaactataaacctgcattcatacgttctgcggttgagagcattcctttggatattgatgccatactcctactccgtaacagcacaaaacctgagtttggggacgctttcctaccgctgaggagtgcagtggagagtattcccaagctttatcagagcaacacgtctaggttcagaaagaaccctgatgtacgttcttttgtgcgtgattctgtagagtcattgccaaatgatgaagacggactggaacacatagaaattttcactaaatattataacagtgttagcgatgttgcaggagttgatctaaaaagcaaaaagttaacacatgtgaatttagatcctgggaccatttccgataagtacgcagcttttattgcccgcggaaactcagaagactattatccgaagtcataccgagccggctcgccgcatcaggagttgcttaaaatgatgaacatcgaacacaccgataaacttgatcggtactctgacctgcaacaccagcagtcctacggagctttggggttggcaaacaggaatgatctcaaaatgactaaaaaagttctttgttacatgtcgaattgggcattctaccgtagtggtgaggctcattttgtgccagagcagattgatcctaatctatgctctgctattatctattcttttgcctccctggatcctgatcaccttacaattcgagaattcgattcatgggtggacttggataaccaatactaccgtcgagtgacatcgctgggtgtgcctgtactaattgcattgggtggatggacggactctagcggttccaaatactcccgattagtcagtgacaatcttaagcgacgtgtttttatatccagtgtgagcagctttttactacgtcatggattcagcgggctccacctagactggaactacccgaagtgctggcagagcgattgctcaaggggacctgtgactgacaggccaaacctgactaagcttcttcgtgaactacgcaccgagtttcaaagtgttgatccgaaatttcagttgggagtggccatctctggctacaaggagattataaaggaggcttatgattttcccgctttgtcagacattgtagactatatgacagtaatgacatacgattaccacggagcttgggaacagaaaacaggtcatgtgagtccactttacggcttatcatcggacacttatcctcagtacaatacaaactataccatgcagttactcctaaaaatgggagcgcgaagagaaaaacttgtattgagcattccgttttacggccagagttttacattggcaaccgcccaccaaattcttgcaggcccaggagtggcagcctctggacctggagatgccggtgaattgacaaagcaacctggaatgctagcttactacgagatttgtcagcgcctaacaaagtttaattggataagtgatcggaatttaaacgtgatattcggtccattcgctatgctaaacgaccagtgggtaggatatgaagaccccaccagtgcccaagccaaagctcgatatgcggctaacaacaactttgccggagtggcagcctggaccattgaccttgatgacttccgaaacctatgttgcaatgaatcttatcctttacttagggccattaatagagcattgggtcgcttggactcggagccgccaactcaaccgaactgtaagcgtcctacattattggcgacaccagtgccgcctcaaatgacaacaattagtagcgatggttctgggggattgggacaaaatcacgatcatacaacttccttgccaagcgggcagatcagcagtagtcctgtaagtaccactatcacgagcaccttcccctggtggagttcaactacaaaacgtccgcgcgagccgactaagactacagcacaaccaactcacaccacaatcctcattccagcagggatcaacccagtggtacagccctcgaattgcaaaagcggcgagttcttcgctgactcaaataattgtaacgcttactatcactgtttttttgcgggagagttacagcaacagttttgtccaagcggtcttcactggaacaacgaagctaaaggatgtgactggccgtcgtccgcccaatgctcactaaaactcgatcaacacctaagtacttcttatccaaacccgattcaaacgtctaaaaagccggagacgactttgaaacctaataagaaaccgtcagagatttccacacatcatcaggtaaattctacctcaagccgaccacaatatatgcgtccaactatattggagtgcactgaaggtgattactacccacacagaaactgccggaaatattacatctgcgttaataaggcactggtacccagtgaatgtggcggagacttgcattgggacggtatcaaaaaactttgtgactggcctgagaacgtacaatgcgtaactagcaaaaaatatttaaaaataatcaaatcgagtagcgccaacgaagaagacccgtgcaaaggcgaaaagagagtaccctatccaggaaactgttcgaaatatctcttctgcctatggaaccgccttcaggctagtgactgtccaccagggctgcactataatgaaagaattgggaactgcgattggccagcagctgcaaaatgcaatccaaaaggtagtgagagcagcgaagaggcagagctgaacgctatgccgaagcctccgactccacaaacccccagtagtcatttgcgtccaacgtaccccacagaaaaaccagttcccaaacctcgtgatagtcactacaaagttatttgctactttacaaactgggcctggtaccgcaaaggaataggtcgctttactcccgacgacataaacacggagctgtgcactcacgtaatttatgggtttgcagtgttagactattccgaacttgtactacgaacacatgattcctgggctgacgttgaaaacaacttttacacaagggtcaccagcctcaaaagcaagggcatcaaggttagcttagcacttggtggatggaacgattcgcaaggcgataagtacagccgcctagttcgaagtccaatggcccggtcccgttttgtgcgccacgccctcgagtttattgaaaaatacggctttgagggccttgatttagattgggagtacccagtctgctggcaaacggagtgcaacaaagggtctaccgaggaaaaggacggtttcactgcctgggtacaggagctttctgaagcgtttcgccctcgtggacttatgttgtccactgctgtctcgcctagcaggaaaatcattgatgccggatacgacatccctcagctctctcgctattttgattggatcgctgtcatgacatatgattttcatggacattgggataaaaaaacaggacatgtggcaccgctgtatcatcatcccgatgatgactttgaatattttaacgtgaactattctataaactattggatggaaaaaggagcaccatcacaaaaattagtaatgggtattccgctatacggccagtcgttcactttggaaaataccaacagcagtggcttaaatgccaaagcccctgcaccaggtgaagctggagagttcaccagagcagctggatttcttgcttactatgaggtaaactaacttttctctt

SEQ ID NO: 26862 - protein, 458 aa, DROSOPHILA
MRPTILECTEGDYYPHRNCRKYYICVNKALVPSECGGDLHWDGIKKLCDWPENVQCVTSKKYLKIIKSSSANEEDPCKGEKRVPYPGNCSKYLFCLWNRLQASDCPPGLHYNERIGNCDWPAAAKCNPKGSESSEEAELNAMPKPPTPQTPSSHLRPTYPTEKPVPKPRDSHYKVICYFTNWAWYRKGIGRFTPDDINTELCTHVIYGFAVLDYSELVLRTHDSWADVENNFYTRVTSLKSKGIKVSLALGGWNDSQGDKYSRLVRSPMARSRFVRHALEFIEKYGFEGLDLDWEYPVCWQTECNKGSTEEKDGFTAWVQELSEAFRPRGLMLSTAVSPSRKIIDAGYDIPQLSRYFDWIAVMTYDFHGHWDKKTGHVAPLYHHPDDDFEYFNVNYSINYWMEKGAPSQKLVMGIPLYGQSFTLENTNSSGLNAKAPAPGEAGEFTRAAGFLAYYEVN

SEQ ID NO: 26863 - DNA, 3136 bp, DROSOPHILA
atgcagcggggtcaacgaactggccgctgaaaactcattagcgtagtgccgcaggcccaaatctcagtcggggaaatcggtcgaaatcggtcgaaatcggacgaaatcggacgagatcggacgagaaaccgggggaaatcggcgaaaaatcggtgcaggccggggaaaatgtagctttctagccgcatgatcgcacagctgaaaacagctgaaagcaaagcgacgagcgcgaatagcaaattgcaaggcaaacagctcgtggcggtcgccatagcccacatatacatacccccactacatacatatgtacatgcatgcatatatgcacttgtatctgaacaatcagcgtcaataagcagcgcaatcgccgttcgtcatcgcgctgctactgcagctgccgcacaatggcgaataataaaattagccacaatgacgaacaaagaagcgctggcagtgcaagtttgtaatggccattacaaaacaggctaatctgcgggaagttggctcgcagggagcctcgtccactgtcactggccaacagaggagggcatttagcgacgttctgataacgcggactcgtaagcctcttagccgattaattgatacattactctactatgccaagtagacgtgcaacagagtagctcggctttctatgccgtctaattgccattaaatgtactttacagctggcccgagcccgagcattggacaattacgtatacggcccgtgtgcactctgcactctctacttttgatggctggccatttggggcgtccattagacagagtgacaccgggcacactcgcacctcacaactcacacctcacacctcacacttcccacttggccatctcagatcacacattttgaaacctcccccctaggcgacaactcttcgccgagaagattgcgccaacagctgcacctgtggctatttccgcgttggcagcaccactggccgcaccgaaaataggaatccgaacagaagaagtcggatggggcttcgagaagtctattttcgatcgtcagatctcgaggtgcatgcagtacataagtcggccgatcagatcggagcaggcctgcagtcttgggagggggacaggctcctgggaatcctgctctcgcttatcctgcttggagtccctgtcagtgtccttctccttgtccttatcgctctcctcgctctccttgtcgctggccgccctgctgataaccacaaaggcgagcaccttcaggccgccgtggtgggcggctataacctcgggcaccagggacatgcccacggcactgacctccattgtccgcagcattcgctcctcggccacagtgccgagaatgggacctcccatgcaggctaagacgccgctgtgcaggaacttctggatgcccattcgcttgccaatctcgagtgccttctccagcaggtccttgtcatatgcgttcaccatcgagaatcggcggctgccaaagcgcggatcactgggaccctctagcggcgtctggtgcatcatgcccaccacattgatgtggtcctggacaagcattatgtcgcccagggcgaatccgtgatctacggccgctgcttcagaggtcagcatgatggtcctgaccccgcacaactgcatcacgcggacgggcagcgcacaggtggccaggttgtagccgtcgcaggagtggaaactgtggaccagcgctattatgggcgctcccatgaccgtgcccaagacgaagctgcagtccggctctatgccgtcggggaagttgggtatgtcctcgtagggaatgaccaccggctgctccaccaagctgaccatatcgctcaggaagctgccgcagattagtccgtactttggcctgatgtggctaacgttcacgatgtacttggccatggcctcgacttcctcgaaggggtagaagaggctctggggcgtcgggatgaccagcttgggcttccggcgttcctcctcctccatctgcagaagcttcctggccgccattcgcttggcaatcggcgacctggacttgcagcagtcgtagttgcacattttgagtaggatgggtcgccaaatgggtgcgaaacttcaccaattttcgaattttttggaaaatactcaaaagatgacttttagggcatagcttagggctgtttgtgtgtgagaggcttaaataagaattaaaccatgtattgacggcagaaataaatcaacgatttattaagtccgcggaaaacaggaggtgtgactcgaatcgaatgacgctaaaaacaaaaagccagggtctggtcgaaaaacaaaaccacaaaagcgcgccatgacgtctggttaaaattggctgatgaattccgaaatccagctgttcacaaagttcgtttccaaaagcgagggccaaaaactgcattaaatcataaaacaacagttttccgaaaagggggcattttttgtttgtttttccctagttaacaaaacaaatgaaaaaactttggaacatccaagctaactctaatcagttacatgcaatatgtagaagcgtggagcgcttttctcttttattttccctagttttcactttccaaagttcaatcggagtctttaagctcaaacagacagtgcgaaatagatttaattatcagcgtcgacggtgccacgcccatgctgccgccgctgtgggcggggaagatgctgtttaccatgtttaccatacgtatacgtgataataacgctcatacgcatggcggcacataggcaacgccccggccgttgtttacttgttgtgtgtttgtgtgttgtggatgccgttcaatgtcaccacacgccagagttcgtttacagcatcgcatccatggcacagctagcgattggagtgctggtgtgagtggataaattaaatacgtccattcggagattcggaactggcggtaaactagacactcaagactacactgagatgaatcggggtgctgtaagtggcatctcattctagcgatcctatcattgcaatgcagttaagaagaagaaaacattaaaaagtgcacacagtgtacttactccttctctgtgtgaaaaatgaaagaaagtgcgccctttattctgccagtgcatcgcctgtctggagtgtgctggtgtagactggacc

SEQ ID NO: 26864 - DNA, 1136 bp, DROSOPHILA
gccctaaaagtcatcttttgagtattttccaaaaaattcgaaaattggtgaagtttcgcacccatttggcgacccatcctactcaaaatgtgcaactacgactgctgcaagtccaggtcgccgattgccaagcgaatggcggccaggaagcttctgcagatggaggaggaggaacgccggaagcccaagctggtcatcccgacgccccagagcctcttctaccccttcgaggaagtcgaggccatggccaagtacatcgtgaacgttagccacatcaggccaaagtacggactaatctgcggcagcttcctgagcgatatggtcagcttggtggagcagccggtggtcattccctacgaggacatacccaacttccccgacggcatagagccggactgcagcttcgtcttgggcacggtcatgggagcgcccataatagcgctggtccacagtttccactcctgcgacggctacaacctggccacctgtgcgctgcccgtccgcgtgatgcagttgtgcggggtcaggaccatcatgctgacctctgaagcagcggccgtagatcacggattcgccctgggcgacataatgcttgtccaggaccacatcaatgtggtgggcatgatgcaccagacgccgctagagggtcccagtgatccgcgctttggcagccgccgattctcgatggtgaacgcatatgacaaggacctgctggagaaggcactcgagattggcaagcgaatgggcatccagaagttcctgcacagcggcgtcttagcctgcatgggaggtcccattctcggcactgtggccgaggagcgaatgctgcggacaatggaggtcagtgccgtgggcatgtccctggtgcccgaggttatagccgcccaccacggcggcctgaaggtgctcgcctttgtggttatcagcagggcggccagcgacaaggagagcgaggagagcgataaggacaaggagaaggacactgacagggactccaagcaggataagcgagagcaggattcccaggagcctgtccccctcccaagactgcaggcctgctccgatctgatcggccgacttatgtactgcatgcacctcgagatctgacgatcgaaaatagacttctcgaagcccca

SEQ ID NO: 26865 - protein, 339 aa, DROSOPHILA
MCNYDCCKSRSPIAKRMAARKLLQMEEEERRKPKLVIPTPQSLFYPFEEVEAMAKYIVNVSHIRPKYGLICGSFLSDMVSLVEQPVVIPYEDIPNFPDGIEPDCSFVLGTVMGAPIIALVHSFHSCDGYNLATCALPVRVMQLCGVRTIMLTSEAAAVDHGFALGDIMLVQDHINVVGMMHQTPLEGPSDPRFGSRRFSMVNAYDKDLLEKALEIGKRMGIQKFLHSGVLACMGGPILGTVAEERMLRTMEVSAVGMSLVPEVIAAHHGGLKVLAFVVISRAASDKESEESDKDKEKDTDRDSKQDKREQDSQEPVPLPRLQACSDLIGRLMYCMHLEI

SEQ ID NO: 26866 - DNA, 6625 bp, DROSOPHILA
atactggtgcttatacaatcgatagccacgacgacacaattccaaagttggcagcaccaaatccttccactttagccgcccgaatctctggtgggccaccgcataaccggccaattcagctggcacggcaatggaccatccggatctcttgaaatcctgctcatcgcgaaatgacgagaagttatccgcacgcaatgccagcggcgccatttccctggccagaatgctgtaggatttgttctccttggccacataaacattcatcaccatgccgccaccgatgcccatgctctgcatcccgatgagtccgttgcaaatgagagcagccaaggcgccatccacagcacttcctccattctccaggacttttttggccaattggctgcacacatcgctgtcggagcaaatggccgcccgggagaatcgatggagcggcgaattggagggcggcagtggatcctccggatttggcggtctcctggacgccttctttttgccagctagaacagaaatgtgaattaattgtgggcaaggagctgcttcctggtcgttgtacccaccatttccgtccggataccggtagatatagactgccaccaggatgacaatcaccacggatatcaaactattcaatcctatcctaatgtacatcgctagcacctagatttacattgttctcaaccccattgccgcaccattgcagttcaaatggaaatatccatatccttttcatttcaaaaaacagctgttctctgctgttttctagtggtcatactgccgtcgataggccaaaataatcgaatatactaaaattttgaaaaaactcgaccgccttacgttcaatataccaagccgaatttcgcgcgttttaatttaaaatgtgtgccccttgttatcgagtgtcagcgtatgcgcgttgccagacagctggcaactccaatgagtgtagaaggtggcagccctttaaggcaccagctgaccccatagagcgtttttgttgttctatcttttatcttttcttttaccgttttgtttagtaattatcttgcttaatttaaccgtagttaattgtgatttgctaattgcttatcttcagtaagtaaccacaggttgcaaggtgatgcacagacgctgcaaatctgtctaatttgcacaattattataaccttgacatagaacagggggcaataacattatcgatgaaaacaacaacaaaaaaccgtttcaccaagcgctgtttacttcttacattgcgttgccaatctttttgaatgtaacggtagttcggcaacaatatgttttcaatccaaaaatctatttacgtatataaatataagcaaacatataacataacatatataacatttataacatatatcgtattttttatgctttaaagttaagttcagacttatccaaaagcaaaacgccccaaaatcgcacaaaaatcgcgcaaaaatgaaccaaagcgaaacggtaaaatatattttattcagacgcgttttggacgcgactttacgcgttcggcgcgtttttcgtgcggtttgaaggcgttttttggcttgggattgtaatataaagaacagaaccatttaaaataacttctttagatacatattatcaatagaagctaaataatctatattcccatttaaaatcatacctctagcaacagtccaacacaacgaaaagtaataattagcttccaacagctgttttaaaattacaaacaaaatgaacattcaagtgcttagcatttggattacgatttatttagatttattgctcacgaccctagcgaatttggttggtaaaaggtcgcgctttccttatcaataatgcccataaatcttacagcaattaattaaataacaattcggtaaataaagtaccgctgaaaatagaaaaacaccagtcagggggcaaacctgtatgccaaccgtctgccgataagcaatccatctcttggaccgttcagattcggacttgaatttggattctgtccagtcatggttcccagtaccatgcccatgcccatgcccaattccaaaccataccatacccataccatggtctgggtgcaaagggcagcgggagatgcgccataaataacttggcactgtggaggtcacttgggcagctgataccatggaccactagatgccgcgccatgccaccgcatgcaccatgtacttggagatccatcctttggcactttggcacagtggctcagatgcgatttatcgccgccgagctgcaacttatctctcgtccagcggaagcatagaaatgcgctcaagaaatgagaaacattgagaaagtttcaagtttaaaatttaaatttaaatttatcgccactcgcccactcctgtgcatttattattgtagaaattaaccccataacttttactaaatctgctcagcttaagtttcagttttatgattagttaaagtcaggtgaaaagttaagtttagccagctgaaaattgaagttgattagttagtttaatcttaatgttgcacttaaaaacacacaggttaaatttggtttgaaaatttcatttttcattattactaagatacttttataaatttagggagcctaattattctgaaaatcatttcctaacatttaggcttcagtttctgttttctgttcaaaaagtgttcaaactttgagctgcttaaactcgaaaacttctcattacgcttttcaaaactgtaatgctgcactttcgcaatctgttttggaatatttttttttttgcaatttgccatcgggttaatttgcccgttggcgacttctgttgctctgttatcaggccgggctatccagccctccaattctccgcttatcagtgggcgaaggaggaggaggtgaaggtggaggcggagtagaggaggtggaggtggaggaggttttggcgagattgtgtgtcacgcccgtgccagctggggtatataagaattgggccggatcgggtggcattcagtttgaacgcgctactcaacggagccgtgtccaaggattctcgattctctattctcgattccccatctctcagctcaagcttaagctatctccaaggtaggtgctctcctgcaagcgttccccgtttttttttttcaagtgtgttaaagtgatgcgaaaaagaaggcatagtttatactgaagactttttcgaaaaaacggaagcattattaaaattaaatagaaatttatgagcttgcacaaattaaatttaaatttggtaaaaaatatagctcgaatattttccttctattaaatgtgctattcaaaaactttttccctttttttttaaattttttttttttttttgtattaaaaaaatttcgaaatgagagacttcagcacggattaagtactcaattattttcacatgctccacacatctgagcagctacttgtgaatttggcattttcgaacgctcttgccccactgtgccctctacatgtgtccgataacagaagtgcctgccagtgagcatctctttaaggtctccacttgaccaattcaataacagcagccgaatgacaacaaaagtcaattaaaaatcgctaaatgccaggcgcaatcaaacttaaaagttaatcgcagcatctgttgttgttgttgttgttgcttttgcttttgttgagtatgtgagtgtaagtgaagggcatgacgtcacaagagcacagctgcaacgcacagtggaaccattgctcgataaagctaacgaaaaattgtagctttgcatacagaaaaaaacatgttaattgtatgtatttaaattggaaatactttttactaaattgattaaaaatataaaaccggaaagtggcatatgttacaatcgaaaaaaaaaaactccattgtgctccaccgtcggcctttggaaaaattgaacttaaaacatggaaatggaagtaaataaataatctcgcattgtgttccgcttgcgatgatgacgatgccgccgattctcagccagtaatgtcaagcccctggtctggaggtaataaaagcaactccgagcgatggctttgggctcagtttggattcggagccaacgagcgcaagatgatgttactgattcccgtgattgcagtgtgccttttcggcctaacggtactgcgtctataagtaggaccaactaaagaaattgaagaaaaaaagtgttacgaaagtcaagtgtttgaaactctacaaaaaatcgcatatttaaatgaatatttaaattaaattaaatgattaatttaattgctcattgctcgcatataaattatcctgataattctattttatcgcaatgttgacagtttgaattattagtttttcgcttttgtgcgtaattttctgatttaatcctacatctaaattcgaattctctgtacttcttaattgtttaattcaatttaaaatctaattaaaatggcaaccatgataatgataaccatgaagtgctataatgcattccaaatgccactttatatccactataaatccatataaaatcaattagatgcactaatcgcaaatcggttgttcccaatttcgccaacagatgtcgtacaaggtggaaccattgcccgattcctacgccggcctgggcgagggtccccattgggatgtggccaggcagagcctgtactacgtggatttggaggcaggcagcctgctccgctacgactatgcgcagaacaaggtctacaagacaaagatcgagggcgaaaccttggccggattcgtgctgccggtggagggacgtccgcaggaattcgccgtcggctgcggtcgacgcgtggtgatcgtcaactgggatggcgtctcgcccagcgccaaggtggtgcgcacactgttcgaggtgcagccactgatggagaagaatcgtttgaacgacgccaaggttgatccccgtggtcgcttctttggcggcaccatgcgctacattggcgatgagttcgagttccgtcacggcgagctgtaccgctgggaggccggtggccaggtgtcggtgatcaagggcgatgtgggcatctccaatggactggcatgggacgagaaggccaagaagttctactacatcgataccaccgactacgaggtgaagtcgtatgactatgatttcgagaccggcgtggctagcaatcccaaggttatattcaatctgcgcaagaatagtcccaaggatcatctgctgcccgatggcctgaccatcgataccgagggcaacctgtatgtggccaccttcaatggcgccaccatctacaaggttaatcccaagtgagtagttcactctaacattcgtgatcgagtgttaaatgtcgtacttcattgcagcactggcaagattctgcttgagatcaagttcccaaccaaacagattacctccgccgccttcggtggccccaacttggacatcctgtacgtgaccactgccgccaagttcgatcagcccgctccagctggcaccacctacaaggtgaccggactgaacgccaccggctatcccggcgtcaacctgaaggtctaggagctgcaatctctatctatccttagccgcagtaaaatgtaccaatcgaatccaagtgcaattatatgttatgctctttaacgttttaaatcgcgtctatcaatgttttgcatgctagttaggttatccttttttgcagttctagttcaaggtcagcttaaggatcacattctctcctgggaatatccaggatcatcatgtaaactcacaaagaggttgactatgctctactttactctgatttcaaacaacaatcttatcagccgcagacacacggtaatcatccgcggatcttatggtcatttggaggacgcagtgctcttatgcttctttattaatcagtggttctataaacaattttatacttatcgtctagtctaaaattaaagatagcaaggtggcgtaaaaaatcagtcgatgttttggtgaatggagatcatccactcaatttcggtgtagataaacatctgcatgaccgtctattcatcagactccgattccgattcggactcttcttcatcgtcatcatcgtcgtcgtcatcgtcgtcgtcgctgccggcggagcgatttagccgcagcatctcctggaactggtgtacacggatcttttgcggcacgatctgcagcagaaactccagattcttgttcttattgaccacctgggagagatgctcgtacttgagcgcttcgcccggtcgctggccgaattcctccgtgtatgccgcgcccgccaaatggcgaacgaatagctccgtgcacttggtcatcaggaagagcacctcgttggtgatcaagcccgtgtccatggagctcttcatgatcgttcgcacgcggctgaggggcagaaaggtttccgcggtcggtggacgctccacgggtggttggctccttggttcgcccatttgtttacttaattcccaagcaaactatggcttgggaatttttttggttttagagctgggctcacaagtggagctgtgaaactatcgatgttacaatcgaggcatgaaattcgtacctttctgagacactatcgattctttttttttatttgctatcgatggttatggtttatgaagacttaaaa

SEQ ID NO: 26867 - DNA, 1094 bp, DROSOPHILA
ttctatcttttatcttttcttttaccgttttgtttagtaattatcttgcttaatttaaccgtagttaattgtgatttgctaattgcttatcttcaatgtcgtacaaggtggaaccattgcccgattcctacgccggcctgggcgagggtccccattgggatgtggccaggcagagcctgtactacgtggatttggaggcaggcagcctgctccgctacgactatgcgcagaacaaggtctacaagacaaagatcgagggcgaaaccttggccggattcgtgctgccggtggagggacgtccgcaggaattcgccgtcggctgcggtcgacgcgtggtgatcgtcaactgggatggcgtctcgcccagcgccaaggtggtgcgcacactgttcgaggtgcagccactgatggagaagaatcgtttgaacgacgccaaggttgatccccgtggtcgcttctttggcggcaccatgcgctacattggcgatgagttcgagttccgtcacggcgagctgtaccgctgggaggccggtggccaggtgtcggtgatcaagggcgatgtgggcatctccaatggactggcatgggacgagaaggccaagaagttctactacatcgataccaccgactacgaggtgaagtcgtatgactatgatttcgagaccggcgtggctagcaatcccaaggttatattcaatctgcgcaagaatagtcccaaggatcatctgctgcccgatggcctgaccatcgataccgagggcaacctgtatgtggccaccttcaatggcgccaccatctacaaggttaatcccaacactggcaagattctgcttgagatcaagttcccaaccaaacagattacctccgccgccttcggtggccccaacttggacatcctgtacgtgaccactgccgccaagttcgatcagcccgctccagctggcaccacctacaaggtgaccggactgaacgccaccggctatcccggcgtcaacctgaaggtctaggagctgcaatctctatctatccttagccgcagtaaaatgtaccaatcgaatccaagtgcaattatatgttatgctctttaacgtttt

SEQ ID NO: 26868 - protein, 303 aa, DROSOPHILA; identical to SEQ ID NO: 2442

SEQ ID NO: 26869 - DNA, 4569 bp, DROSOPHILA
tagaggtaacttctcctataaaatgtgccaaaataagggatgatcatctcaaaatagccttacttttaaggcagcttctaggattaaacacgcaaacattacctgtattattgactaatacgaaccgttataaaataagccaattaggtaacataaataaagtccattggttggctaaaacaaaatgcagattcttaatcctaaatcttaaccgcaaacaggtattattggctctaaggacttaacaggtataattacaatttgttaagtgttttggccaaaaatcgatatattatgttaagggaagtcagaaaaacgacatttggcaaaaatgccataatttataacttggccaaaaatcatcacatggctaaaagaaaaacagtttcgctcagataattaccaatgctaaagatccatatcatttttaagcggatactaagaaattaattttaagatcaatttttgcattttcgtaaggtatcaaaatgcgaaaaaaattaaaaaaaaaaaattttcctcaaattataacccaaatcgattggaatttaaataacaagctcgttgaggtataacattcaatttatagaccattatttcgaattttctgaccaaaatacggatttttttatttacaacaaaaatcgggtgaacgatttttggtataacttggtcaaaaatggtcacaaaacaaaaataattaccgatttatgctcctaattaccaatactaaccaaccctatcactttttgacgaattttgtaaaattattttttggccaattttttgcattttttgtaaggggtaacatcataaaaattgtcaaaaaactgaaaaaattaatatttctaaatttggacgccattcgattgggaatttaattacgagctgaacgaggtatgacactccatatttgcaacattatttccaatgttttgaccaaaatattgaattttatttacatatttttagatagctttgtacatttcaaaggcaacgattttcgttacgcaacaaattgaatgctatttcagttttttattaaatttaaaattttaacatttcaacaactgggaattttcgcgtatacactaaaaaatttagttgccaaataatgagtaataatgagtgctatactggtttactcggctgctggctcaggtgcaggctcggcaggagcaggagcaggagcttctgcctccggttccggtggcgcttcggcggcaggtgcctcctccttgggcgcctcatgtggcgcctcctccgctgctggggcttccggagctggagctggagctggagctggagccggtgcctctggcgccgctccttcggcggctggctcagctggtggtggcgccaccggtgcggcatctccggctggcggtgcttcggcagccgctggtgcggcatctccttccacggcagcgggagcctctgcggcgtgagcttctgcttcgactggagcaggagcctccgaaggatgagccgccgctgcagctgcagctgcagccgctgcctccatttcctgattgatttcggtggcccgcttgctctgaagaatatgaaatatgattaaaatatttgatattattaatgtaaaaccatttaggccttctaccttcttctttttcttttcgacctcgacgacgacctcctcctggggcttgtagtcctccgggaagaacttgagcgcctcgtccttgccgacagttacattgggactcacatagctgggaccgtacgagaccagggataacatcatgttggactggaccttgttgaccttcagcacgatcttgtcgccactgcagttgggcaagaaaaaggttggaaattggagtaaactacttgggctaatcccggccagaatacgtacgatgagtgcggactgctctcgtacttgtccgttgaggtggcaatcaattcggcctcatccggttcggcgcttgagaagaatccatagagcggcacatcgtccttgtgtcgatcgattacatgcatgatctccttgcgcttggaggcatcgaacgccatgatgacatgcggcggttccggcttgggatccggtggcagaaatccagacgtctgaccgcggaagaacacatagatgagggcggcatgggtgcgccggctgttgggcacccaaatgggtggcattttcaccgtcttggtgcgagtgagtggcttcgatggctcctcctccttgatctcctgcacctcctcctcatcctcgccggcctcatcgacgggttctatttccagttcgaagccgggcattgatgggagcccgcccattgcatcgccgccgggttctggcataactgtctcctcctcgctggcctcctcctcggcatccagatcggctgcttcctcttcggccagatgcgcttcctcgtggctaatggatttggttttggccttgcttttggcctgatgcagcctcgcctcctcttcggagcttatctcctccacccaagtctcgccctccttcagctccacctcgacttttagtttcatagttgtgattagcggcggtataacatgctcctcgggtatatcatcgttgggcggtgccactcgctccttggttagctcgtgggcataggccattagaacgttgggcactgtgccgatgctttcgtcaatcttccagaagcacatgagcagctccttgccgtccagttgttcgatcacatccggcggcatgggattcttgcatgcaaagttcacaatctcgaactgatcggtgctcacctggatgacccggcgatccttgcactgcattttgagcgcttcggctggttcggttagcttcttgaacatatcacgattgacttgcggtccaaagacagtcactccaatatcgggcatattctccataatggagtccgttacatggttaaggtagtctatctgcttcttgtgctttatctcgcgctccgcccgctcggcccgctcgatggcctccattttgatgcgctgctgctccacctcgatgggctgcagttcgtcaagtctgtaggtgcctggacgcgatgatttttgcatggtcttctctagctctttgaccagcagactcaccagcttaggcacatccgaaccgaacagaagatttacggccctgccgccctataaatcaaataacacatatctaaccatttagtgataaaactaagacataccgtcacaaaaagccagatgggctcacttctcttattgaatcgtttcaaggccgtgatcgtatccgatttgcactgggtaagaaatgaattagggagctgagtatcaacgtgaatagtacgaattaacccacaatggccagatgcagattatcgccaccaacatccagtttgattttacgcaaggatccgaccataccctggcaaggaccacaccattccgagtaaacatccaaaactgatggaagggattacatatagagtttttagtagactaaaatgggctgcagacgaacccaagagtcctggtcgctccatgaaacgctccagctcctcgtccgtttggatgtcagcctgcagttgttgttgtccccccttctttgccatttagcctacctacttccaaaaaaaaaaaaattaacaaaataaacgagttttggattttgttgctgaattttgaatgcctattttttcccttttcaattggatgccaaaacgaaactgaatgttccatgaactattgattaaacaagacgccccattttcgcccgccccccaaatcatttcccagtttttcttttttcctttttttttgcagtgaattcaaatatacacttggcaatcgtaaataaattagtcaaccacaatcgtttaattgttcgtaaaattaacgctttttacattacacacattggcgagttcttacacattgcataacaaaaaaattgttcactcctcacgctacaatacaattcaaataatttaaacaatataaacaaacaaaaatacgagtatgaatatggagtgcatatctttcggctcgtgatccaaaattcctacgcgacaagtcacgatttcagtacatggactgcagagtaggtacatcgatttggatatgttaggttcatataataattataattataataatagtaataataataataataataataataataatagattatgcggtatatggatagacctatgtcatgcgtaggggctacagtgtacatgtgcgcagggtgagcaagttttaaaatttaggcgaactacgagtaactcaaaacctcccttaaacaattaatatgtacagttattaacacaaaactaacgtttaacgtttgtcaattaattctgccatccctttggatttcgatatcaacacaaagttgtattgatatagatatcgatatcgatatagatatcgatctctatctgacggaaatcccattgatggtgatgacattactggccaccggttccggttcgtaaacctcatcattggtgcgcatctcatagggagcgtcgtagaattgctcgtttggtatttgatcgtaaatgttttctgtaaagaaaaaagaaaagaaaaattgagtaaaat

SEQ ID NO: 26870 - DNA, 2262 bp, DROSOPHILA
atggcaaagaaggggggacaacaacaactgcaggctgacatccaaacggacgaggagctggagcgtttcatggagcgaccaggactcttggttttggatgtttactcggaatggtgtggtccttgccagggtatggtcggatccttgcgtaaaatcaaactggatgttggtggcgataatctgcatctggccatttgcaaatcggatacgatcacggccttgaaacgattcaataagagaagtgagcccatctggctttttgtgacgggcggcagggccgtaaatcttctgttcggttcggatgtgcctaagctggtgagtctgctggtcaaagagctagagaagaccatgcaaaaatcatcgcgtccaggcacctacagacttgacgaactgcagcccatcgaggtggagcagcagcgcatcaaaatggaggccatcgagcgggccgagcgggcggagcgcgagataaagcacaagaagcagatagactaccttaaccatgtaacggactccattatggagaatatgcccgatattggagtgactgtctttggaccgcaagtcaatcgtgatatgttcaagaagctaaccgaaccagccgaagcgctcaaaatgcagtgcaaggatcgccgggtcatccaggtgagcaccgatcagttcgagattgtgaactttgcatgcaagaatcccatgccgccggatgtgatcgaacaactggacggcaaggagctgctcatgtgcttctggaagattgacgaaagcatcggcacagtgcccaacgttctaatggcctatgcccacgagctaaccaaggagcgagtggcaccgcccaacgatgatatacccgaggagcatgttataccgccgctaatcacaactatgaaactaaaagtcgaggtggagctgaaggagggcgagacttgggtggaggagataagctccgaagaggaggcgaggctgcatcaggccaaaagcaaggccaaaaccaaatccattagccacgaggaagcgcatctggccgaagaggaagcagccgatctggatgccgaggaggaggccagcgaggaggagacagttatgccagaacccggcggcgatgcaatgggcgggctcccatcaatgcccggcttcgaactggaaatagaacccgtcgatgaggccggcgaggatgaggaggaggtgcaggagatcaaggaggaggagccatcgaagccactcactcgcaccaagacggtgaaaatgccacccatttgggtgcccaacagccggcgcacccatgccgccctcatctatgtgttcttccgcggtcagacgtctggatttctgccaccggatcccaagccggaaccgccgcatgtcatcatggcgttcgatgcctccaagcgcaaggagatcatgcatgtaatcgatcgacacaaggacgatgtgccgctctatggattcttctcaagcgccgaaccggatgaggccgaattgattgccacctcaacggacaagtacgagagcagtccgcactcatctggcgacaagatcgtgctgaaggtcaacaaggtccagtccaacatgatgttatccctggtctcgtacggtcccagctatgtgagtcccaatgtaactgtcggcaaggacgaggcgctcaagttcttcccggaggactacaagccccaggaggaggtcgtcgtcgaggtcgaaaagaaaaagaagaagagcaagcgggccaccgaaatcaatcaggaaatggaggcagcggctgcagctgcagctgcagcggcggctcatccttcggaggctcctgctccagtcgaagcagaagctcacgccgcagaggctcccgctgccgtggaaggagatgccgcaccagcggctgccgaagcaccgccagccggagatgccgcaccggtggcgccaccaccagctgagccagccgccgaaggagcggcgccagaggcaccggctccagctccagctccagctccagctccggaagccccagcagcggaggaggcgccacatgaggcgcccaaggaggaggcacctgccgccgaagcgccaccggaaccggaggcagaagctcctgctcctgctcctgccgagcctgcacctgagccagcagccgagtaaaccagtatagcactcattattactcattatttggcaactaaattttttagtgtatacgcgaaaattcccagttgttgaaatgttaaaattttaaatttaataaaaaactgaaatagcattcaatttgttgcgtaacgaaaa

SEQ ID NO: 26871 - protein, 706 aa, DROSOPHILA
MAKKGGQQQLQADIQTDEELERFMERPGLLVLDVYSEWCGPCQGMVGSLRKIKLDVGGDNLHLAICKSDTITALKRFNKRSEPIWLFVTGGRAVNLLFGSDVPKLVSLLVKELEKTMQKSSRPGTYRLDELQPIEVEQQRIKMEAIERAERAEREIKHKKQIDYLNHVTDSIMENMPDIGVTVFGPQVNRDMFKKLTEPAEALKMQCKDRRVIQVSTDQFEIVNFACKNPMPPDVIEQLDGKELLMCFWKIDESIGTVPNVLMAYAHELTKERVAPPNDDIPEEHVIPPLITTMKLKVEVELKEGETWVEEISSEEEARLHQAKSKAKTKSISHEEAHLAEEEAADLDAEEEASEEETVMPEPGGDAMGGLPSMPGFELEIEPVDEAGEDEEEVQEIKEEEPSKPLTRTKTVKMPPIWVPNSRRTHAALIYVFFRGQTSGFLPPDPKPEPPHVIMAFDASKRKEIMHVIDRHKDDVPLYGFFSSAEPDEAELIATSTDKYESSPHSSGDKIVLKVNKVQSNMMLSLVSYGPSYVSPNVTVGKDEALKFFPEDYKPQEEVVVEVEKKKKKSKRATEINQEMEAAAAAAAAAAAHPSEAPAPVEAEAHAAEAPAAVEGDAAPAAAEAPPAGDAAPVAPPPAEPAAEGAAPEAPAPAPAPAPAPEAPAAEEAPHEAPKEEAPAAEAPPEPEAEAPAPAPAEPAPEPAAE

SEQ ID NO: 26872 - DNA, 3618 bp, DROSOPHILA
ggtcaagtggaactccatttagcatcacctacggatcgggctccgtgaagggaatcgtggcctcggataatgttggcttcggcgatctaaagatccagaaccaaggcattggattggtcaacatatcggactcctgctccgttttcgatggaatcgctggcttcgcctttcagcaactctctatgaccaaatcggtcccttctttccagcaaatgattgaccaacagttggtggagcagccaattttctcgtttcatctgaaaagtgggtccagtgatgggggctccatgatactcggtggatcgaactcgagtctgtactacggtccgttgacctatacaaatgtgaccgaggccaagtactggagcttcaagctggacttcatagcggtccatggcaagggttccaggagctcccgcacggggaacaaggccatcatggacacgggaacctccctgatcgttggtcctgtcctggaagtcctctacatcaacaaggacatcggagccgagcacaataaaacctataacctgtacaccgtcgcctgtgaatcgattccccaacttccgatcatcgtctttggcattgctggcaaggagttcttcgtgaagccacatacctacgtcatcaggtacgataatttttgcttctccgcctttatggacatgctaggcctgcagtactggatactcggtgatgccttcatgcgggagaactatgtggagttcgattgggctaggagaagaatgggcatagcaccggctgtatgaggggattattcattttattatgactatcacaccttgcgtgataagtgaatttatttaaaaaaatattcggactataatttggtaaacaaatattaccaattgtataaatggcaatgacagaaaaaaattcaattacattgtaaaagttggacaaataaatgtgaattgttaatgggcgttaattccgatcgattggacattaggaaatctgacctcttagctatttggtgttacttgtgggttccaacttgatgttcctttccattttgtgcggtttgctgaccaccgttgcccccataaatgccacgtggcatgcgaggctgttgctgctgctgctgctgctgctgatgcagctgttgcaattgtcgcagctgcacttgttgctgaaactccagattcttgtagatcatggctgcagcagcagcagcattgttaggagcctgaggttgttgcggggcagcctgttgcgagtgttgctggttgtgctgcgaagcttgacgcagatttcgagcgatcaattgctgatacagcagagcaaagtccttgggattggcgttggacaatgcagctagatccccgacacttggacggtgaagctgctgctgatactgctgttgctgctgctgctgctgctgctgttgcggtggtggctgtggtgccacctgctgctgcttttgtggcatgtggatatgatggtggctgcgtggcgcattcaactgcggctgtggcggcgcttggtgtcgcatctgatggtaaaactggggaaatggtatctcattgaaatttttaaccgagttgcgattgtggctttcggtgccaagttgacgatgtggctgctgctgttgatgttgctgctgttgctgttgatgtttctgctgttgatgctgatgatgttgctgctgatgatgttgctgctgatgatgttgctgctgctgatgttgctgctgatgctgagggatctgtctttgttgttgctgaaagccgctctgaaacacaaaataaatgtatggcagttagcataggatatttatagtatgtgagatagatacgcaattctaaactattttcaaaaaaaacccgataaccgtttaatagattcgcgcctggttgctcatagcttacccccggcaagttggaggcagcgccttcatgttccggagtagcttgtcttctttcatatagaggcaccgacttgacggatcgttcgtatcccgggtgggaactccaagcttgactcaccatcggtttcaggcccgcaaggcagctggccatgtccttgggaaagtcaaggaagctctccccgaacagggagtagttttcggcggccttgaagtagttatgagtgccgttctccgggtaaccgatggtatctccgtagagaacgcgctccacctcggttacgtaaatgctggcactgtcgacggccgctggcttgctgacactttcgctggccgctggcttgctggcagatcccatttcacaccccgttcctgattcgcatccacttggaaaattgggcacagcttcctcagacgcctccacgagacccagggaaatgtcgttggatgttacgccccatattttcttggccagctgactggatatgttgactgaggaggggtaaattggtagcattataagcatcaatgagaccctgaagttcactcgaaagttctaccttgagtggcggccgcagtctcatcttcgtctaggtcattagatataagctggctcttgttgctggcattctcggacatcgtgcggcttctaaaaacataaactataaatttggaggaacgaacaatatgcctgacttcaataaagttgatcaaccgtcgcctgctgtgtaccgcagctcactgaataaaaacaatagaaaagccttggtaatcgagcaaaagcccagtcaatatgcacccagtttgtttatgaagactggcttggattacgcagtaaacaattaattaacttaccccgcaccacaacgaacgtcacctactggcgaagtgaagcaagaagaaaagaaatgtgaccggtaaaaaagattctggcataaggatgatgggcagcactggactattttgcaacactgattggttggtcttaatgttattaaagaaaagccttcagatatggcagttaaatatgatatgaccataataagagagttcatttaaatatctaactcataatcggaatatttaggaaactatgtaaatatcaaatcatgttcatacgtgtgaccgcaatgtgaccgttcatatgtgtgtagccgcccaacaaagagcttctagtaaatttaaataagtgcttgacgtaaaagtgtcatcagaattagtataatatatcaaggataactcggtttatttcactatttgtagttccaactcgtgctttttcatttcatcaataacagtagtatttttatttaaaagttttaacaaagccgtacacgaacattttacaatgggtcataagctaaaccagaaggacatcacatggacttaaagttagattacgggctctgtgatcgcgtaacaaaatcctgctcctgcgccgcacaatttcactggtggcagttgtaaaagagttggggtgcaactggaaaagtaaattaatgtaaatatgtacttatttttgtggactaaggtcggttcctacacattttcggtgctgttgttgccgcagttcccatgctcgttccatccccaggtgtagacctctcctgccgtagtcctcagtagaccgtgctcggcgcccatgtgaattctggcaggaccctgatcctcaggaagcttcaggcgaagtggcgtgggtattgcctgctgttcgctgaacgaacccattc

SEQ ID NO: 26873 - DNA, 1414 bp, DROSOPHILA
acacagcaggcgacggttgatcaactttattgaagtcaggcatattgttcgttcctccaaatttatagtttatgtttttagaagccgcacgatgtccgagaatgccagcaacaagagccagcttatatctaatgacctagacgaagatgagactgcggccgccactcaagtcaacatatccagtcagctggccaagaaaatatggggcgtaacatccaacgacatttccctgggtctcgtggaggcgtctgaggaagctgtgcccaattttccaagtggatgcgaatcaggaacggggtgtgaaatgggatctgccagcaagccagcggccagcgaaagtgtcagcaagccagcggccgtcgacagtgccagcatttacgtaaccgaggtggagcgcgttctctacggagataccatcggttacccggagaacggcactcataactacttcaaggccgccgaaaactactccctgttcggggagagcttccttgactttcccaaggacatggccagctgccttgcgggcctgaaaccgatggtgagtcaagcttggagttcccacccgggatacgaacgatccgtcaagtcggtgcctctatatgaaagaagacaagctactccggaacatgaaggcgctgcctccaacttgccggggagcggctttcagcaacaacaaagacagatccctcagcatcagcagcaacatcagcagcagcaacatcatcagcagcaacatcatcagcagcaacatcatcagcatcaacagcagaaacatcaacagcaacagcagcaacatcaacagcagcagccacatcgtcaacttggcaccgaaagccacaatcgcaactcggttaaaaatttcaatgagataccatttccccagttttaccatcagatgcgacaccaagcgccgccacagccgcagttgaatgcgccacgcagccaccatcatatccacatgccacaaaagcagcagcaggtggcaccacagccaccaccgcaacagcagcagcagcagcagcagcaacagcagtatcagcagcagcttcaccgtccaagtgtcggggatctagctgcattgtccaacgccaatcccaaggactttgctctgctgtatcagcaattgatcgctcgaaatctgcgtcaagcttcgcagcacaaccagcaacactcgcaacaggctgccccgcaacaacctcaggctcctaacaatgctgctgctgctgcagccatgatctacaagaatctggagtttcagcaacaagtgcagctgcgacaattgcaacagctgcatcagcagcagcagcagcagcagcaacagcctcgcatgccacgtggcatttatgggggcaacggtggtcagcaaaccgcacaaaatggaaaggaacatcaagttggaacccacaagtaa

SEQ ID NO: 26874 - protein, 440 aa, DROSOPHILA
MSENASNKSQLISNDLDEDETAAATQVNISSQLAKKIWGVTSNDISLGLVEASEEAVPNFPSGCESGTGCEMGSASKPAASESVSKPAAVDSASIYVTEVERVLYGDTIGYPENGTHNYFKAAENYSLFGESFLDFPKDMASCLAGLKPMVSQAWSSHPGYERSVKSVPLYERRQATPEHEGAASNLPGSGFQQQQRQIPQHQQQHQQQQHHQQQHHQQQHHQHQQQKHQQQQQQHQQQQPHRQLGTESHNRNSVKNFNEIPFPQFYHQMRHQAPPQPQLNAPRSHHHIHMPQKQQQVAPQPPPQQQQQQQQQQQYQQQLHRPSVGDLAALSNANPKDFALLYQQLIARNLRQASQHNQQHSQQAAPQQPQAPNNAAAAAAMIYKNLEFQQQVQLRQLQQLHQQQQQQQQQPRMPRGIYGGNGGQQTAQNGKEHQVGTHK

SEQ ID NO: 26875 - DNA, 2642 bp, DROSOPHILA
gagccaaaaaaataaaaactttcccccgaagaggaaaacttttggggacggcgagaagtttttcctctgtttggtgctgcttcggattaatattttctttgcctgtcttccgtttccatttttagtgcattcctcggtgttttctgtctttttgccttgttacttatttgctgttagtccttcgtacttgaaatgcaatttctaagaaaaattcctctcaagagtatcaaaatacacagcggcattcttcagttttatttagttttgtttttttacgccgacgatgcccagtttagatttctttagtcgtttacctatatttgagttctttggatattttttgaaaccaaaaggcgcaaaagtccctgcaagtatgcaatgtttctgcaagttaacatactccatcttcagatcccctccctccaaaggacagcaaaccacacccgaaggaccgacattttaaatggcgcactaaattactgaaacacgcccacacaacacacaaatttgcattttcttccgactaagaggtcccgcctattcgctacccagtacataataattcaaacaacccaaggcttgtatatacaaactatattgtggatgattgattgtacatgtattaagccgagcaccaagtatgctgaacacaactaagagtattgggttttgaatgccttactgatcaaaagcaaggacttagcttagctgatgccagtatcctgcacataaagactatagggtacaagtgcaacttactgctgagaatacaatttacgctttcccaggcatttttcatgtgattcgcagctgcagttggggaaactctttatggccgccacagcatccggcaagtgcgttcttgtttttgggttttctgttttaaccacccacatgtgtgctgcccgcataaaatgtgcgtttggttgacaaaagttctttaaaacaattaggagagccgtattcgtatattaatggaaacaacagaccagctttttataattattttgcattttagactactacactgattgcttctaatacgactataatttagagatatttatgcaaaatacgaaatcacatccccagcatagaggaaccatccaaagaggataattggcttggtgtgaaaatatggccttttggcggcggatttgttggtttcattccgcctaatcatttcccaaacgaatattttaatgccaggggaagtcaagtccccgtcgtactgctgaacttcctccccattttccagccatatgaggtttggttcataccgaagctcatagtcgttgcatatggtttttgcgaacttgcaattgagctcagcaaaacaaatgttttccttcgacttgaacgatttggccatgtcagtccaggtagtttcgaaatcgtggcagcccatgcaattcggctcatagaactttacgaagaacgtcccatcttcggtggtttcgaagaaattgtccactctcagcttaagtatcgtgccaggagtgcactgatctgcggatcttgccttcacactcaaatttgtaattgtggttacatttccggactgtttcgatagagatttatccgattgagcactccagatcaatagtgaaaatagaaagtaaatacaccgaaaggtagacatttttggcaatttttacataacaaactttttttgatcgcaatgtgatttccactgtagattgttagctcccagttttacatttaatgacacaaataatttttaatttttgtttttatttcagatagacttagtatggttagtatggcttatggagttttagaaacttgaggagacattgcttacgatctaatttcacatgctcagagtatgtaagtatagttgggggggtgtgtatatgaatacgatagcgtttagatgggcgattagattctggagttccatttaatcggacttcagtgccatttgccgtcctcgttgagtttccggggatcgatgtgcaagccgagcttctccagtttgcgcaccttcctcatttgtttggtcagccgccgcttgaagtttatctcctggttgagattcataatctcgatggtgtcatactgccggatgttcttgatcgtctgcaggatgaggttgtccgtgagatgcagcttgatggtggacatcttcatgaacggggcatcgcggcgtcgcaactcctccctgtaggcaaacagggtgtagtgcagcgatggcagcgagggcaaaggacgctccagttgtggaaaaagtagctcggccattatcgaatatatgccaactgatttactgggaatatgagtgctgcgcagagatctgttcgctttgagtgtccagagtgcagtgctgcctgaagtcgggttgtcctggtatttaagcccacccatcggctacctgctgctgtttactgagaaaacaccgacactctgccactggaagatcttctggggaaatcccggaggaaaaggcagctggcgctagacagtttagctacctgccgggacagctgcaagagatgttttcttgcgagcacgcgattagactggatttccttcaacccgcaaaaatttcacaaagtccgtgtacagtctaacttcgctaaaggtgtcacaaggaaaactaatgtttctagaaagtatac

SEQ ID NO: 26876 - DNA, 642 bp, DROSOPHILA
atgtctacctttcggtgtatttactttctattttcactattgatctggagtgctcaatcggataaatctctatcgaaacagtccggaaatgtaaccacaattacaaatttgagtgtgaaggcaagatccgcagatcagtgcactcctggcacgatacttaagctgagagtggacaatttcttcgaaaccaccgaagatgggacgttcttcgtaaagttctatgagccgaattgcatgggctgccacgatttcgaaactacctggactgacatggccaaatcgttcaagtcgaaggaaaacatttgttttgctgagctcaattgcaagttcgcaaaaaccatatgcaacgactatgagcttcggtatgaaccaaacctcatatggctggaaaatggggaggaagttcagcagtacgacggggacttgacttcccctggcattaaaatattcgtttgggaaatgattaggcggaatgaaaccaacaaatccgccgccaaaaggccatattttcacaccaagccaattatcctctttggatggttcctctatgctggggatgtgatttcgtattttgcataaatatctctaaattatagtcgtattagaagcaatcagtgtagtagtctaaaatgcaaaataatt

SEQ ID NO: 26877 - protein, 192 aa, DROSOPHILA
MSTFRCIYFLFSLLIWSAQSDKSLSKQSGNVTTITNLSVKARSADQCTPGTILKLRVDNFFETTEDGTFFVKFYEPNCMGCHDFETTWTDMAKSFKSKENICFAELNCKFAKTICNDYELRYEPNLIWLENGEEVQQYDGDLTSPGIKIFVWEMIRRNETNKSAAKRPYFHTKPIILFGWFLYAGDVISYFA

SEQ ID NO: 26878 - DNA, 2977 bp, DROSOPHILA
caccacagccacatcgagcctagatcaaagcgacatgcccagtactgccatcaatgccgtgtccgtgatcagcagcgcaatggcctccctgcatacctccgacgaagatgtgagttgaaggcgctttcaaagacctgtacgattacgagtccctaataaacactcttttgatttcggcagcgctttaataatctggctcagctaggtctcttccgcttcgagaatgaaactgtgctgcatttatatcagatggcacagtatcgcaatccctccgccgaaccagagacgcttaccaaagaggagaaggccaaggcttttgagctaaaggatatccacacgcccatggactacatccagttctacgagacggcggatgttagcagtgagttttctctgcggcaaatggagattatgcagtccgagtttccgaaaattaactacgatccaagctatgtgatcaccaataagaatgtgtacaccatacagctgaagtaagttttgaattggttgctacgctcgaaatcgcttactgaattgaaattactttttgcagaaaggagccgttcgaattgttcctggatgccgcattgcagaacgagttcaaccagtgccgcgacttctgcaacaccttcgacctctccttcgagcagtgcatcgagtttgccggggattacctgctcaggcggaagaagatcactcaggctctgctcacgtacaacaaagcgcgggtgaaaccaatacgcacagccttgaaactggccatgtatggacacacctacgctctaatgcagctaagtgctatggccctcaagtccacatatctgctgcgctcgcggtacttaggtcatccgctgctcaagggtattttgggagacattacgtatcgtcactcggaggatgtccgtgtaatcttgcccgagaaacatgaggaggaggatgtgaacagcggtgttttctgcagcgattatcattatggcgtggacgagtcaattagcgcgcttcagatgtcgccttcttcgcagttccatttggccaacttgttgctcatcacgttggccgagaaggcggtaaacgataagaactatattccgctgtggtaggtgcataagagcttgcttttcgaacccagtgtaactattattttgttgcaggaactttctggtgaccaatagcaaatatcacaccaacatgacgagcattgttctctgccaaagtggactcttctcgtcggccattatactggctaagatacggggcgtatgcctggatactttcaatgccctgatcagcgtggtggcccaggagtttggatggtacaacgagctgaacgtctgcctgtacaatctgagcgagaatatatttttggagacaataacttacttgccgcatgtatccatggattactttgctttcattcaggagaagttgcatcatataagaccgtgtgtgttgcaggtaatgactatttttctacatcttcaacagtttacttacgtaaaataattatctttcagcgcctgtcgaagcaactgaatcctttttctcccgctctgagacccattgtgtcccataatagtgactgcgccatgtcaaacgataacaatccgcagttgtttgagttctgcaagagtctaattgaaacctatctggcagtgcttatacatatggaatcccagcgagtaaagtatgactctattgtaaatgctttatccaatttccgcatcaactatgaagacaatcaggcaagtatttaggacattttccaatcatccctcatatctaatttgtttgaaatcctttagttcgccattgaatcatcacgcttcaaaccgatctcagctggttgtgcctactgcgcctgtgttgtggatggtaccgcctacttctggggctccagcggcattcccagctattacagtgctcagaagtccacgggttcgtacgatgatttataaatattcagttggtatatattaaaaactttttttttttcagagccacctgagcctgcgcacgccgtaaaaagtctagatctcctctcgcagctcaatttgcaggtgcacgctatcaagtgcggtcgtcagcacacacttattttgactaataatggcgtaggtttttcaaacacgatacccaatggcctctaaattaactgactctgctatttgcagctctattccctgggaaacaacaacctttgccaactgggcataggacgccacatgcagatggccttgcagccgatgctggtgacggcattggacggcatgaacataacgatgctcgaggcgggacaatatcataatgcggctgtggccgatgggaagctctatatgtgggggtgagttaagaaaccctgtctagtgaactttgtttttaatgatccgcttgcagatggggcatctatgggcagcttggacagggaagctgcgagaatatagctacaccacaactagtcagttttttcaaatttaaggtgcgtcatttaatccatatgcactttatagtcttgctacattgacacatgcctctcaatgttgcagaaaattttacaaatatcgctagggcatgcgcacaccttggtgctgtgtggagcacccaacagccacatggaggctaaccactgcggcaacgagctcttcgtgttcggctccaatcactttggccagctgggcaccggcaatagtgaccatggcgacaccaagacgaacctgcctgtgcgcctggaagtgggcgactgcagcctaagactgatacacaccaaattttttaccaatgtaagtgttcagcaattacagatgggatccaagctacattctaaaatcccccacagttagctgtagacgaacaggatcgtctgttcacttggggaagctcgccgcaggccttgcgtctggccaatcagatcaagcggcgtgccaatgccaagcagaagatggaggagaatcagcagcgggagctgttgagcaagcaactg

SEQ ID NO: 26879 - DNA, 713 bp, DROSOPHILA
tcagatgtcgccttcttcgcagttccatttggccaacttgttgctcatcacgttggccgagaaggcggtaaacgataagaactatattccgctgtggaactttctggtgaccaatagcaaatatcacaccaacatgacgagcattgttctctgccaaagtggactcttctcgtcggccattatactggctaagatacggggcgtatgcctggatactttcaatgccctgatcagcgtggtggcccaggagtttggatggtacaacgagctgaacgtctgcctgtacaatctgagcgagaatatatttttggagacaataacttacttgccgcatgtatccatggattactttgctttcattcaggagaagttgcatcatataagaccgtgtgtgttgcagcgcctgtcgaagcaactgaatcctttttctcccgctctgagacccattgtgtcccataatagtgactgcgccatgtcaaacgataacaatccgcagttgtttgagttctgcaagagtctaattgaaacctatctggcattcgccattgaatcatcacgcttcaaaccgatctcagctggttgtgcctactgcgcctgtgttgtggatggtaccgcctacttctggggctccagcggcattcccagctattacagtgctcagaagtccacgggttcgtacgatgatttataaatattcagttggtatatattaa

SEQ ID NO: 26880 - protein, 228 aa, DROSOPHILA
MSPSSQFHLANLLLITLAEKAVNDKNYIPLWNFLVTNSKYHTNMTSIVLCQSGLFSSAIILAKIRGVCLDTFNALISVVAQEFGWYNELNVCLYNLSENIFLETITYLPHVSMDYFAFIQEKLHHIRPCVLQRLSKQLNPFSPALRPIVSHNSDCAMSNDNNPQLFEFCKSLIETYLAFAIESSRFKPISAGCAYCACVVDGTAYFWGSSGIPSYYSAQKSTGSYDDL

SEQ ID NO: 26881 - DNA, 5449 bp, DROSOPHILA
gcggcacgtgctatcggaaattagcaaggacttaaggtgaattctttggaaggatgcttctttactcacctcctcctccgcgacgctccagcacctggggcagattgttgaggtcccttgagaggggcggcaataagttgccgcagtatgtctggttggcattgacattgaaggcgcctgctccagcggctccacctcccaatcctgcgcgaattcgatctgtgggcagcacggttttaatcggcatttggggtttcttcaggcccgacggtttcggtagccgggattccatcgccaactgtgttgtgcctaacttagaagatacgtctgcctccttgcaaccgattttatcaattagttttgcgttgttgacaagcgacgccgtcgattcccgccgttatttttgattgcagggatgctctggggcagtgtgaccatttgtcgggagagtacggcgttgccagccaagacgacttccagtttgtcaatcagatgttttcagtgctgcagctttggccctcgggcacaaattttcgccttgactcgtgcatcccgcaggttttcggcgcgtgaaactcacccaagcgggtgtgaaatacggtggctgttgcattcgaaccgttcattttgtggaaaagtcgcggcggactgttcaacagcctgaagagtgaagtcttgtgcgcagcactagtgtcgttgccggacggttgcggcaatccggggcgaacttcttgaaagcgttttgctttctttttgcgagcttgtgcggtgtgaaggaaggccgcgctattctgaaatttatttgttgcctcgaaaaagctgtggaaattgcgttccagttggaaagcagttgcgtgatcgggtcgttgccagaccggccgcaggtctcacgcgaccatctctagtttgttttcattcggattggaaaaggctcgttcccatcgaactgattttgtgaattttaaaattggcttcccccacgtccgccaatccccccgagatgtcggggcaggcggagctcaaggagctgggcatgttcgagctgcgcccgctgatcactaacatcagctgcaagctgtccgcggtgacagcggggctggacgaaaagcgacagttcctatgcctcgtttctgaggaaaacgagatcctgctgcgctacataagcgccgcctccggccaggaggtggtcaagatgatatcctggttccgcaaccgcgtcatccacgacgtctgcttcgatccggcgggcgtttggctgctggtgctatgtgagtttcagcgtatgatggcatgagcaccacccacttttttgtgttgggtgggtggttgctgtggtggtgctgctaaaattactttgcccccatgtgtgcgtgtatggttattgattttctgctgcctcccctttgttttgatttaacgatcgaatggagtccttgctcaaacaccacttatccactgctctgtcaacaggtttcgacaacacactgcacatcgtgcccgccctggcgttggtggacaaggcccatggactgtccgcctgctcgctctacagcaccacccaggtcacctcctacatcatcccctttgtgggcccccacgagtgtcccaactccaaaaagtgccccaatcactccaccggtctggaagagtccacggcggagccaatggatcagttggctgagaacctagagcaggccaggttgcaggaaggcgaagaggaggagcctcttggccacgacctgcccgagcacatgctggtgcgaaatagcggaactgaggatgcagtgcagccactgccgcagcagcagcagacgatcgataccaccggcaatagccaggtgatggcagcctctttcatggcgtccaagacctgcccctatcccttgtccgtcgtctggtggaagaccaacagtggacagaatagggccattatcggctactcggatggctccatctgctttgtgggcctgagtcccaactgccccatgattgcgagcactgccatcgaaaacggatctgtgatgcgcctggttatctgcaaagataaagcctacgatggtgttatgctgctggtaaggaactattctactaatatagatttccagatgatagaatatggtttaccgtctttcagataacttcctccctgaagcagcagtacaaacttttgctggagcaaaaggcaatcaaatacgtctatcccggagacagttccccgacaacccgcgagggcgcctggcagatcgtgatgtccgtgcaggacaagcatcagagtgcggcgacaggcgcccgacaaagcaatagttccgatccggcctcggacagtagccaactggaagaggatgtgttcgcgcctccgtccagcgatgatgtggtatgcagtggtccaggagcagccaactcagacccgtccactgtttcggcatccgcagaggcagccactgcagacgtgcctccaccaccggcgccgccttcgtacagtgaggcagtggctaggcaatccggtgaccaaggcggcgttcgcttccagcaacaacagctgccagcgggcagcatggatggcattctgcccgccacgagagcccgactggcttcgctcaagagtctgggatcgaagaagctgcaggccatcaagatgcgactttccgatcagcggcaaaagttcgatgaatgtgcgtaagctgacgtaacaagatatacgtttttctactccctactttaacatattttctcgcctacattgtgtttatatttgttaatttaattgccgttttattgtgaatttttcattttttttattggtgtgcagttttaagagaactgttgcatcttttgaagcgtcgcttgcgtggtgagtttgcacaactctcacacttgacagaccaagtagaaacagctcgagacttgcaatcccatgtaatgatatcaaaagtaatccattccctctgttccagttatgccggactccacgatgggctcgtttgcaatcatggattcgccgtcggttacgccggagcccctaggcaccacctccggatccttttacaacatacagaacctgcgcagcacctttctgctgagtgccctgcacagcaatagccacagcttgaccgtgcacagcatcgacatcagcctgaagccgctgttcgtttacaagatacccaagcacacccaggaaatactcattagctccaacatactctacggcatacactacgtggacctgcactgccgcagcgattcggaccacttcacggcggcatcgttgctggacgacccgctagtcgcgaacacggaaaaggagaaccgcgacgcggacattgagaaggtggatcagtcggatgtgagtgcccagaagagcgattcgacgagcgcaaccaccacagccacatcgagcctagatcaaagcgacatgcccagtactgccatcaatgccgtgtccgtgatcagcagcgcaatggcctccctgcatacctccgacgaagatgtgagttgaaggcgctttcaaagacctgtacgattacgagtccctaataaacactcttttgatttcggcagcgctttaataatctggctcagctaggtctcttccgcttcgagaatgaaactgtgctgcatttatatcagatggcacagtatcgcaatccctccgccgaaccagagacgcttaccaaagaggagaaggccaaggcttttgagctaaaggatatccacacgcccatggactacatccagttctacgagacggcggatgttagcagtgagttttctctgcggcaaatggagattatgcagtccgagtttccgaaaattaactacgatccaagctatgtgatcaccaataagaatgtgtacaccatacagctgaagtaagttttgaattggttgctacgctcgaaatcgcttactgaattgaaattactttttgcagaaaggagccgttcgaattgttcctggatgccgcattgcagaacgagttcaaccagtgccgcgacttctgcaacaccttcgacctctccttcgagcagtgcatcgagtttgccggggattacctgctcaggcggaagaagatcactcaggctctgctcacgtacaacaaagcgcgggtgaaaccaatacgcacagccttgaaactggccatgtatggacacacctacgctctaatgcagctaagtgctatggccctcaagtccacatatctgctgcgctcgcggtacttaggtcatccgctgctcaagggtattttgggagacattacgtatcgtcactcggaggatgtccgtgtaatcttgcccgagaaacatgaggaggaggatgtgaacagcggtgttttctgcagcgattatcattatggcgtggacgagtcaattagcgcgcttcagatgtcgccttcttcgcagttccatttggccaacttgttgctcatcacgttggccgagaaggcggtaaacgataagaactatattccgctgtggtaggtgcataagagcttgcttttcgaacccagtgtaactattattttgttgcaggaactttctggtgaccaatagcaaatatcacaccaacatgacgagcattgttctctgccaaagtggactcttctcgtcggccattatactggctaagatacggggcgtatgcctggatactttcaatgccctgatcagcgtggtggcccaggagtttggatggtacaacgagctgaacgtctgcctgtacaatctgagcgagaatatatttttggagacaataacttacttgccgcatgtatccatggattactttgctttcattcaggagaagttgcatcatataagaccgtgtgtgttgcaggtaatgactatttttctacatcttcaacagtttacttacgtaaaataattatctttcagcgcctgtcgaagcaactgaatcctttttctcccgctctgagacccattgtgtcccataatagtgactgcgccatgtcaaacgataacaatccgcagttgtttgagttctgcaagagtctaattgaaacctatctggcagtgcttatacatatggaatcccagcgagtaaagtatgactctattgtaaatgctttatccaatttccgcatcaactatgaagacaatcaggcaagtatttaggacattttccaatcatccctcatatctaatttgtttgaaatcctttagttcgccattgaatcatcacgcttcaaaccgatctcagctggttgtgcctactgcgcctgtgttgtggatggtaccgcctacttctggggctccagcggcattcccagctattacagtgctcagaagtccacgggttcgtacgatgatttataaatattcagttggtatatattaaaaactttttttttttcagagccacctgagcctgcgcacgccgtaaaaagtctagatctcctctcgcagctcaatttgcaggtgcacgctatcaa

SEQ ID NO: 26882 - DNA, 2770 bp, DROSOPHILA
atgtcggggcaggcggagctcaaggagctgggcatgttcgagctgcgcccgctgatcactaacatcagctgcaagctgtccgcggtgacagcggggctggacgaaaagcgacagttcctatgcctcgtttctgaggaaaacgagatcctgctgcgctacataagcgccgcctccggccaggaggtggtcaagatgatatcctggttccgcaaccgcgtcatccacgacgtctgcttcgatccggcgggcgtttggctgctggtgctatgtttcgacaacacactgcacatcgtgcccgccctggcgttggtggacaaggcccatggactgtccgcctgctcgctctacagcaccacccaggtcacctcctacatcatcccctttgtgggcccccacgagtgtcccaactccaaaaagtgccccaatcactccaccggtctggaagagtccacggcggagccaatggatcagttggctgagaacctagagcaggccaggttgcaggaaggcgaagaggaggagcctcttggccacgacctgcccgagcacatgctggtgcgaaatagcggaactgaggatgcagtgcagccactgccgcagcagcagcagacgatcgataccaccggcaatagccaggtgatggcagcctctttcatggcgtccaagacctgcccctatcccttgtccgtcgtctggtggaagaccaacagtggacagaatagggccattatcggctactcggatggctccatctgctttgtgggcctgagtcccaactgccccatgattgcgagcactgccatcgaaaacggatctgtgatgcgcctggttatctgcaaagataaagcctacgatggtgttatgctgctgataacttcctccctgaagcagcagtacaaacttttgctggagcaaaaggcaatcaaatacgtctatcccggagacagttccccgacaacccgcgagggcgcctggcagatcgtgatgtccgtgcaggacaagcatcagagtgcggcgacaggcgcccgacaaagcaatagttccgatccggcctcggacagtagccaactggaagaggatgtgttcgcgcctccgtccagcgatgatgtggtatgcagtggtccaggagcagccaactcagacccgtccactgtttcggcatccgcagaggcagccactgcagacgtgcctccaccaccggcgccgccttcgtacagtgaggcagtggctaggcaatccggtgaccaaggcggcgttcgcttccagcaacaacagctgccagcgggcagcatggatggcattctgcccgccacgagagcccgactggcttcgctcaagagtctgggatcgaagaagctgcaggccatcaagatgcgactttccgatcagcggcaaaagttcgatgaatttatgccggactccacgatgggctcgtttgcaatcatggattcgccgtcggttacgccggagcccctaggcaccacctccggatccttttacaacatacagaacctgcgcagcacctttctgctgagtgccctgcacagcaatagccacagcttgaccgtgcacagcatcgacatcagcctgaagccgctgttcgtttacaagatacccaagcacacccaggaaatactcattagctccaacatactctacggcatacactacgtggacctgcactgccgcagcgattcggaccacttcacggcggcatcgttgctggacgacccgctagtcgcgaacacggaaaaggagaaccgcgacgcggacattgagaaggtggatcagtcggatgtgagtgcccagaagagcgattcgacgagcgcaaccaccacagccacatcgagcctagatcaaagcgacatgcccagtactgccatcaatgccgtgtccgtgatcagcagcgcaatggcctccctgcatacctccgacgaagatcgctttaataatctggctcagctaggtctcttccgcttcgagaatgaaactgtgctgcatttatatcagatggcacagtatcgcaatccctccgccgaaccagagacgcttaccaaagaggagaaggccaaggcttttgagctaaaggatatccacacgcccatggactacatccagttctacgagacggcggatgttagcagtgagttttctctgcggcaaatggagattatgcagtccgagtttccgaaaattaactacgatccaagctatgtgatcaccaataagaatgtgtacaccatacagctgaaaaaggagccgttcgaattgttcctggatgccgcattgcagaacgagttcaaccagtgccgcgacttctgcaacaccttcgacctctccttcgagcagtgcatcgagtttgccggggattacctgctcaggcggaagaagatcactcaggctctgctcacgtacaacaaagcgcgggtgaaaccaatacgcacagccttgaaactggccatgtatggacacacctacgctctaatgcagctaagtgctatggccctcaagtccacatatctgctgcgctcgcggtacttaggtcatccgctgctcaagggtattttgggagacattacgtatcgtcactcggaggatgtccgtgtaatcttgcccgagaaacatgaggaggaggatgtgaacagcggtgttttctgcagcgattatcattatggcgtggacgagtcaattagcgcgcttcagatgtcgccttcttcgcagttccatttggccaacttgttgctcatcacgttggccgagaaggcggtaa

SEQ ID NO: 26883 - protein, 923 aa, DROSOPHILA
MSGQAELKELGMFELRPLITNISCKLSAVTAGLDEKRQFLCLVSEENEILLRYISAASGQEVVKMISWFRNRVIHDVCFDPAGVWLLVLCFDNTLHIVPALALVDKAHGLSACSLYSTTQVTSYIIPFVGPHECPNSKKCPNHSTGLEESTAEPMDQLAENLEQARLQEGEEEEPLGHDLPEHMLVRNSGTEDAVQPLPQQQQTIDTTGNSQVMAASFMASKTCPYPLSVVWWKTNSGQNRAIIGYSDGSICFVGLSPNCPMIASTAIENGSVMRLVICKDKAYDGVMLLITSSLKQQYKLLLEQKAIKYVYPGDSSPTTREGAWQIVMSVQDKHQSAATGARQSNSSDPASDSSQLEEDVFAPPSSDDVVCSGPGAANSDPSTVSASAEAATADVPPPPAPPSYSEAVARQSGDQGGVRFQQQQLPAGSMDGILPATRARLASLKSLGSKKLQAIKMRLSDQRQKFDEFMPDSTMGSFAIMDSPSVTPEPLGTTSGSFYNIQNLRSTFLLSALHSNSHSLTVHSIDISLKPLFVYKIPKHTQEILISSNILYGIHYVDLHCRSDSDHFTAASLLDDPLVANTEKENRDADIEKVDQSDVSAQKSDSTSATTTATSSLDQSDMPSTAINAVSVISSAMASLHTSDEDRFNNLAQLGLFRFENETVLHLYQMAQYRNPSAEPETLTKEEKAKAFELKDIHTPMDYIQFYETADVSSEFSLRQMEIMQSEFPKINYDPSYVITNKNVYTIQLKKEPFELFLDAALQNEFNQCRDFCNTFDLSFEQCIEFAGDYLLRRKKITQALLTYNKARVKPIRTALKLAMYGHTYALMQLSAMALKSTYLLRSRYLGHPLLKGILGDITYRHSEDVRVILPEKHEEEDVNSGVFCSDYHYGVDESISALQMSPSSQFHLANLLLITLAEKAV

SEQ ID NO: 26884 - DNA, 7962 bp, DROSOPHILA; identical to SEQ ID NO: 14515

SEQ ID NO: 26885 - DNA, 5173 bp, DROSOPHILA
gaaatcaaatcaaaagcttgagcccttgtcctcaggatatagaaagtatatgggaacttttaccgtctcgctgacatgaacgatctcggtgtgactaattagacggatggcagccagtccatagaagagcattgggcatacacctttttcgagttaccacggacctatgtagcataatccgtttactggacttacccaaattaatcaccttaaggaagcgaaagaacttgtcctccagccaaagatcctgcacctccctcttgctacagtgggtccaattaaagtgagacattcccctctgatcgttggccacatcgtgaaactagacttggagcatatttctcattagatctggtgaaaatattggggcggaaaaaggggagtcttaccttcacgaaatatgatgtccaaggtggctcatggcattgtttcaaatatgcggtcaatacttccgaggctcgaggcttcagtaaaaggcggaagtaccagcaagagacccgagctatccgagcactttacgctggatgagatggtggccaacgagaagctgcttcagtatgacgagggctcaaaggaacgcacggaactggaaaccgccctgctgggcgttctcaatagggtagagcacgttcccatcgttattaacggccaggagttccaggccaaggaggacttccaacaggttctgccctacgacatccaacagcccattgcccattacggtcatgcccaccgcgtgctcatccaaatggccatcgataagagtgtggaggcgcaggtgaagtgggacaaggtcaggcttagtgatcgaattgatatttgggagcgggcagcgatgctaattgccggaagataccgctacaacatcattgcggccacgatgttgggccagggaaaaacgctgcgccaggcggagatggatgtagccgagctggtggactttatgcgcattaatcccgtcttcctgcgtgagctggccaactacgaacccattagagacatccaaaacaattgcaggaactccatgcggttgagaggactttcgggtgggtctccatataatttatatggctttctatctttctataactttttatttgcaggatttgtggctgccatcagtccgtttaactttacgggtatcgccgccaatctggcctatacgcctgccttaatgggcaactcggtgatctggaagccctctgactcggccatcctgtccaactatttcgttttcaaggccctgcgggaggctggagtgcccgatggtgtggtgaactttgtgcccgccgaggagacaacgtttgcatccgtagtgacgcaacatccgaaattggcggggattaacttcactggtacctcaacggtgctcaaggtgctctggcaactggtggcccagaatataaatttctatcagaactatccccgtttggtgggcgagggaggcggcaagaatttccacttcgtacactcctcggcggaaccggaaacggcggtggcctgcacgataagagctgcctttgagtacgccggccagaagtgctcctcctgttcgatgttgtacgttccggaatccctgtggcagaatcacatacgagaacctcttcttgagatcactgcatctctggtcgtgcgacaagatgccacgtattgcgatagtttttgctcggcggtgatcaaccgacgggcctacgatcgcatctacatgtggctaaggtacatcgaccagagtcccagttgccagatcctcgttggaggaagctgcgacaagcgacgtggctattacgtagatccaacggtggtactggtcaaggatctggacaatatcatatgtcgggaagagctactggcacccattctcggtgtctatgtctatccagaccataagctcaaggagactatggaaaaggtggcccagattaatcatggattgacaggttcggtgtttgcccaggatcagaacttcatcgaggaagcatacgatgccttcagagtcaatgtgggcaacttaaatgtgaatgacaagtccaccggattgatggtgggtcagcagccttttggtgcgggacacatgaccggcaccagtgataagttgggcactccccactccctgctgcgatggacatcgccccaggtgattaaagagtcctacaagacacacaggaatatcttttatccatatatgcaaataaatgatcaggagcagggcatagcacaaagtgatatggtctcccaggatgaatcctcctttgggcacttcaacagtgatggcaacaaggtggtttgcactgaggcaaaggatcaggaactcagtatgtcgcataaggaagcctcgtcttggttgagaacgcaggacgacttggtcccgaaacattacaatagactatatgatgcctatcggcagcgaataaaagttgagggatccgaagatgccaaggtcgaggtcgaggcaaagatggaatcaaaagatcgagtaccaccacaaagggatctcacttcgttacccaaaaagacaaaaaagaaagaaaagctaatggctaaggagaaagattctacagaatttctcaatatcaaattcgatgccaccgatgatcggcctttggaatcgggtaactgtctagctcgtcttccatatcgaaatagagaaaatcaaagtgctaaggcaatggtcgaagctaaaggacaagtagaagataaaagcccactggtgggaagtatgattttgctaaaactggatgtccccgaaaatatgctacgagtaaaaaaacccgaaacgatcaaggatcctggagaacgtcgaatttccgatctcaatcgcatatacaacgaaattttgaaagtctggcaaaaaccaacaccaagtttgacctccaagtctgcgccgccgaaacccttaagctcgtcggggtctgtgaaaataagtgcattaacagatttaatggatgtgattgagaggcttcagaaaagcgatttagtcaaggaattggccgataaaataaacgaagaaatggaaccaaatttgcagaatcaaatcaagcaggatgctctactagtaacagatagcagagcctcattgagagctataaagaaaaataatatatccgggatctttgaaaatatggagcccggaagtgctaccaatgcattcaaaagattgttagatgacatcaactccaggagatcaagcattaaggctggtggactttacgatgagtataagaagggcttcgttcagttattcagtgatcataaatttcccagagaatcccatatcattagtgaaacggattatccttcggatagcgagtcgggtcgccggatgaacagtgaggacatccttccaagtcagtgtgataaacaaaaagcgactactgttgagtgtgacgaaccagaaactaaggccacaaccaagatgtgtgttcccattgaaaaaccaattacgagcaataagtgtgataaaccaaaagcgacaacgccaaaatgtaaggaaccacagagtaagaccccaactaaaagctgcttttcgaatgaaaatccgagccaaggcaataactatttgaaggctctgaacacatttatcaaaatgaacaaggaaagtaatcagaacggcggtcttaagccctattatctaccaaactccaaaaatcgtcagctggtttggaatgacattccattgataaagcctggtctcaatgaatcacctaagaaagaatcagagagtaagccgcactataagccatctagcaagaccattgaagagaatgtagtccccgaaaagaagcccgataaagtaactagctctaaacttaatacgaaaatcgaaactaaagtgatggagagtgttccaaaaatacaatcggttttctcaggactcgatcccaaacagataataggtggcttgaaggccatcaagcaatcttcattctttaacttggtggatgagtatcagaagcaaatcgaaaacctcaatcaggcgttgaaaacaaagcaaagttggtggaaggaggttttggagaggggcaaaaatccagccaggatacccatgaaaaggaacatattcatgaataatcctgtttctggccacgttttgcaagcaccgtttcccgaagtgctagtcaatcagccatcacagctgggcggtagtaatgtcattgacaccatggccactcaaatgaatctatcacctttggaggtggctcaaaggattgtgggaaccggtcaaaatgcagccgatggtggattgagatatgcacccaatcgcataccatcagcaagtcagatcggaagtagtttccgaaagggatcagagatcatgtgccaagtcccaagtccaccatcacagacgccgcatcaacagccagaggaccagctggggatttcgccggttctagacaagatcctggaacgattggagagcattcaggcaagcaagtcaagcaatcaatcgtcggaagaggaggaggagagaaagctgccctgctgcttcgtggatccagctgatggtgcgccctgcgatctaaacggatcctgggaatctcaagtccttggcattcgcataaatatcaagaccccgccaacaaattcagatggcgaagaagcggaaaagccgacctgtagccaacacaaaggtcgtacctatcgcaggacgagacgacagtgcgtcaagatgaacaggacgcagttgaaggatgcggccgacttgaaaactcccaattaccatggcattaagctaaatattagtgtgcaggagacagtgccgccgagggcccacgatctcctggataatctcaccgattggtatttctcgggacaagctatgatgatcctgggcgggccactttctctatccttccgcaaggcgaattccaatctgatcggtcactttgttggctattgtcgcacctgcggctgtgtggacaccattttcggttcgtggagcttctgccagccgtcgcgggattgccaggacatctgcatgtcgattgtggacagacgggatatgctacgacgatacagtatggatgagcggcgaaagaatcgattcaaggagcagctctatatgggcagcaagttcgccaaaatggaaaaggagcgccagctggccgagcaggaaaagtgccacaagcttgctcctcaagcttcgcgcgaaacgaatgggaatccaaacccataa

SEQ ID NO: 26886 - protein, 1590 aa, DROSOPHILA; identical to SEQ ID NO: 14517

SEQ ID NO: 26887 - DNA, 5934 bp, DROSOPHILA
aatcaagaatctctctactccgaaaccgaagatgctgtggcccaggagttggccatgttgtttggagaagagcctactgatcttaatcatatattcggcatcgaaccaactgctgttactgacgatccgcagatctcggccatactaaaggaaatagcgaatgcggaactacctgaaaaaattgagcatccacccacatccccaaccgccacaccaccaactgggcatcacagcgaggtggatcttcgccagagtcgctggccttgcgaactctacgcccagaggaggcgtctcaatgcctgtttagttcgcttactggaagcggattggcggtgcgaggaccgcttgagatataagtttcacctgatttttggcgaagacagcgatgatgagttcgcaaaccagttatccagcccgtcaattgatttagtggacgaagttctgctggccagctgcttgcttcgtattcgcccatggattgtacgtcatttgatgtctcccctggaggagggccttatcgccaatcgatttctgttcaagaagctagccaagatgctggcgcactccattgtcatggtcaatccatattgctccgagctggagatcaagcaggctgttgagcacttgttctgccttagacctagaggaatccagagcgcatatgatctggacaatctgccacccttggaggtctcaaaattcgaagtttaaggacaatttaccgattttcagttttaaaatatcaatatagttattaagatgcgagaaactatgaccctcaggataatactagtatttacgaatgattctaagcaatgagacaatgattttcgattgaacctacaacgaatttagtgaaagcaaaatggaatatgttcttcagtttaatactcaaatataaaactctgtaaaagtaagttatatacatacatgaatgcttccatgtccatacgctaaaagttgtgtgtcgaataaagccaaagcacaaagactacgttttgtggtttctttaaattataattaattcaatgattacaataatttttcttgctgcacatcttcctcatctttttataattatataaattttaatatatttaataaacgatacataatatagttttcctttcgacgacattgctgcggcggttgcgtcggcaactgcttaagacgattcggattcctccagagcagcagctatcccccactccggttgttactttaacggctgtgttggttttagttccatctgtttcgctttctgcttcccttgctgttgcggtgtttagtggtggtgacagatttcttgtggctgctgcagctacattgggtgtggttgctgttactgttgttgttgatgcaatttgtggtgatcatcatcatcagaggcactacctagtgtcgggaatttgatttgtgtttcccgccgccgtcgctgcactagcgttctgtttgtatttttgctgagacgctgccggattagccgtggactgctgctgctgttgtggctgctgcgagcccgtggccatctctcctggcggcggacgtccgctgcgcctctcgatgcctctatcagctgttggcttagtgccagctccactagcaccaccaccaggggctgcagttgctccagctccccccaatccgccagtaccgctcgtttgtgttgtgttggcctttttgtttttatagcgatactcgtcgcacacaaagtcctctggcgaggtttgttgcatttgattcacctgtcgcaccatcgccggctgtagctgttgctgctgctgctgctgctccacatctgcattgttgttcaacagcgtttccgcttgcgcctcggcctcggcatcctcttgctgctgctgttgccccttatttacattatcactcttggccaggctctcgtcggaggcattcaaatccagtgcctcagtgcagagcatcgatagcatcagcgactgcacaaacatggagctaaaagtaaatgcattaaggttaatggtcaatggcttacattgtggttccaggaaaataacacatctctatatcaataggttgttatttagccatgtggaaacactcaccgatctgctcgcatactctccacgaccgcccactcggcctcggtaaaggtgggctgcatgaattgggccaacaagaatgactcgccagctgccgcaccaccctggcctcctccctgtccagctcctccggctccagttgccacaccggatgaacctgctccaccgttgccgttggccgttccgccgacgcccacgctgatgcccaggacattgctgcctgcactgctgctcgttccgatcgcctgcagaacaagacatgggagattagtggacatttgactcaagatatgctggccaacgggatgaactacttctctggcattgaggctgttggcggccagactcgactgagtttgcgaatgattgctggccgatgtcgagaagctggctgtcaccggccactcagtggtgcgcaggttgggcggagcagttgccccgctgccgcctccactgccgcttccaactgcgccactgcctccactgccgcccgctccgccgctgatcacctcggccatggcggcattcgagttcgatgttgagactatgggatgcgcacgccttggcagccgatcgatttggcgcgatgcctaaaataatgcaagcgcaaaaccaagacaacgaaagtcgcagtttccttatacacacaaatataatatatatggggtggaggactctcccttaccgtcacctgctggcgatccaactgcatctgcatctgtagctgctgcagctgagatgtgggcggtccgcccctccgcacgccggaaagctgcgataacagttccgcaatgggatccaccgattcccgtcccgaaggcgacaaggctgatagaccgctagacgaactgaagtgcatgttggaccgacgcgtccgtggtccaccgagggtgcgtcctgggatgcgacgcactccaccgccatgacggatggccgagggttcatcgtattgtctacaggttaaggcaaccaagtgattggatttatacttataactagctgaaatattgatacaaaaatgccttcagctgcatcgcaaatttttcaaggcatttcattgcacgaaaattgctcgttacaggctagtcaataaaatttaagactgtttattgcgacagtctaaataaataaacggtgtataatttccaaagtattcaaaaatgtgtaaaccaaactaaaccgaattcaactgcttgttattcgcaacaccagacaaaataaaccacacttgcgcaaatgatctaataatatgactaataatgcgttgcgagtgctctgaatttttatgctgtcgcattttcatttttgagcataattcacgcacggaagtcagctttttgcaaaaacaatttcgaagtagttttctgattttacagccacgagcgattttgaaaataccaagaacaagccttttgtatggatgcagttgggcattgcgcgcaattaatgtatgatgtgtctgtttgaaaaaggatatcagaaaggaaatcagctcgcgcggtccctggcgatgctccagggtgaggtgaccggcaaagtcatctgtgactagattcggctcgccgcccggcagaccggcacatacggggcagaccacctctagactggtctccgtgtgctcggcggagacatgctccagcagggtggcgtcgctgaagcccatcttcttgcagtagggacaggtgaagctctgcggctggtcggaggctagcatctcgccgccaaagtacagctcgatatcggagcgggtgaggatgcactgcatgggatgctcgaccaaatggcgcgtggaggtgacgccatcctcgtagcaatcggcacacagatcgtagtcatagcagatcaagcacttgtagcgccgtccgttgaagttgctcttgagacatgaatcgcagctgacacctgggatgggataaatggttactatcagggtttctgcaagcttcaaggactcaccttcatgtcgactcattattcggcagcggcagtaggcttggcttcaacttccaagcgatcaggagagcgtctcccgcttaagattgacttgcttttaacttccagctgtgctggttttatgtgggttccttgcggggcttcggaggattccagtttttgaatttagattgagaggatctacaagaaagcagtggcgacaattattcatcagttgttatactcctcacattagaaaggaaaagtaaagcggataaaaaggatactgaaattgcagggcaaaaattgcagggagaaggacatggcatttccttcttttgttttccctgctctttcctagttctcttcttttgtattgcccgcgattacggttctttcttttcgccattccgtttgcccagcaaaaggctagagaagagaggcgcacataaagagaggggctccctgcactcggcccccgccacaaccctcttcaatgaggcaacgaattattcaatacaatcgtacgcgagccatcgaataattacacttagcaataggacttcagcggggcgtcgaggggttaattgcgattttccccgcagcagcgataccgctgcacagtaaacatttatttttaactttttcggtttcgcgaaaattttcaactcgacgatgtcgtgggctttttgtgcaaccgcctctgccccctcaccgaaaacctcttctcctggccctgctcccgaaaagcaaagcgcagatatgcgcgagtgttgccgtatttactgagggtctcagttagcaattgctcattattatttcgtgttattattattacagctattgtttataaacatttgcatccacttcacacacacggggaattatgcagacttttcgcgttaatcatgtcatgagcactcagttggtgaattacgctttttctcacatacatctggcaacgccgccagtcatggcacagtggcggccgtacaaatagacgcggtccccatttggttaagaagagcttttgcaagaactttgggcagacaggctgatttgggcagctgggaaataacagtaggtctgttttagttttgtcactatttatatgctaatgcgttgtctgtatcttgctcttgtttttcggcacattgttcatcggcgcgcaattttcgtacacccatcttgacatatacacaagcattttgcactggtgtgctatgtgtctatgtgcagacaccaatatgtgtattctgttctacgcaattgcaaattgcgcctgggatctgatctcttttgttcgccgcgatatttcgcacaagatgctccgctcgcgatgtgttattgttgttgtggggctgctgtattgcagttttaccgttttgcttcacaccgatttcgttagggatttgataagttattgattcgttctattttggggataacacgacaacgtactttactttggtgcggcattggctactttacgataactttataacactagacctcgaaaatgaacaattgaaacgaaaataagttatattatatcgagtgaaaagcttttcctgacctgcagtgcgaccgtttgccgcttgagcgcaaaataccgaatgtcgataactacagaagttggaatttatccgaaaatccacccttggaaaattacattgtcttgtcaattattttctttattattaaaatagtttttcttaatcctctagcttttctggtggtggcccacatggctgcagcattcgctccatcagattaaatcgcactcgtgccttcgattcattttccgctatggcaaagtagttgagaatatcgtagtgacccatgtagctggccaaggagtcgcgatgttgatttgttagccactcgaactttgtggtatccgcgtgtcctgttccgatgtact

SEQ ID NO: 26888 - DNA, 2639 bp, DROSOPHILA
tgagtgctcatgacatgattaacgcgaaaagtctgcataattccccgtgtgtgtgaagtggatgcaaatgtttataaacaatagctatcctctcaatctaaattcaaaaactggaatcctccgaagccccgcaaggaacccacataaaaccagcacagctggaagttaaaagcaagtcaatcttaagcgggagacgctctcctgatcgcttggaagttgaagccaagcctactgccgctgccgaataatgagtcgacatgaaggtgtcagctgcgattcatgtctcaagagcaacttcaacggacggcgctacaagtgcttgatctgctatgactacgatctgtgtgccgattgctacgaggatggcgtcacctccacgcgccatttggtcgagcatcccatgcagtgcatcctcacccgctccgatatcgagctgtactttggcggcgagatgctagcctccgaccagccgcagagcttcacctgtccctactgcaagaagatgggcttcagcgacgccaccctgctggagcatgtctccgccgagcacacggagaccagtctagaggtggtctgccccgtatgtgccggtctgccgggcggcgagccgaatctagtcacagatgactttgccggtcacctcaccctggagcatcgccagggaccgcgcgagctgatttcctttctgatatcctttttcaaacagacacatcatacattaattgcgcgcaatgcccaactgcatccatacaaaaggcttgttcttgctagttataagtataaatccaatcacttggttgccttaacctgtagacaatacgatgaaccctcggccatccgtcatggcggtggagtgcgtcgcatcccaggacgcaccctcggtggaccacggacgcgtcggtccaacatgcacttcagttcgtctagcggtctatcagccttgtcgccttcgggacgggaatcggtggatcccattgcggaactgttatcgcagctttccggcgtgcggaggggcggaccgcccacatctcagctgcagcagctacagatgcagatgcagttggatcgccagcaggtgacggcatcgcgccaaatcgatcggctgccaaggcgtgcgcatcccatagtctcaacatcgaactcgaatgccgccatggccgaggtgatcagcggcggagcgggcggcagtggaggcagtggcgcagttggaagcggcagtggaggcggcagcggggcaactgctccgcccaacctgcgcaccactgagtggccggtgacagccagcttctcgacatcggccagcaatcattcgcaaactcagtcgagtctggccgccaacagcctcaatgccagagaagtagttcatcccgttggccagcatatcttgagtcaaatgtccactaatctcccatgtcttgttctgcaggcgatcggaacgagcagcagtgcaggcagcaatgtcctgggcatcagcgtgggcgtcggcggaacggccaacggcaacggtggagcaggttcatccggtgtggcaactggagccggaggagctggacagggaggaggccagggtggtgcggcagctggcgagtcattcttgttggcccaattcatgcagcccacctttaccgaggccgagtgggcggtcgtggagagtatgcgagcagatcgctccatgtttgtgcagtcgctgatgctatcgatgctctgcactgaggcactggatttgaatgcctccgacgagagcctggccaagagtgataatgtaaataaggggcaacagcagcagcaagaggatgccgaggccgaggcgcaagcggaaacgctgttgaacaacaatgcagatgtggagcagcagcagcagcagcaacagctacagccggcgatggtgcgacaggtgaatcaaatgcaacaaacctcgccagaggactttgtgtgcgacgagtatcgctataaaaacaaaaaggccaacacaacacaaacgagcggtactggcggattggggggagctggagcaactgcagcccctggtggtggtgctagtggagctggcactaagccaacagctgatagaggcatcgagaggcgcagcggacgtccgccgccaggagagatggccacgggctcgcagcagccacaacagcagcagcagtccacggctaatccggcagcgtctcagcaaaaatacaaacagaacgctagtgcagcgacggcggcgggaaacacaaatcaaattcccgacactaggtagtgcctctgatgatgatgatcaccacaaattgcatcaacaacaacagtaacagcaaccacacccaatgtagctgcagcagccacaagaaatctgtcaccaccactaaacaccgcaacagcaagggaagcagaaagcgaaacagatggaactaaaaccaacacagccgttaaagtaacaaccggagtgggggatagctgctgctctggaggaatccgaatcgtcttaagcagttgccgacgcaaccgccgcagcaatgtcgtcgaaaggaaaactatattatgtatcgtttattaaatatattaaaatttatataattataaaaagatgaggaagatgtgcagcaagaaaaattattgtaatcattgaattaattataatttaaagaaaccac

SEQ ID NO: 26889 - protein, 666 aa, DROSOPHILA
MSRHEGVSCDSCLKSNFNGRRYKCLICYDYDLCADCYEDGVTSTRHLVEHPMQCILTRSDIELYFGGEMLASDQPQSFTCPYCKKMGFSDATLLEHVSAEHTETSLEVVCPVCAGLPGGEPNLVTDDFAGHLTLEHRQGPRELISFLISFFKQTHHTLIARNAQLHPYKRLVLASYKYKSNHLVALTCRQYDEPSAIRHGGGVRRIPGRTLGGPRTRRSNMHFSSSSGLSALSPSGRESVDPIAELLSQLSGVRRGGPPTSQLQQLQMQMQLDRQQVTASRQIDRLPRRAHPIVSTSNSNAAMAEVISGGAGGSGGSGAVGSGSGGGSGATAPPNLRTTEWPVTASFSTSASNHSQTQSSLAANSLNAREVVHPVGQHILSQMSTNLPCLVLQAIGTSSSAGSNVLGISVGVGGTANGNGGAGSSGVATGAGGAGQGGGQGGAAAGESFLLAQFMQPTFTEAEWAVVESMRADRSMFVQSLMLSMLCTEALDLNASDESLAKSDNVNKGQQQQQEDAEAEAQAETLLNNNADVEQQQQQQQLQPAMVRQVNQMQQTSPEDFVCDEYRYKNKKANTTQTSGTGGLGGAGATAAPGGGASGAGTKPTADRGIERRSGRPPPGEMATGSQQPQQQQQSTANPAASQQKYKQNASAATAAGNTNQIPDTR

SEQ ID NO: 26890 - DNA, 5711 bp, DROSOPHILA
aatcaagaatctctctactccgaaaccgaagatgctgtggcccaggagttggccatgttgtttggagaagagcctactgatcttaatcatatattcggcatcgaaccaactgctgttactgacgatccgcagatctcggccatactaaaggaaatagcgaatgcggaactacctgaaaaaattgagcatccacccacatccccaaccgccacaccaccaactgggcatcacagcgaggtggatcttcgccagagtcgctggccttgcgaactctacgcccagaggaggcgtctcaatgcctgtttagttcgcttactggaagcggattggcggtgcgaggaccgcttgagatataagtttcacctgatttttggcgaagacagcgatgatgagttcgcaaaccagttatccagcccgtcaattgatttagtggacgaagttctgctggccagctgcttgcttcgtattcgcccatggattgtacgtcatttgatgtctcccctggaggagggccttatcgccaatcgatttctgttcaagaagctagccaagatgctggcgcactccattgtcatggtcaatccatattgctccgagctggagatcaagcaggctgttgagcacttgttctgccttagacctagaggaatccagagcgcatatgatctggacaatctgccacccttggaggtctcaaaattcgaagtttaaggacaatttaccgattttcagttttaaaatatcaatatagttattaagatgcgagaaactatgaccctcaggataatactagtatttacgaatgattctaagcaatgagacaatgattttcgattgaacctacaacgaatttagtgaaagcaaaatggaatatgttcttcagtttaatactcaaatataaaactctgtaaaagtaagttatatacatacatgaatgcttccatgtccatacgctaaaagttgtgtgtcgaataaagccaaagcacaaagactacgttttgtggtttctttaaattataattaattcaatgattacaataatttttcttgctgcacatcttcctcatctttttataattatataaattttaatatatttaataaacgatacataatatagttttcctttcgacgacattgctgcggcggttgcgtcggcaactgcttaagacgattcggattcctccagagcagcagctatcccccactccggttgttactttaacggctgtgttggttttagttccatctgtttcgctttctgcttcccttgctgttgcggtgtttagtggtggtgacagatttcttgtggctgctgcagctacattgggtgtggttgctgttactgttgttgttgatgcaatttgtggtgatcatcatcatcagaggcactacctagtgtcgggaatttgatttgtgtttcccgccgccgtcgctgcactagcgttctgtttgtatttttgctgagacgctgccggattagccgtggactgctgctgctgttgtggctgctgcgagcccgtggccatctctcctggcggcggacgtccgctgcgcctctcgatgcctctatcagctgttggcttagtgccagctccactagcaccaccaccaggggctgcagttgctccagctccccccaatccgccagtaccgctcgtttgtgttgtgttggcctttttgtttttatagcgatactcgtcgcacacaaagtcctctggcgaggtttgttgcatttgattcacctgtcgcaccatcgccggctgtagctgttgctgctgctgctgctgctccacatctgcattgttgttcaacagcgtttccgcttgcgcctcggcctcggcatcctcttgctgctgctgttgccccttatttacattatcactcttggccaggctctcgtcggaggcattcaaatccagtgcctcagtgcagagcatcgatagcatcagcgactgcacaaacatggagctaaaagtaaatgcattaaggttaatggtcaatggcttacattgtggttccaggaaaataacacatctctatatcaataggttgttatttagccatgtggaaacactcaccgatctgctcgcatactctccacgaccgcccactcggcctcggtaaaggtgggctgcatgaattgggccaacaagaatgactcgccagctgccgcaccaccctggcctcctccctgtccagctcctccggctccagttgccacaccggatgaacctgctccaccgttgccgttggccgttccgccgacgcccacgctgatgcccaggacattgctgcctgcactgctgctcgttccgatcgcctgcagaacaagacatgggagattagtggacatttgactcaagatatgctggccaacgggatgaactacttctctggcattgaggctgttggcggccagactcgactgagtttgcgaatgattgctggccgatgtcgagaagctggctgtcaccggccactcagtggtgcgcaggttgggcggagcagttgccccgctgccgcctccactgccgcttccaactgcgccactgcctccactgccgcccgctccgccgctgatcacctcggccatggcggcattcgagttcgatgttgagactatgggatgcgcacgccttggcagccgatcgatttggcgcgatgcctaaaataatgcaagcgcaaaaccaagacaacgaaagtcgcagtttccttatacacacaaatataatatatatggggtggaggactctcccttaccgtcacctgctggcgatccaactgcatctgcatctgtagctgctgcagctgagatgtgggcggtccgcccctccgcacgccggaaagctgcgataacagttccgcaatgggatccaccgattcccgtcccgaaggcgacaaggctgatagaccgctagacgaactgaagtgcatgttggaccgacgcgtccgtggtccaccgagggtgcgtcctgggatgcgacgcactccaccgccatgacggatggccgagggttcatcgtattgtctacaggttaaggcaaccaagtgattggatttatacttataactagctgaaatattgatacaaaaatgccttcagctgcatcgcaaatttttcaaggcatttcattgcacgaaaattgctcgttacaggctagtcaataaaatttaagactgtttattgcgacagtctaaataaataaacggtgtataatttccaaagtattcaaaaatgtgtaaaccaaactaaaccgaattcaactgcttgttattcgcaacaccagacaaaataaaccacacttgcgcaaatgatctaataatatgactaataatgcgttgcgagtgctctgaatttttatgctgtcgcattttcatttttgagcataattcacgcacggaagtcagctttttgcaaaaacaatttcgaagtagttttctgattttacagccacgagcgattttgaaaataccaagaacaagccttttgtatggatgcagttgggcattgcgcgcaattaatgtatgatgtgtctgtttgaaaaaggatatcagaaaggaaatcagctcgcgcggtccctggcgatgctccagggtgaggtgaccggcaaagtcatctgtgactagattcggctcgccgcccggcagaccggcacatacggggcagaccacctctagactggtctccgtgtgctcggcggagacatgctccagcagggtggcgtcgctgaagcccatcttcttgcagtagggacaggtgaagctctgcggctggtcggaggctagcatctcgccgccaaagtacagctcgatatcggagcgggtgaggatgcactgcatgggatgctcgaccaaatggcgcgtggaggtgacgccatcctcgtagcaatcggcacacagatcgtagtcatagcagatcaagcacttgtagcgccgtccgttgaagttgctcttgagacatgaatcgcagctgacacctgggatgggataaatggttactatcagggtttctgcaagcttcaaggactcaccttcatgtcgactcattattcggcagcggcagtaggcttggcttcaacttccaagcgatcaggagagcgtctcccgcttaagattgacttgcttttaacttccagctgtgctggttttatgtgggttccttgcggggcttcggaggattccagtttttgaatttagattgagaggatctacaagaaagcagtggcgacaattattcatcagttgttatactcctcacattagaaaggaaaagtaaagcggataaaaaggatactgaaattgcagggcaaaaattgcagggagaaggacatggcatttccttcttttgttttccctgctctttcctagttctcttcttttgtattgcccgcgattacggttctttcttttcgccattccgtttgcccagcaaaaggctagagaagagaggcgcacataaagagaggggctccctgcactcggcccccgccacaaccctcttcaatgaggcaacgaattattcaatacaatcgtacgcgagccatcgaataattacacttagcaataggacttcagcggggcgtcgaggggttaattgcgattttccccgcagcagcgataccgctgcacagtaaacatttatttttaactttttcggtttcgcgaaaattttcaactcgacgatgtcgtgggctttttgtgcaaccgcctctgccccctcaccgaaaacctcttctcctggccctgctcccgaaaagcaaagcgcagatatgcgcgagtgttgccgtatttactgagggtctcagttagcaattgctcattattatttcgtgttattattattacagctattgtttataaacatttgcatccacttcacacacacggggaattatgcagacttttcgcgttaatcatgtcatgagcactcagttggtgaattacgctttttctcacatacatctggcaacgccgccagtcatggcacagtggcggccgtacaaatagacgcggtccccatttggttaagaagagcttttgcaagaactttgggcagacaggctgatttgggcagctgggaaataacagtaggtctgttttagttttgtcactatttatatgctaatgcgttgtctgtatcttgctcttgtttttcggcacattgttcatcggcgcgcaattttcgtacacccatcttgacatatacacaagcattttgcactggtgtgctatgtgtctatgtgcagacaccaatatgtgtattctgttctacgcaattgcaaattgcgcctgggatctgatctcttttgttcgccgcgatatttcgcacaagatgctccgctcgcgatgtgttattgttgttgtggggctgctgtattgcagttttaccgttttgcttcacaccgatttcgttagggatttgataagttattgattcgttctattttggggataacacgacaacgtactttactttggtgcggcattggctactttacgataactttataacactagacctcgaaaatgaacaattgaaacgaaaataagttatattatatcgagtgaaaagcttttcctgacctgcagtgcgaccgtttgccgcttgagcgcaaaataccgaatgtcgataactacagaagttggaatttatccgaaaatccacccttggaaaattacattgtcttgtcaattattttctttattat

SEQ ID NO: 26891 - DNA, 2706 bp, DROSOPHILA
gcggttgcacaaaaagcccacgacatcgtcgagttgaaaattttcgcgaaaccgaaaaagttaaaaataaatgtttactgtgcagcggtatcgctgctgcggggaaaatcgcaattaacccctcgacgccccgctgaagtcctattgctaagtatcctctcaatctaaattcaaaaactggaatcctccgaagccccgcaaggaacccacataaaaccagcacagctggaagttaaaagcaagtcaatcttaagcgggagacgctctcctgatcgcttggaagttgaagccaagcctactgccgctgccgaataatgagtcgacatgaaggtgtcagctgcgattcatgtctcaagagcaacttcaacggacggcgctacaagtgcttgatctgctatgactacgatctgtgtgccgattgctacgaggatggcgtcacctccacgcgccatttggtcgagcatcccatgcagtgcatcctcacccgctccgatatcgagctgtactttggcggcgagatgctagcctccgaccagccgcagagcttcacctgtccctactgcaagaagatgggcttcagcgacgccaccctgctggagcatgtctccgccgagcacacggagaccagtctagaggtggtctgccccgtatgtgccggtctgccgggcggcgagccgaatctagtcacagatgactttgccggtcacctcaccctggagcatcgccagggaccgcgcgagctgatttcctttctgatatcctttttcaaacagacacatcatacattaattgcgcgcaatgcccaactgcatccatacaaaaggcttgttcttgctagttataagtataaatccaatcacttggttgccttaacctgtagacaatacgatgaaccctcggccatccgtcatggcggtggagtgcgtcgcatcccaggacgcaccctcggtggaccacggacgcgtcggtccaacatgcacttcagttcgtctagcggtctatcagccttgtcgccttcgggacgggaatcggtggatcccattgcggaactgttatcgcagctttccggcgtgcggaggggcggaccgcccacatctcagctgcagcagctacagatgcagatgcagttggatcgccagcaggtgacggcatcgcgccaaatcgatcggctgccaaggcgtgcgcatcccatagtctcaacatcgaactcgaatgccgccatggccgaggtgatcagcggcggagcgggcggcagtggaggcagtggcgcagttggaagcggcagtggaggcggcagcggggcaactgctccgcccaacctgcgcaccactgagtggccggtgacagccagcttctcgacatcggccagcaatcattcgcaaactcagtcgagtctggccgccaacagcctcaatgccagagaagtagttcatcccgttggccagcatatcttgagtcaaatgtccactaatctcccatgtcttgttctgcaggcgatcggaacgagcagcagtgcaggcagcaatgtcctgggcatcagcgtgggcgtcggcggaacggccaacggcaacggtggagcaggttcatccggtgtggcaactggagccggaggagctggacagggaggaggccagggtggtgcggcagctggcgagtcattcttgttggcccaattcatgcagcccacctttaccgaggccgagtgggcggtcgtggagagtatgcgagcagatcgctccatgtttgtgcagtcgctgatgctatcgatgctctgcactgaggcactggatttgaatgcctccgacgagagcctggccaagagtgataatgtaaataaggggcaacagcagcagcaagaggatgccgaggccgaggcgcaagcggaaacgctgttgaacaacaatgcagatgtggagcagcagcagcagcagcaacagctacagccggcgatggtgcgacaggtgaatcaaatgcaacaaacctcgccagaggactttgtgtgcgacgagtatcgctataaaaacaaaaaggccaacacaacacaaacgagcggtactggcggattggggggagctggagcaactgcagcccctggtggtggtgctagtggagctggcactaagccaacagctgatagaggcatcgagaggcgcagcggacgtccgccgccaggagagatggccacgggctcgcagcagccacaacagcagcagcagtccacggctaatccggcagcgtctcagcaaaaatacaaacagaacgctagtgcagcgacggcggcgggaaacacaaatcaaattcccgacactaggtagtgcctctgatgatgatgatcaccacaaattgcatcaacaacaacagtaacagcaaccacacccaatgtagctgcagcagccacaagaaatctgtcaccaccactaaacaccgcaacagcaagggaagcagaaagcgaaacagatggaactaaaaccaacacagccgttaaagtaacaaccggagtgggggatagctgctgctctggaggaatccgaatcgtcttaagcagttgccgacgcaaccgccgcagcaatgtcgtcgaaaggaaaactatattatgtatcgtttattaaatatattaaaatttatataattataaaaagatgaggaagatgtgcagcaagaaaaattattgtaatcattgaattaattataatttaaagaaaccac

SEQ ID NO: 26892 - protein, 666 aa, DROSOPHILA; identical to SEQ ID NO: 26889

SEQ ID NO: 26893 - DNA, 5362 bp, DROSOPHILA
aatcaagaatctctctactccgaaaccgaagatgctgtggcccaggagttggccatgttgtttggagaagagcctactgatcttaatcatatattcggcatcgaaccaactgctgttactgacgatccgcagatctcggccatactaaaggaaatagcgaatgcggaactacctgaaaaaattgagcatccacccacatccccaaccgccacaccaccaactgggcatcacagcgaggtggatcttcgccagagtcgctggccttgcgaactctacgcccagaggaggcgtctcaatgcctgtttagttcgcttactggaagcggattggcggtgcgaggaccgcttgagatataagtttcacctgatttttggcgaagacagcgatgatgagttcgcaaaccagttatccagcccgtcaattgatttagtggacgaagttctgctggccagctgcttgcttcgtattcgcccatggattgtacgtcatttgatgtctcccctggaggagggccttatcgccaatcgatttctgttcaagaagctagccaagatgctggcgcactccattgtcatggtcaatccatattgctccgagctggagatcaagcaggctgttgagcacttgttctgccttagacctagaggaatccagagcgcatatgatctggacaatctgccacccttggaggtctcaaaattcgaagtttaaggacaatttaccgattttcagttttaaaatatcaatatagttattaagatgcgagaaactatgaccctcaggataatactagtatttacgaatgattctaagcaatgagacaatgattttcgattgaacctacaacgaatttagtgaaagcaaaatggaatatgttcttcagtttaatactcaaatataaaactctgtaaaagtaagttatatacatacatgaatgcttccatgtccatacgctaaaagttgtgtgtcgaataaagccaaagcacaaagactacgttttgtggtttctttaaattataattaattcaatgattacaataatttttcttgctgcacatcttcctcatctttttataattatataaattttaatatatttaataaacgatacataatatagttttcctttcgacgacattgctgcggcggttgcgtcggcaactgcttaagacgattcggattcctccagagcagcagctatcccccactccggttgttactttaacggctgtgttggttttagttccatctgtttcgctttctgcttcccttgctgttgcggtgtttagtggtggtgacagatttcttgtggctgctgcagctacattgggtgtggttgctgttactgttgttgttgatgcaatttgtggtgatcatcatcatcagaggcactacctagtgtcgggaatttgatttgtgtttcccgccgccgtcgctgcactagcgttctgtttgtatttttgctgagacgctgccggattagccgtggactgctgctgctgttgtggctgctgcgagcccgtggccatctctcctggcggcggacgtccgctgcgcctctcgatgcctctatcagctgttggcttagtgccagctccactagcaccaccaccaggggctgcagttgctccagctccccccaatccgccagtaccgctcgtttgtgttgtgttggcctttttgtttttatagcgatactcgtcgcacacaaagtcctctggcgaggtttgttgcatttgattcacctgtcgcaccatcgccggctgtagctgttgctgctgctgctgctgctccacatctgcattgttgttcaacagcgtttccgcttgcgcctcggcctcggcatcctcttgctgctgctgttgccccttatttacattatcactcttggccaggctctcgtcggaggcattcaaatccagtgcctcagtgcagagcatcgatagcatcagcgactgcacaaacatggagctaaaagtaaatgcattaaggttaatggtcaatggcttacattgtggttccaggaaaataacacatctctatatcaataggttgttatttagccatgtggaaacactcaccgatctgctcgcatactctccacgaccgcccactcggcctcggtaaaggtgggctgcatgaattgggccaacaagaatgactcgccagctgccgcaccaccctggcctcctccctgtccagctcctccggctccagttgccacaccggatgaacctgctccaccgttgccgttggccgttccgccgacgcccacgctgatgcccaggacattgctgcctgcactgctgctcgttccgatcgcctgcagaacaagacatgggagattagtggacatttgactcaagatatgctggccaacgggatgaactacttctctggcattgaggctgttggcggccagactcgactgagtttgcgaatgattgctggccgatgtcgagaagctggctgtcaccggccactcagtggtgcgcaggttgggcggagcagttgccccgctgccgcctccactgccgcttccaactgcgccactgcctccactgccgcccgctccgccgctgatcacctcggccatggcggcattcgagttcgatgttgagactatgggatgcgcacgccttggcagccgatcgatttggcgcgatgcctaaaataatgcaagcgcaaaaccaagacaacgaaagtcgcagtttccttatacacacaaatataatatatatggggtggaggactctcccttaccgtcacctgctggcgatccaactgcatctgcatctgtagctgctgcagctgagatgtgggcggtccgcccctccgcacgccggaaagctgcgataacagttccgcaatgggatccaccgattcccgtcccgaaggcgacaaggctgatagaccgctagacgaactgaagtgcatgttggaccgacgcgtccgtggtccaccgagggtgcgtcctgggatgcgacgcactccaccgccatgacggatggccgagggttcatcgtattgtctacaggttaaggcaaccaagtgattggatttatacttataactagctgaaatattgatacaaaaatgccttcagctgcatcgcaaatttttcaaggcatttcattgcacgaaaattgctcgttacaggctagtcaataaaatttaagactgtttattgcgacagtctaaataaataaacggtgtataatttccaaagtattcaaaaatgtgtaaaccaaactaaaccgaattcaactgcttgttattcgcaacaccagacaaaataaaccacacttgcgcaaatgatctaataatatgactaataatgcgttgcgagtgctctgaatttttatgctgtcgcattttcatttttgagcataattcacgcacggaagtcagctttttgcaaaaacaatttcgaagtagttttctgattttacagccacgagcgattttgaaaataccaagaacaagccttttgtatggatgcagttgggcattgcgcgcaattaatgtatgatgtgtctgtttgaaaaaggatatcagaaaggaaatcagctcgcgcggtccctggcgatgctccagggtgaggtgaccggcaaagtcatctgtgactagattcggctcgccgcccggcagaccggcacatacggggcagaccacctctagactggtctccgtgtgctcggcggagacatgctccagcagggtggcgtcgctgaagcccatcttcttgcagtagggacaggtgaagctctgcggctggtcggaggctagcatctcgccgccaaagtacagctcgatatcggagcgggtgaggatgcactgcatgggatgctcgaccaaatggcgcgtggaggtgacgccatcctcgtagcaatcggcacacagatcgtagtcatagcagatcaagcacttgtagcgccgtccgttgaagttgctcttgagacatgaatcgcagctgacacctgggatgggataaatggttactatcagggtttctgcaagcttcaaggactcaccttcatgtcgactcattattcggcagcggcagtaggcttggcttcaacttccaagcgatcaggagagcgtctcccgcttaagattgacttgcttttaacttccagctgtgctggttttatgtgggttccttgcggggcttcggaggattccagtttttgaatttagattgagaggatctacaagaaagcagtggcgacaattattcatcagttgttatactcctcacattagaaaggaaaagtaaagcggataaaaaggatactgaaattgcagggcaaaaattgcagggagaaggacatggcatttccttcttttgttttccctgctctttcctagttctcttcttttgtattgcccgcgattacggttctttcttttcgccattccgtttgcccagcaaaaggctagagaagagaggcgcacataaagagaggggctccctgcactcggcccccgccacaaccctcttcaatgaggcaacgaattattcaatacaatcgtacgcgagccatcgaataattacacttagcaataggacttcagcggggcgtcgaggggttaattgcgattttccccgcagcagcgataccgctgcacagtaaacatttatttttaactttttcggtttcgcgaaaattttcaactcgacgatgtcgtgggctttttgtgcaaccgcctctgccccctcaccgaaaacctcttctcctggccctgctcccgaaaagcaaagcgcagatatgcgcgagtgttgccgtatttactgagggtctcagttagcaattgctcattattatttcgtgttattattattacagctattgtttataaacatttgcatccacttcacacacacggggaattatgcagacttttcgcgttaatcatgtcatgagcactcagttggtgaattacgctttttctcacatacatctggcaacgccgccagtcatggcacagtggcggccgtacaaatagacgcggtccccatttggttaagaagagcttttgcaagaactttgggcagacaggctgatttgggcagctgggaaataacagtaggtctgttttagttttgtcactatttatatgctaatgcgttgtctgtatcttgctcttgtttttcggcacattgttcatcggcgcgcaattttcgtacacccatcttgacatatacacaagcattttgcactggtgtgctatgtgtctatgtgcagacaccaatatgtgtattctgttctacgcaattgcaaattgcgcctgggatctgatctcttttgttcgccgcgatatttcgcacaagatgctccgctcgcgatgtgttattgtt

SEQ ID NO: 26894 - DNA, 2618 bp, DROSOPHILA
agcagggaaaacaaaagaaggaaatgccatgtccttctccctgcaatttttgccctgcaatttcaatcctctcaatctaaattcaaaaactggaatcctccgaagccccgcaaggaacccacataaaaccagcacagctggaagttaaaagcaagtcaatcttaagcgggagacgctctcctgatcgcttggaagttgaagccaagcctactgccgctgccgaataatgagtcgacatgaaggtgtcagctgcgattcatgtctcaagagcaacttcaacggacggcgctacaagtgcttgatctgctatgactacgatctgtgtgccgattgctacgaggatggcgtcacctccacgcgccatttggtcgagcatcccatgcagtgcatcctcacccgctccgatatcgagctgtactttggcggcgagatgctagcctccgaccagccgcagagcttcacctgtccctactgcaagaagatgggcttcagcgacgccaccctgctggagcatgtctccgccgagcacacggagaccagtctagaggtggtctgccccgtatgtgccggtctgccgggcggcgagccgaatctagtcacagatgactttgccggtcacctcaccctggagcatcgccagggaccgcgcgagctgatttcctttctgatatcctttttcaaacagacacatcatacattaattgcgcgcaatgcccaactgcatccatacaaaaggcttgttcttgctagttataagtataaatccaatcacttggttgccttaacctgtagacaatacgatgaaccctcggccatccgtcatggcggtggagtgcgtcgcatcccaggacgcaccctcggtggaccacggacgcgtcggtccaacatgcacttcagttcgtctagcggtctatcagccttgtcgccttcgggacgggaatcggtggatcccattgcggaactgttatcgcagctttccggcgtgcggaggggcggaccgcccacatctcagctgcagcagctacagatgcagatgcagttggatcgccagcaggtgacggcatcgcgccaaatcgatcggctgccaaggcgtgcgcatcccatagtctcaacatcgaactcgaatgccgccatggccgaggtgatcagcggcggagcgggcggcagtggaggcagtggcgcagttggaagcggcagtggaggcggcagcggggcaactgctccgcccaacctgcgcaccactgagtggccggtgacagccagcttctcgacatcggccagcaatcattcgcaaactcagtcgagtctggccgccaacagcctcaatgccagagaagtagttcatcccgttggccagcatatcttgagtcaaatgtccactaatctcccatgtcttgttctgcaggcgatcggaacgagcagcagtgcaggcagcaatgtcctgggcatcagcgtgggcgtcggcggaacggccaacggcaacggtggagcaggttcatccggtgtggcaactggagccggaggagctggacagggaggaggccagggtggtgcggcagctggcgagtcattcttgttggcccaattcatgcagcccacctttaccgaggccgagtgggcggtcgtggagagtatgcgagcagatcgctccatgtttgtgcagtcgctgatgctatcgatgctctgcactgaggcactggatttgaatgcctccgacgagagcctggccaagagtgataatgtaaataaggggcaacagcagcagcaagaggatgccgaggccgaggcgcaagcggaaacgctgttgaacaacaatgcagatgtggagcagcagcagcagcagcaacagctacagccggcgatggtgcgacaggtgaatcaaatgcaacaaacctcgccagaggactttgtgtgcgacgagtatcgctataaaaacaaaaaggccaacacaacacaaacgagcggtactggcggattggggggagctggagcaactgcagcccctggtggtggtgctagtggagctggcactaagccaacagctgatagaggcatcgagaggcgcagcggacgtccgccgccaggagagatggccacgggctcgcagcagccacaacagcagcagcagtccacggctaatccggcagcgtctcagcaaaaatacaaacagaacgctagtgcagcgacggcggcgggaaacacaaatcaaattcccgacactaggtagtgcctctgatgatgatgatcaccacaaattgcatcaacaacaacagtaacagcaaccacacccaatgtagctgcagcagccacaagaaatctgtcaccaccactaaacaccgcaacagcaagggaagcagaaagcgaaacagatggaactaaaaccaacacagccgttaaagtaacaaccggagtgggggatagctgctgctctggaggaatccgaatcgtcttaagcagttgccgacgcaaccgccgcagcaatgtcgtcgaaaggaaaactatattatgtatcgtttattaaatatattaaaatttatataattataaaaagatgaggaagatgtgcagcaagaaaaattattgtaatcattgaattaattataatttaaagaaaccac

SEQ ID NO: 26895 - protein, 666 aa, DROSOPHILA; identical to SEQ ID NO: 26889

SEQ ID NO: 26896 - DNA, 7162 bp, DROSOPHILA
gtggacgagaagctgcggcgagggcctggctacgactacgccccacacatcggactgaaaaccgcttcacgtgcgtaacaccatcgccgccgacagctgcacacgaccaacacgttttctcggcggagcaaatggcctcgtggcatagtgggggatggaccggggtttgggttctccaatgtgctcttgttgtcatccgcgctcaggctgcgagcttttggattgcgtgctacgccgagcagcgcaactacacagcacattttatggggagttttagtgggataccctgtgaatgtgggtatatttgaagactgacctcacgtaactcggccggggattgggtttcacttgtgaattttggtatgcaaaagggtttgagtatgtttaaacttataatggcaaaagataatcaatgagtaaacattattttatccgaccagctagtatattgcactgtattttctagttatatattctttttattgatttagcccaaagcaacattccttgctaatattctcctagttattctacagacaaagcactctgttttcccttatcggtactttaaatggatcaaccagtgccgtttaattatgcccactcataaacagttagcctaggaacattttgattaccacctagacggttgattaaatttcgcatattccgctttgttctcctgtcctgattctggacgatcgagggcattgctaattcgattaatcttcatgttttctgtattatctggtgtgtttcgctgttttctgtttttgtttcgtcgctgcccgtcggtagaggccaacaacatttcgaaaaagccccagccgcaactgtaccgccggactgaaaaccaaaacaaatcgccaagtcgtcggatacgactacgactctcgcacaaagaaaaaagctccgccactcagtttcgataaaaagaaatcgtttaaattgcgcgcacaacaaaagcgcccgaaacagttgcgattgcaacgtcgatttgtgacgacggaccgtctacagcgtcctagttcccactgtccacaaaggatacaaacccgaataacaaaaccagcagtacataaaagccaacaggcccaatacccaagtacaaaatgcttgcctagctaaagaaactgaaatattgcgcatacgccgcatagtgcaaacaattaactgtgatacaagtggaattttcttgatttcgttggtccccgcaccaaagcaacctatcctacctaacttacttgtgctatccccaaaaaccaagaagccgaaaagaagcagaatgtcggtgccaatgctgctgacccccatggaagcccagagtccggatgaccacatgaaaaatgtaattacccacatccagtggacagtaccggaaatctttgtaaatgcatactttaggctttacagatttttcgactgtcggcatagtgcaggtgtttgagcttttgactttttggggtgtctgaaggtcgctgctgttgtcatcggacatttgcatgtcttctgcgcgttttgtttatgcaattgtcgtgggtaaaggaaaatctatattcgacgggggcaggggggcttttaacgatgtatgtatatatatctatcagggctatcatatgggcggggaaataattgccaacttggttaataacaaagtgtttcaagcacacctaagttggggattggtgtaaataaaaaatgcctatgtatgttttcccgccttgcgagaatggtatcctattgatgtcatttccgtcgaagtaatccagtaattcacgtacagtaccacccctgggatcccggtataatatatcccactcttttgagtttctcttcaaactgaatgccacatgttgcaaaaggtcgctgcctcacgtgactcaaccactcaagcaccaagcatgctataaggttaagctttcgagagggtccccgctcaagtggcccatgtctgattagatgttggcttattaatttctgaagaggctgccataaactacacatagtatatggctgatatatgagctctgatacctagctgactgataacgagttcagctgaaatacaagccacgaaacacatgggccagcttttcgccttcactataaataaaacgcacgccaagaagtgagtggaagtagaaacggcccaaacatgaaaagctttttgagtctgaaatttcccaaaacaaaaaacatatggcagagtattcagagagatatagagcgagtagcagagcgcctgcgttaggaacacgtgaaaaggtgtttgagaaatcggagcaaagctcgaatatcataagaaaattaacatagagttgagaaattaaaagctgaaccacatattgctcgaaatcaaaattcttttgagaactattcgatgtttggggcgttactgtgggcgtttctccccccgtagaaactaacaaggctatgctaattgtgccaagaacgtgaaatcgccaggaaatcgctcgcaaaacgcaccttctgacgcaattagtcaaaaataaaaaatgcggaaaactatatgctgccttgctagcaataacaactataactagtgccaaatcgcgcagttttgaaaatttcaccagaacacgcgacttttgccatcgaaatgttgccaaggcggcggatgaatatacatgccaaaaatctacatatagccaaatctgaacagtcggtcggttaggtgggtgggtggttggtcgccttttgctccgccgataataggtctataaagtaggcggctcggtaaacaatttgtgtgcgggcacagcacgtgctaatttattcaatatttcggttaatttatgggtccgctccacttacgtaaactgcgcccgctgcgagtgaatttagcgcccagttgtcaggggatcgtcggcaggtgtagggcactcagcagtcgttgcatcaccgatcctctgccgtggcattcatggcagtcgccggcccagaagtcgcagcagcgacaaaaacagcaaccgctgcttaaaccgcctcaattgcaaccgcttccgtgcggcttgcgcgcgattcgctcaaaggtaaaccgctcgatatcgaacaatttgtagcgcgtgctgctacttacatttttcaagtggaatgggaggaaattaaattattgcctcctgtgcttgacgtataaaaatatatttctaattaaatatttctcaatttgttgaagggccttagcaatttttctgtagaactatgtttattaactttccaatacttttaacctgaattgatgaacgccatagacgaattagttgtttcaatgaatacaactaaatttatgacgaatagattgtaaatacacacgtacgagctgggctataattaaatgaagccataattcaattttatttcccgggcagatgggctagatctcaaactatgggtttccgtcaatatatttttatataaatattaggggttatctacgctttgacaaatagttacgcaaatagaaatttgacgaaggcaggcttagcaaaaaggcacgtataaatcaaatgactatacgtcagatcagtgtccaatcgagcgactcaagtggttcgaatatttattgttttttttttttaatagctaaatagctaagctaagctgttgataataggcggaatgatctttagtcgggccccagtacaacacgtgatcttgtttgcgcctctgaaagtcacgagcggttctggagcgactaaagacgcgtgcttatcgcgcgaacttgttttcgattctaaatcgagaaatcggcgattccgacgagccggcgggggcattgggagcacgggggctagggagctagggagcagagacagcagacagtcgacgccccgcttagagaaactttatcaggcagaaacggaatccgcaaggggtcatcgactaatctcgctggctcagcaggaaagttgccgagcatttaatagcggactccgccgctcgatcgactttcagtcggcgcgcgatctccactctaacccgatggccatgtctcggactgtactaatcctggccgttgccttgtccttgcagtgtgccgccttcgtggacggagcctccatcacctatggaaccggaaacgagctagagtcgggatctggatcctccgccgcctgtaagcccactctgcgggagttcaatgtgcggctggaggttcccctggccgccgaggagcgactggggcttaccggcgatgtgaaagccctcggcgagtggcagctgtccagaagtgtggctctagaatcgctggacgagctcaactggcaggccacggtggcccttcagtcctgccgccagctggagtaccgctactttgtctacgtggaggatctctctggctacaagcagatccgccgttgggaaacccatttcaagcccaggtccctgggaccctgtacggagctacagtgcagccagttggacgtcttcggtattacgtcggacaactccgatctaaagccgcaggtgcaccgcggctggctgaaccatgaggccattctgcagctcaagttcaatggcgagaagatgttccaagtccacgacatcgagacctttgacccccagcacgtccagctgaagattgtgcccgtggagaagaccgctggcctgcatgtggagtactccaaacaggagtacggcaagagccagctggagctgcagcctactttcggagtgccctacaccaagggggacattgtcatctttcacatcacgctgccgctggagaggatgatggagcagcacttccgcttggagtgctacagcatgtccaacgaactcctgggcagtgccactctggtcacctcggacctgactggcagcgagggagtgctccacctgccgattaagtcggccaagaatgcagatgagaccctggccaggctgaggcttccctatgtcgcggtgcagccttaccgctactcgccgctagacttcaagaacacctatgctcactactggcccaagagctggcccaacctggatgtgggtcatcgtggaaatggcaagagttacattgcagacgctcctgcggaaagggagaacactatcgcgtctttcctgagcgcccatgaacatcacgcagacatgatcgagttggatgtccatttgactgctgatggtgtgcctgtgatttatcacgatttcggactgcgaactgctccgcctggcaagcagatcagccgcccagaccagctggagtacgtgctgatcaaagacataaactatgagctgctcaaaaggctgcgcatcttctctgtgatcgcaggccaagtgagggagtatccctcgcacaacgccgagcccaggatggaacaccgcatattcccaacgctggtggaggtactggagaagctgcccaagtcactgggcattgatgtggagattaagtggccacagcgtcgccagggcggaggatcagaggctgagcaaacaatcgacaagaacttcttcgccgacaaggtgatccatcaggtgatccagaagggctgtggcagaccgataatcttctccagcttcgatgctgacatgtgcacgatgctgaggttcaagcagaacgtcttcccagtgatgttcctcacgcagggagagacgaagaagtggcagccgttcctggatctgcgaacacggacctttattgcagccgtaaacaatgctcaagctttcgagctggctggcacagctccacacgccgaggacttcctgggcgaaaatgcatcagaaatgctgcgaaaagccaaggatctgggccaaatagctgtgatctggggcgacgattgcaactccaaggagcgggtgcagtacttcacccggatcggggctaccgccacgtgctacgatcgcagtgatctcttcatgccggagggcaagcgcgaagccttcttcaaatcacccgcactgatggccgagttcgcggcccagtgccggatctaagaaatggggttactagaatgaaacgggcgggtacaattaagctatggctaatcattaggctttttaagttagcttgtatatttatttaaacactaaccgggaaaagagaaatgtgggaagctttaaagtggttgggtaatttgtagtttctcgttgcccaacggaaacaacgaaacggagacccataaataaatcatctctatgcacgttaagccgtcatttggcaaaattacacatgcaaaaaaggaattcccccaaagttaagtagcaccacaaaagacaatgggaagaaagcgaagcgacgaatcgataataacaaaaatatatacacctacattacgtgctttaaatcaatctatctatacctcaatgcaaaacttgcgaaagagatgttgctaataagcttttgctatttaaatcgaaacaacaaattactattaaaatgtggacggaacagatatccacaccgatgcttgtgtaacttgtgcagaaacactctattgtaaattagaagacatcctatttaactgttgtaaatctaatttgctgcgtctttgtacaatttgaaaatttacgtttgttttcaaaaattgtttataatgtatacattcgtgtaaaccatttttaagaatcaattgtatcgacttaagggtaaacacaaatatttaaagaagtcgcttacacctatccaactctaagaaaaagcaataatatattttgatctatattacaatcagttttatgacaaaaaccaaaagtgattgattcgtatgtaaataaaatcacactaaatattttcataaaaatttcaacgccaactcagtcgaatgacttgttttactctgatctcaggcaaatgaaaaaaaagaaaagaaatgcctgccccacgaccaaaagcgtatgtaaaaattcgatccgcttacatttgatggccccgtgacgaatgtaaaaacagccatgaaaatgctgggcccgaaacacggcccataaacggaaaatggagagtggaccgtaaaaaggtttggccctcgtgctggaagtcaggcctaaagtccgttcggtttatgaccaattagagagcgcctcatttgcatcggtcttggcatggccaaatgcgaatgtcttctcgctgcgggcctggttccattgatgctgaccagctccatcgtggccacttggacttggagatgtttgtacaaagaatttccag

SEQ ID NO: 26897 - DNA, 2457 bp, DROSOPHILA
tgacgacggaccgtctacagcgtcctagttcccactgtccacaaaggatacaaacccgaataacaaaaccagcagtacataaaagccaacaggcccaatacccaagtacaaaatgcttgcctagctaaagaaactgaaatattgcgcatacgccgcatagtgcaaacaattaactgtgatacaagtggaattttcttgatttcgttggtccccgcaccaaagcaacctatcctacctaacttacttgtgctatccccaaaaaccaagaagccgaaaagaagcagaatgtcggtgccaatgctgctgacccccatggaagcccagagtccggatgaccacatgaaaaattgtgccgccttcgtggacggagcctccatcacctatggaaccggaaacgagctagagtcgggatctggatcctccgccgcctgtaagcccactctgcgggagttcaatgtgcggctggaggttcccctggccgccgaggagcgactggggcttaccggcgatgtgaaagccctcggcgagtggcagctgtccagaagtgtggctctagaatcgctggacgagctcaactggcaggccacggtggcccttcagtcctgccgccagctggagtaccgctactttgtctacgtggaggatctctctggctacaagcagatccgccgttgggaaacccatttcaagcccaggtccctgggaccctgtacggagctacagtgcagccagttggacgtcttcggtattacgtcggacaactccgatctaaagccgcaggtgcaccgcggctggctgaaccatgaggccattctgcagctcaagttcaatggcgagaagatgttccaagtccacgacatcgagacctttgacccccagcacgtccagctgaagattgtgcccgtggagaagaccgctggcctgcatgtggagtactccaaacaggagtacggcaagagccagctggagctgcagcctactttcggagtgccctacaccaagggggacattgtcatctttcacatcacgctgccgctggagaggatgatggagcagcacttccgcttggagtgctacagcatgtccaacgaactcctgggcagtgccactctggtcacctcggacctgactggcagcgagggagtgctccacctgccgattaagtcggccaagaatgcagatgagaccctggccaggctgaggcttccctatgtcgcggtgcagccttaccgctactcgccgctagacttcaagaacacctatgctcactactggcccaagagctggcccaacctggatgtgggtcatcgtggaaatggcaagagttacattgcagacgctcctgcggaaagggagaacactatcgcgtctttcctgagcgcccatgaacatcacgcagacatgatcgagttggatgtccatttgactgctgatggtgtgcctgtgatttatcacgatttcggactgcgaactgctccgcctggcaagcagatcagccgcccagaccagctggagtacgtgctgatcaaagacataaactatgagctgctcaaaaggctgcgcatcttctctgtgatcgcaggccaagtgagggagtatccctcgcacaacgccgagcccaggatggaacaccgcatattcccaacgctggtggaggtactggagaagctgcccaagtcactgggcattgatgtggagattaagtggccacagcgtcgccagggcggaggatcagaggctgagcaaacaatcgacaagaacttcttcgccgacaaggtgatccatcaggtgatccagaagggctgtggcagaccgataatcttctccagcttcgatgctgacatgtgcacgatgctgaggttcaagcagaacgtcttcccagtgatgttcctcacgcagggagagacgaagaagtggcagccgttcctggatctgcgaacacggacctttattgcagccgtaaacaatgctcaagctttcgagctggctggcacagctccacacgccgaggacttcctgggcgaaaatgcatcagaaatgctgcgaaaagccaaggatctgggccaaatagctgtgatctggggcgacgattgcaactccaaggagcgggtgcagtacttcacccggatcggggctaccgccacgtgctacgatcgcagtgatctcttcatgccggagggcaagcgcgaagccttcttcaaatcacccgcactgatggccgagttcgcggcccagtgccggatctaagaaatggggttactagaatgaaacgggcgggtacaattaagctatggctaatcattaggctttttaagttagcttgtatatttatttaaacactaaccgggaaaagagaaatgtgggaagctttaaagtggttgggtaatttgtagtttctcgttgcccaacggaaacaacgaaacggagacccataaataaatcatctctatgcacgtt

SEQ ID NO: 26898 - protein, 653 aa, DROSOPHILA
MSVPMLLTPMEAQSPDDHMKNCAAFVDGASITYGTGNELESGSGSSAACKPTLREFNVRLEVPLAAEERLGLTGDVKALGEWQLSRSVALESLDELNWQATVALQSCRQLEYRYFVYVEDLSGYKQIRRWETHFKPRSLGPCTELQCSQLDVFGITSDNSDLKPQVHRGWLNHEAILQLKFNGEKMFQVHDIETFDPQHVQLKIVPVEKTAGLHVEYSKQEYGKSQLELQPTFGVPYTKGDIVIFHITLPLERMMEQHFRLECYSMSNELLGSATLVTSDLTGSEGVLHLPIKSAKNADETLARLRLPYVAVQPYRYSPLDFKNTYAHYWPKSWPNLDVGHRGNGKSYIADAPAERENTIASFLSAHEHHADMIELDVHLTADGVPVIYHDFGLRTAPPGKQISRPDQLEYVLIKDINYELLKRLRIFSVIAGQVREYPSHNAEPRMEHRIFPTLVEVLEKLPKSLGIDVEIKWPQRRQGGGSEAEQTIDKNFFADKVIHQVIQKGCGRPIIFSSFDADMCTMLRFKQNVFPVMFLTQGETKKWQPFLDLRTRTFIAAVNNAQAFELAGTAPHAEDFLGENASEMLRKAKDLGQIAVIWGDDCNSKERVQYFTRIGATATCYDRSDLFMPEGKREAFFKSPALMAEFAAQCRI

SEQ ID NO: 26899 - DNA, 4005 bp, DROSOPHILA
agccaattaatttaaatactattcttagtttctaacactaaccccaaacaagacaagaaacaatgcaactaagtactaaaccacaacgaccaccaacacaaatcgtagttcaattattattttaaaacttgtttttaattacatcatctgtcaaacaatcgagttaccaatccaatcaatcaaacaaacaaaagaagcacaaaaacaaaatgcatttaactcttatttacataaaaaagactgatttccaattaaacaatatattaattaattgcatatgaataaaggtatatataaatatatatagacaatttatgagaaatactaaataaattattgaattgctaaaaagaaacttgttcaacctttttttttaatcataaagtgaatgaaagtatggcgggtatgggagggaaaactaatttctgcataatattggattgtcaaactgcacgtcaaaaaatattttggcgtaaatatatttagtatttccatttagagtactgtatgaacatttcgaaagtatcgtctgtagattcacttttcctcttcaatccaaagtcaattgaaaaatccgctgccgccggcggattagttggccaataaaaagctgaccgttgggctgatgcaaacgctctctcgccgtggaactctataaacattaggcatgaataaatattaccggctgccaacaaattggacattgtcttggttttcaggcaacacgacacagaggtctaattttaaatagtcgtgcgccatgtgacagagagagatccaaatccgctcgagcgtctattttttggcagcagacggagacacaaaggaaaatgttctcgccatcagatcgcgagtagaatccgaagacggagcactgaaaactgtttggttgcctgctcagtgaaatttcaaccgcggggcattacgcaaacacagattagtgggagatatataggagatcaatcaaagatcttctgactgctggagtaggttgcttgcgatggcttccacttcgctgacatcctgcgccctgtgtcaggccaaggcatcccagttgtgcgccgcctgccggaacgtggtctattgcagtcgggagcaccagaaggagcattggaagaaaggtcacagatcggaatgccagtgcttcgaaatagccaccaatgaagttttgggcaggcatcttagggcaaccagggacattaaaatcggagagcaaatcttgaaggaagctcctctggttttgggaccaaaagtcgcgtctgctcccctttgcttgggttgccacagaaatcttttggctcccgggaaaccccgcggtaactaccacaaatgcagctcctgcagttggcctctgtgtgggaaagagtgcgaggactctgtccatcacaaggctgagtgccagctaatgtcgggtagcaactttcagtccaaaataaactatgtgcctggagaggaggagcgaaaggagtcggcttactgtgtgatcatgctgctccgctgcatgcatcttaaagacaaagatcccgatgccttcctcaagctttacaacctggaggatcacctgaaggagcgcctggagactccgctgtaccaagtcttacgtgccaatctcatcaccttcataaagactgtattgggcatgaaggattggccggagatggatatcctgcgcatagccgctatactggacacaaacacctttgaggtcagacaacccagggaaaggagaaaaatccgagctctctatcctggagcagcgatgatctcgcacgactgcgttccgaatatgaggcatcgtttcgatgacgacatgaacattgtcttcctggccaagaggaagatagccaagggagaaattttgagcatttcctacacccaacccctgaggagcaccattcaaagaagagttcacctcaggcaggccaagtgcttcgactgttcatgcgccaggtgtcaggatcccgaggagttgggcagctttgcaggagcccaaacgtgtctcaaatgcaaggcaggaaaagtaagatcagatctaaggaagcatttgtacagcaataagaaaggaaatttccgactggggttttcgtcaacaacaaacctcttcggaaattcagaaccattaatgtccgtccgtctgtctgttcgcctgtttttccctatgaatgtcgaaatctcccaaacttttaaagctagaatctagattaagcatgcagtttctagtaacgccaaagacgtggcggtcatgataagatcggctcggctggcgatcctgatcaataatatatttacgttaaaggctctgaaacgctcccttatgcctgttacatacatattcgattatagttctttatataacaatttcctgccctcttgtagattatatcactgaatccccttctaaactctgcgccctggaagtgtcagttgtgcaattttaaaagatcggcgaaggatgtggttacctcagatgcggagcttcagcaagaattggagtcattggacaaaacgactcccgttgctctcgaggaattcatttatcgccatcgtgctgatctccatgagaccaatacccacattttgcaggccaaatatgctctcactcaactatacggaagtgctccgggattcgcaatggagggtaataaaaatatttaattttaattatgcatttttgtaagaaactctttgtttcagaactttctggagaatcgctgaacagaaaactgcaactatgtgaggaactccttaaactggccgacattttcgatggcggttggagcatattccggggcaatctgctcatagacatggaggaagctttagtgacgcaggctctgcgctcgaaagacccattggattgcgaggagaagctgagaaacgcggcggaaatgctcagagaaattcgaaacatcatgaagcacgagccggaaatgcaacaattgttgttggaacgacaagtcattttgagttctgcgcttgagcgctttgaaccagttgagaattaagcagaaggaacgctagtgtcggtatgctcgattatcatataccctttagttggataactaatcaatttaagaataaagctgccaaagtatgcaaaccaaaacaaaaatgggttattttatttggcttgcagattttcaggaacgttaatttttttggccgttcgtcatgaatcggaatgcaaacttattccatatttaatttcccatcatttggatggatctgataaacaaccaatgtgtcaactagatcttacttccttacgcagaaatacactgccttattgaccttgctataataacctagatttcgactcttgcctttcttatgatgtttcgaatttggcgccaagtgtgttatgtatccgttatcttttgagagcctgtagaagagttttatgtattttagaaaatgttgatattatttagcgaagacacccaccaccggcatagccgctggtgtttatatacattttagactggacggtcacactgttgcatcttcacgtgttttctttctgtttatatttcattttccttaataaatcggcttcttttaagcaaatggagtgtttcaatgcggaaataccagctgacggagtggttaatagcatagagaccgaagagatttcggaaaatgtagtgaaagctgatgaaaccacgctggcaaatggtgaggatgaagccggaaaagccggcgaggaatatgcttacttggagcgaaatgaattcacttcggaaatattcaaagttgaagtgaagaacatgggatatttcggtattggggtaggtagttgaaatctaagcctttatatgaatataacaacattataactttgcaggagtttaagaagcttttgagaaacaccctcaaatttgacgtgaccaaaatcaaggctccaactcgaaaagagttcgcctttgtgtgcttccgcagtcaggaggatcaacaaagggccttggagatcctgaatggatacaaatggaagggaaaggtgttgaa

SEQ ID NO: 26900 - DNA, 1593 bp, DROSOPHILA
atggcttccacttcgctgacatcctgcgccctgtgtcaggccaaggcatcccagttgtgcgccgcctgccggaacgtggtctattgcagtcgggagcaccagaaggagcattggaagaaaggtcacagatcggaatgccagtgcttcgaaatagccaccaatgaagttttgggcaggcatcttagggcaaccagggacattaaaatcggagagcaaatcttgaaggaagctcctctggttttgggaccaaaagtcgcgtctgctcccctttgcttgggttgccacagaaatcttttggctcccgggaaaccccgcggtaactaccacaaatgcagctcctgcagttggcctctgtgtgggaaagagtgcgaggactctgtccatcacaaggctgagtgccagctaatgtcgggtagcaactttcagtccaaaataaactatgtgcctggagaggaggagcgaaaggagtcggcttactgtgtgatcatgctgctccgctgcatgcatcttaaagacaaagatcccgatgccttcctcaagctttacaacctggaggatcacctgaaggagcgcctggagactccgctgtaccaagtcttacgtgccaatctcatcaccttcataaagactgtattgggcatgaaggattggccggagatggatatcctgcgcatagccgctatactggacacaaacacctttgaggtcagacaacccagggaaaggagaaaaatccgagctctctatcctggagcagcgatgatctcgcacgactgcgttccgaatatgaggcatcgtttcgatgacgacatgaacattgtcttcctggccaagaggaagatagccaagggagaaattttgagcatttcctacacccaacccctgaggagcaccattcaaagaagagttcacctcaggcaggccaagtgcttcgactgttcatgcgccaggtgtcaggatcccgaggagttgggcagctttgcaggagcccaaacgtgtctcaaatgcaaggcaggaaaaattatatcactgaatccccttctaaactctgcgccctggaagtgtcagttgtgcaattttaaaagatcggcgaaggatgtggttacctcagatgcggagcttcagcaagaattggagtcattggacaaaacgactcccgttgctctcgaggaattcatttatcgccatcgtgctgatctccatgagaccaatacccacattttgcaggccaaatatgctctcactcaactatacggaagtgctccgggattcgcaatggaggaactttctggagaatcgctgaacagaaaactgcaactatgtgaggaactccttaaactggccgacattttcgatggcggttggagcatattccggggcaatctgctcatagacatggaggaagctttagtgacgcaggctctgcgctcgaaagacccattggattgcgaggagaagctgagaaacgcggcggaaatgctcagagaaattcgaaacatcatgaagcacgagccggaaatgcaacaattgttgttggaacgacaagtcattttgagttctgcgcttgagcgctttgaaccagttgagaattaa

SEQ ID NO: 26901 - protein, 530 aa, DROSOPHILA
MASTSLTSCALCQAKASQLCAACRNVVYCSREHQKEHWKKGHRSECQCFEIATNEVLGRHLRATRDIKIGEQILKEAPLVLGPKVASAPLCLGCHRNLLAPGKPRGNYHKCSSCSWPLCGKECEDSVHHKAECQLMSGSNFQSKINYVPGEEERKESAYCVIMLLRCMHLKDKDPDAFLKLYNLEDHLKERLETPLYQVLRANLITFIKTVLGMKDWPEMDILRIAAILDTNTFEVRQPRERRKIRALYPGAAMISHDCVPNMRHRFDDDMNIVFLAKRKIAKGEILSISYTQPLRSTIQRRVHLRQAKCFDCSCARCQDPEELGSFAGAQTCLKCKAGKIISLNPLLNSAPWKCQLCNFKRSAKDVVTSDAELQQELESLDKTTPVALEEFIYRHRADLHETNTHILQAKYALTQLYGSAPGFAMEELSGESLNRKLQLCEELLKLADIFDGGWSIFRGNLLIDMEEALVTQALRSKDPLDCEEKLRNAAEMLREIRNIMKHEPEMQQLLLERQVILSSALERFEPVEN

SEQ ID NO: 26902 - DNA, 2525 bp, DROSOPHILA
cgcacacgttgcacttgcatgacacgccgcatcatacagcaaacaagcgaaatgaacaatcatcataccgaaaattgtataatacccattgcgactttgtcattctctatcattcaacgtcagaccgtcgaatcgagcgtgaaaacgtgcaataaaaccaaagttaacaaaaacaaaaaaaaaaaaaccagactacttaatgtcccagatgggcggcacatgcttgtacgatgagcccgaaatcatggaggagttcatcagctgttatcagtatttcaccgccctgtgggacagcagcagtcccgattatctatcgaaacagaaaaaggagcccggctatcaggagctattgaagatactgcgacgcgttaatagcaactgttcgattcaggatgttaagcgaaagataaactcgctgcgttgctgctatcgtcgtgaattcaaaaaggtacaggaatcggtcaatggctaccagacgcgtctctggtggtttcatctgatggatttcctcaagccggtactcaacatacaatcgccggccagggtgaaatccgagaacgtggacgatagtctcgacgagaccagcattcaggtgagttacgaccgcaatgcgtgagtgtttacatagtccttggacttctttattggataaatttcaaatttaagtaattttcatataaataggtagataaatatatttgtatatacataggcaatataggtaacataggaaatatatttattattattattatttgtattatttgttggttttcataaagtatgcatgcatgcatatgcatgtaggatatgaaatgatcatatgttaagtctggcagttctgtaaaattaagcgtatgtatatgtatagaatctggttgaatcgcgtttgacgtggtttgacggcgtttgacggcgttcgcaggacaaatgaaacgccggtcgtacgaccaatttacgatgcaagcttcagtcgcgcgacggacgttagacagacatgtcgcacacgcacacggcgatcgatttttggaagaaattcctcgggttgtaccgttcgatgcccgaattgtggctggtgcgcagtaaactgtatcgcgatcgccagctgaagctcgaatcctatagccgattattagagctgctacgcacgaccgatagctatgccaatatccatacgctcaaacgtaagatcaacaattttcggacctcgtatcgccgggaattgcgaaaggtgctggatagtgggaacacatataagccaacgctttggtatttcaaagaactagactttctctatgaactggaaaccggtgaactgcaattggagggcatagtggccgccgatcgggatttggttcgaaattcgaaagtcctgcagaatgagtcaaataaaacgataacattcggagcgcaattggcggaacaggaggtatcaatgagctttattgtgaagcgagaaattgaagttgatgagaatataaccgaggatatgcagcaattggagaccgaagtaagtgatctatgaaggaattttatggaacttcattatgtagggcatatatgtatatatgtaggtaccagagatcggcaccggtgcctgatttgagcactacaagtatattcgcataaaaagcggtggcggtttaagtaacaaccgcatcaaatgcgtttgcggtgttttaccaccgcattgtctgtgtgtggaacacagacaatacacaaaaatatgcgacggaataggacacactcaaaaatgtattctgtgtcttttacgcgcggaagtcgcacaccgcgtagcagaatacacatgcctaaaatcgaccaaggccaatgtcacacacttagaagaatgacaatgtgcaagaacaaaaaaaaaaaaaacattaagtttacagttgcttttgcatatttcctttttgtagccttttttaagcccggtgcattggttttgcaatatttctattcactgactttattacttgtgagagtcttcagtcgttgcgaatgtagcagaatgtcggaccacgcatttatcgccgagcagattgcaagtggcctttactccttggagcccaagctcaagggaaagagtttcgtctggaatgttttaagcgggattattaaggatgatggatcaattttaaacgacttggtttactgccgctcatgtcgaaaaattcctaaaatgtgttggcaatcaaacttcaaatttagccaggcacaaatgttgtcaatcttttcggcaaccaactgccctacggattgtgtctgctccagacaaaaaggaggcgttgaatgcagtttccaagtggattgcggaggactgccggccgttttcggctgcggtgtacttgtagttgcggtgaactaatgcagatctctagtacatatgtagatctgtgtattgtggatttagtattatccattatatacttatagtattagtatagtaatacagttaatcaaaaaaaagggatactgatatatttaatttaatttatctactttcaggatgttgacattat

SEQ ID NO: 26903 - DNA, 525 bp, DROSOPHILA
tcgcacacgcacacggcgatcgatttttggaagaaattcctcgggttgtaccgttcgatgcccgaattgtggctggtgcgcagtaaactgtatcgcgatcgccagctgaagctcgaatcctatagccgattattagagctgctacgcacgaccgatagctatgccaatatccatacgctcaaacgtaagatcaacaattttcggacctcgtatcgccgggaattgcgaaaggtgctggatagtgggaacacatataagccaacgctttggtatttcaaagaactagactttctctatgaactggaaaccggtgaactgcaattggagggcatagtggccgccgatcgggatttggttcgaaattcgaaagtcctgcagaatgagtcaaataaaacgataacattcggagcgcaattggcggaacaggaggtatcaatgagctttattgtgaagcgagaaattgaagttgatgagaatataaccgaggatatgcagcaattggagaccgaagtaagtgatctatga

SEQ ID NO: 26904 - protein, 155 aa, DROSOPHILA
MPELWLVRSKLYRDRQLKLESYSRLLELLRTTDSYANIHTLKRKINNFRTSYRRELRKVLDSGNTYKPTLWYFKELDFLYELETGELQLEGIVAADRDLVRNSKVLQNESNKTITFGAQLAEQEVSMSFIVKREIEVDENITEDMQQLETEVSDL

SEQ ID NO: 26905 - DNA, 4141 bp, DROSOPHILA
ttgtaaggcgtatcacttgattccgcactctactcaactctccaaggacctctgtaatctgataggcttactgaaccaacagagagtagaaacaaagttttgctttattgtgattttacgaaataacctacaacttcaccattcccaaaaacacaatttctttttccttaaacattccagttttaaacaccttttttacagttttttcgttgtaagttggccaaaatatgtcacaaggctgaaaaacgcacttttttagtcagctggggtcctcagctaaagacccatatcaatatttgctttaatttggaaaaataatttttcggccaaatttcgcattttttgtaaggggtaacatcataaaaaatcgaaaaaattttcaaaccaaaaatttctctaaatgagttacccgtcgtttaggaatatttttacaagttcaacgaggtattccactccacaattggacgtgtctttcccaagatatagcactttttctgtgaaatccccatcgaaaattatcaacaagaataaaatcaccctcgttttccatctgaaaaaactccctcaaaaacaaacgcatatacagtttatttcgttacatatatattgttatttatttaagaacttgctcgtctaattgacagaaaaatataaagatataggatgtattgaatgggttgtgctgagtgtcttactatgcgaatgagcgattccacttaagcctaggcgaaatctcggcgattgcataatgtggagccccctcccgaggtgtacggaaatcacaagtggttgataagaaagaacagacgtggaattttgctgtgctggtttgaggatcgcagtcgaacggataatttattggccagtcgccgacttggctggtgatgatttaatagcggaccctcgggaaggctctctgggctgacagataacagataactcgactggctgataattttgatgcgtgactgggcgctgcgccttctctatctccacctccttacagggtcttgtcgaacaggaactcgcccagttcgccgttggtgtccatcatcttcttgagagtggtcagcttgccggcgagctcgcgctgtccgtggagctgctcctccagatagacaccggtcaggtagtccaccaggtggtagtggttgtagggcttgttctcgcaggtctggatcagcttgcggatggacttggtcaccttgatctccaggtcgagggcgtcggacagggcggcggcaccatcggtccactcctgcttggccacagtctgtgggggattcgccaggattagctgggcttttgggttttctaggcgagtcgtcgacttaccggcacattgatcagatcgctgactccctcggtcagttgaccgcgcatggacaggtactccaccagcttggatccgtgctcacgttcctccttggcggccttgaagaagtgctcggcgaatccagggcggttgacggtgtcgcgggagaagtaggcgcccatggccaagtactggtaggaggcgttgatctcctcctggatctgattgcgcatgccctttatgcaggcatccttcatgtccacccagtccttggtaatctcaggaacagccagggagcctgcaatgggataaggttgggttaagtcgggggaccacgataacaatatatggctagtattcagctttaaaaaatttatttttgtaatcagaacttaggtaaattttaatattttaaaaacctttgcactcttggtcttgaccttcatggcttaggttttgtttttcttttagttgatgctcttctcgctccctttgaagctctctcacgaaactcttgctttcttgcttggctgaggggtagggcgttgttggttattgcatttaagagggcgtaattgcataaacctttgaaattgcgcttgaaatgccgctattctagggcacaaaaaccgtgtgcaaaactgtaatggcctactctcccactctctctctctgtttttgtaactgcattggtaacgtgcgcagctctcgccgccatagtaacggcatttgttttcgtgtagtgccgtgtgcaaaaagcatggttcaccatgctagctcactcggcccgtaaaagccgtgtgcaaagagcgccttgaaatgtaacaacaaaaagtcaagcttatttataccgcaatattcatggaaatgaaagcgaaattcgcattatttaattatgaaaatttatgtataaaaactggttatcatttccccaaagcgcaacggaagtatcaataacttttaaatcaactggtttggtaacttcacttcattgacgaaagagagtgaaagagcgtcaaagagaaacggcgcatgctcttttcaacgcattacaaatgttttgcttctctttgcgtattgcgtcgaaatttattgttttttttccgatgacctgcctttgttttgtttgaaattctgatgaataaaacgtaacattagtacttacacttgaaatctccataggcctgggccaccacggccaacaggagcaggctagcaattagtttcaccatctttgatcgtcgaacgtagtctttacacaaaatcacagaacaaaaatttgtttttcactttagtttgatttgcttgaaatgcacaaatgagaatgaggcgactcgagttgagctacaatgttaaataggcgttgaaattgaaaatctagctgcctttacacacactggcgcagaaggcgtcgcctgcttcaatttgatgggcttgattgggattattttcgacttctcgaatgctttccagtaccttctgctgacagctttaatctgatttttcagtggagctaaggcctttctacgttgtgttttagcgaactcgaaagcgaactgtcgctccgaacggcgcacaaaacacttttaagcgcgcgcgctctcggtttttcttcgtgtgtgtgtgagtgatgggagagtgtgcactgttatcttttcaacatgtcgcccgttctttgttaaccgtttaaatggctgataattgaatattcccgataattgccgcactcaatgtgatacacacgtcctcaatatgggtatactttgtataaagtcgggtttcctagtcagataatccccacttactaagaagtaaatttatcaaatgcaatatggccgctcttttgagatgcgcatcagctgttctttgtttttgttttggccgtgggagagcaccacgtcatgtgttgccaggcggtttaattattgctgacaatttaattcacattttgtcaagttgatttgcacgttcgaaggggggatcagtcacccactttgataactgctaatatggcgacggctcttttttacgtgtcgcttgcagagctccaagaatgacacttgataagaaggatacatggtgggaaaacttacaaattacataatttgtttgttgattggggaaaccctacattatctccgaacccagcaataatatgtattgtaaatagcaacagtctcaagctcgatgctgctgtgaattaccaatatatcaaaacttaaaacattatcttaggaggtagatggtttatctgcagtttattttcaattctcatcgttagctgataaaactctcaggaaaccacttgaaatccaaagtgcagcgtccatattttgcacacgctgacaaccctgtcgtgagtcaccttccagcaggcgcagcaacaacagcactggcagcggccatatttgaatgacaccgaaatcccgcactgagcgcaaaacaacacatgcccatgcacgctctccaaaaccacacacacacagccatatcgatcgcatagaaagagacgtacgcgacgctataaacagcagttgattttcagagtttcaccaagaagcacataaagcgattgaattattaataaaagcacaggcactggaagtgagttttaatattactaactaactactttgtgagtgtttagttacgaaaactagaaaataatattctggaaactgtgtttttaaaccgaccaccatataaatttaaaaaccaaaacattccattggtggtggttttgttgttaaaaaagagcacagaaaattcaagaaaacgctacgacgcaaaacgaaaaaactcgcccaaaatgaaaacaaaagtgtc

SEQ ID NO: 26906 - DNA, 1080 bp, DROSOPHILA
atttgataaatttacttcttagtaagtggggattatctgactaggaaacccgactttatacaaagtatacccatattgaggacgtgtgtatcacattgagtgcggcaattatcgggaatattcaattatcagccatttaaacggttaacaaagaacgggcgacatgttgaaaagataacagtgcacactctcccatcactcacacacacacgaagaaaaaccgagagcgcgcgcgcttaaaagtgttttgtgcgccgttcggagcgacagttcgctttcgagttcgctaaaacacaacgtagaaaggccttagctccactgaaaaatcagattaaagctgtcagcagaagctcaactcgagtcgcctcattctcatttgtgcatttcaagcaaatcaaactaaagtgaaaaacaaatttttgttctgtgattttgtgtaaagactacgttcgacgatcaaagatggtgaaactaattgctagcctgctcctgttggccgtggtggcccaggcctatggagatttcaagtgctccctggctgttcctgagattaccaaggactgggtggacatgaaggatgcctgcataaagggcatgcgcaatcagatccaggaggagatcaacgcctcctaccagtacttggccatgggcgcctacttctcccgcgacaccgtcaaccgccctggattcgccgagcacttcttcaaggccgccaaggaggaacgtgagcacggatccaagctggtggagtacctgtccatgcgcggtcaactgaccgagggagtcagcgatctgatcaatgtgccgactgtggccaagcaggagtggaccgatggtgccgccgccctgtccgacgccctcgacctggagatcaaggtgaccaagtccatccgcaagctgatccagacctgcgagaacaagccctacaaccactaccacctggtggactacctgaccggtgtctatctggaggagcagctccacggacagcgcgagctcgccggcaagctgaccactctcaagaagatgatggacaccaacggcgaactgggcgagttcctgttcgacaagaccctgtaa

SEQ ID NO: 26907 - protein, 205 aa, DROSOPHILA; identical to SEQ ID NO: 3069

SEQ ID NO: 26908 - DNA, 4141 bp, DROSOPHILA; identical to SEQ ID NO: 26905

SEQ ID NO: 26909 - DNA, 1040 bp, DROSOPHILA
atttgataaatttacttcttagtaagtggggattatctgactaggaaacccgactttatacaaagtatacccatattgaggacgtgtgtatcacattgagtgcggcaattatcgggaatattcaattatcagccatttaaacggttaacaaagaacgggcgacatgttgaaaagataacagtgcacactctcccatcactcacacacacacgaagaaaaaccgagagcgcgcgcgcttaaaagtgttttgtgcgccgttcggagcgacagttcgctttcgagttcgctaaaacacaacgtagaaaggccttagctccactgaaaaatcagattaaagctgtcagcagaagcaaatcaaactaaagtgaaaaacaaatttttgttctgtgattttgtgtaaagactacgttcgacgatcaaagatggtgaaactaattgctagcctgctcctgttggccgtggtggcccaggcctatggagatttcaagtgctccctggctgttcctgagattaccaaggactgggtggacatgaaggatgcctgcataaagggcatgcgcaatcagatccaggaggagatcaacgcctcctaccagtacttggccatgggcgcctacttctcccgcgacaccgtcaaccgccctggattcgccgagcacttcttcaaggccgccaaggaggaacgtgagcacggatccaagctggtggagtacctgtccatgcgcggtcaactgaccgagggagtcagcgatctgatcaatgtgccgactgtggccaagcaggagtggaccgatggtgccgccgccctgtccgacgccctcgacctggagatcaaggtgaccaagtccatccgcaagctgatccagacctgcgagaacaagccctacaaccactaccacctggtggactacctgaccggtgtctatctggaggagcagctccacggacagcgcgagctcgccggcaagctgaccactctcaagaagatgatggacaccaacggcgaactgggcgagttcctgttcgacaagaccctgtaa

SEQ ID NO: 26910 - protein, 205 aa, DROSOPHILA; identical to SEQ ID NO: 3069

SEQ ID NO: 26911 - DNA, 4141 bp, DROSOPHILA; identical to SEQ ID NO: 26905

SEQ ID NO: 26912 - DNA, 988 bp, DROSOPHILA
atttgataaatttacttcttagtaagtggggattatctgactaggaaacccgactttatacaaagtatacccatattgaggacgtgtgtatcacattgagtgcggcaattatcgggaatattcaattatcagccatttaaacggttaacaaagaacgggcgacatgttgaaaagataacagtgcacactctcccatcactcacacacacacgaagaaaaaccgagagcgcgcgcgcttaaaagtgttttgtgcgccgttcggagcgacagttcgctttcgagttcgctaaaacacaacgtagaaaggccttagctccactgaaaaatcagattaaagctgtcagcagaagactacgttcgacgatcaaagatggtgaaactaattgctagcctgctcctgttggccgtggtggcccaggcctatggagatttcaagtgctccctggctgttcctgagattaccaaggactgggtggacatgaaggatgcctgcataaagggcatgcgcaatcagatccaggaggagatcaacgcctcctaccagtacttggccatgggcgcctacttctcccgcgacaccgtcaaccgccctggattcgccgagcacttcttcaaggccgccaaggaggaacgtgagcacggatccaagctggtggagtacctgtccatgcgcggtcaactgaccgagggagtcagcgatctgatcaatgtgccgactgtggccaagcaggagtggaccgatggtgccgccgccctgtccgacgccctcgacctggagatcaaggtgaccaagtccatccgcaagctgatccagacctgcgagaacaagccctacaaccactaccacctggtggactacctgaccggtgtctatctggaggagcagctccacggacagcgcgagctcgccggcaagctgaccactctcaagaagatgatggacaccaacggcgaactgggcgagttcctgttcgacaagaccctgtaa

SEQ ID NO: 26913 - protein, 205 aa, DROSOPHILA; identical to SEQ ID NO: 3069

SEQ ID NO: 26914 - DNA, 3830 bp, DROSOPHILA
gtggagatgcgtggatttctgaacgaaacattcaagtggcggcttttgtcagcggaatcgccgccagaaaagtccatggtctttggcgctccccacctggttaggctaatgagtatgtacaatctttcttgcattctataacacacattaattcatggtacttgcagttaaaatgcccatgttcttaaacgcatcgccgatcagcaacaagaagctagaagatctacttccccacctcgacgccttcatcaagtaagtctaagacccctccctagtccatcacgaagctaatctgttggtttttcagctacttggagaaccacagggagtggttcgacagggaaaactttgttaactccactgccctgccccaggaagatctgcagcgggagctgttggactccctggatgggattgctgcttagctttagttgatcgtagttatctagtttatttattattacgattaaagcttatgctcttttatttaaagatttgtaattgtcgttttggtttcttcaactacacactttgtaaacaacgcacttctataaaaaagtttcctaatgtgatcgtataatcgaataatgcctataactatatatgttaaatattgaaaatacgattttaacatttttttttgtttttttttttttttttgcttaacctaagttttagttgagtagtacatgctagtatttttgtcatgccttgttttttgtgctcaaatatatttaagagttggaaagttgttgtcttttgtattaaggatttgcggaccttgagttggaatgtgcagggaattcttaagatttgtataatttctcaaaatattgcaactgtaacaactatgtgtgtgctgatttgtgtttcagatcctgcttagaaattcgaaattgtcgcttggacggcttggagttggatgcattcgcgtttgtaacatgtgtaaacttgggacgttaacttggacgatgactgaactggactggactgccggccctcacttctgtcgcttggtggcactgctggccgtgggtcgcatgaagctgctcacggatcgactgctgctagtgctcctctgctgcggactggggttcgcactcatcctggcctgctgctgctggttcagggcatttttcaccagcaccacgctgcgagcggcgctcattcgggactgtgactggggttgggactgggactggttttccttaaaactggtgctaccatggatactcgatttcggagccgtgttggacatcttgctgcgcaccaagatcacactgggtcccacactcgacccgctactgctgctcctgctggcggggactccacgtccctgggtaggtcgcagattctgggcggccagtggtcttttgctgggcgaggagtcaacggacacagtggctcccgctcgctgaacggcgggcagtcgtctcactacagtttgagtggaggctccactgttgatggacgatcgcgaggagcgcagactgtttctcgaactgctccgctccacgccggctagaacctgttgctcctgcggcgagcgtctcacagtggatgcggatctcagcggagctgcactggccaacggctgaccgttgggcatgcgcagcggtctgctggcggagaggctcctcttgaccgttgcagtttgggtggcagggatttggttttgtgacttgctggctgccgatcctgaggatccggaactcttcatcctggcctgctgcaggcgatcggccaaccgactgcccatctggctgatgctggtggttgtgggcttttgcttctgcatcggccgctggcgggcaggagtctcgtttacaccctcgttgcaggaggagtttgtgctctcgccctttccgtgagacggagtgtccgacacaagactctgagtctcctcgaagccttcgtcattcagttcgtggtgaccactggcggacagttttagcttggagggtgtgatatcccgtggcggactccaaggtcgttctggagttcccgtgggtgatttaagattccgaatggcctcccttacatcctcctgattgatggagcttatgtggcgacccaccttctccagcttgttgatcgtgcgctccttctgcttggacttctcgggtgcgggtggctctggcttcgatggagaagtctttgcctctgctgtgctggtggtcagcgcctcctcattgccactgctgtagtccgtgggtcttttgtagcgtcgtgtgcggcgagccagggcatggcgatcgaagtgacccggcgcatcctgttccgctgggttgatcttctcctccgtcgcagcctttggtttatccgtcatgctcaccgtgaccactgtggtggtgggcgtggctatgacccgtcggctcactggtggcgtctctatattatccgcatccacgtccttggaggagccctgcatctcgttttgggtcttgtggtgactgagcaggctggcaaaggtgtcgtcggacacttgtggctttggtgacttgggtggcagtggatgctcctccgttttcgcaggctgcagttcccggctggaggatcgcctgatatagatttgcaaccgctcgttgctcttgtccctttcaccctgtttctgaataagggactttcgacgatcctcctcggctatcgattgaagtgctatgggactcggctgttcctgcgatcgctgtcggcgatgttgacgcaatgcatcgtgcggctgggcatcggcaatggcctgcagattggccaccacgtccgtctgctccagcgtcctcgagggcttccagtcggcatagacgcgctgatatttgccggactcctgatccattctattagtggagttagtgggattcgtggtcgtaggcgtattcgttggcgtagctgtcgtcgtcgaaggcaggatcttctcctccggcaaggggtccagttttcgttcgttttctgcgaacatagaatatatctaagagatccatttggtcctgagtttgtgaggggcatcttaccagtttcgttttcgagcgatcgcctattggcgttgaccagacgacgcttccgcctgtactcctcgttttgcttctcatcgctctcgttggattgaagccacgtctcgatcttctggcgccactcacgggatattctgtaaaatgtaaatgatagatagatatatagatagatactataagatacttaatgtgaatctcttaccttggtttcgcatcctcgttattagatggcgtctgagcaatcgccgatccactgcccgtgggcgtattcgctgccgttgtgggcgttccagctgtactggccaatggagattgcagtcgctcctggacattttgctgctgctgctgaagaagaggagccggggagctggcccgttcacgatccatgccaaagtcaatgttgagcaaatcgggtcgtttgcgactggaacttccggagcgggcacgacgagcccacgagcgatccaagctgccgtaggccgccttccgctccctgctattgtgtccatcgtggtgaggacccgtcgaactccgaaggaactccatcaggtcatcctcctcggcaagaactcgactacgccgacgcctcagacttccgttgggtgtgatgtccggagaggctccgtcttgttccaggcggatgaaaccattgctgatctctccggatcccaggtggcggcgactcagcgccggactagccctaggatcgaagatagcatcgcccaagaaggaatgctccgagtccgaaactggcgttccagcctgaccaactgcagaataactaagtaagtaaataaatttctttcaagtagatgatgcacttac

SEQ ID NO: 26915 - DNA, 1830 bp, DROSOPHILA
atggatcaggagtccggcaaatatcagcgcgtctatgccgactggaagccctcgaggacgctggagcagacggacgtggtggccaatctgcaggccattgccgatgcccagccgcacgatgcattgcgtcaacatcgccgacagcgatcgcaggaacagccgagtcccatagcacttcaatcgatagccgaggaggatcgtcgaaagtcccttattcagaaacagggtgaaagggacaagagcaacgagcggttgcaaatctatatcaggcgatcctccagccgggaactgcagcctgcgaaaacggaggagcatccactgccacccaagtcaccaaagccacaagtgtccgacgacacctttgccagcctgctcagtcaccacaagacccaaaacgagatgcagggctcctccaaggacgtggatgcggataatatagagacgccaccagtgagccgacgggtcatagccacgcccaccaccacagtggtcacggtgagcatgacggataaaccaaaggctgcgacggaggagaagatcaacccagcggaacaggatgcgccgggtcacttcgatcgccatgccctggctcgccgcacacgacgctacaaaagacccacggactacagcagtggcaatgaggaggcgctgaccaccagcacagcagaggcaaagacttctccatcgaagccagagccacccgcacccgagaagtccaagcagaaggagcgcacgatcaacaagctggagaaggtgggtcgccacataagctccatcaatcaggaggatgtaagggaggccattcggaatcttaaatcacccacgggaactccagaacgaccttggagtccgccacgggatatcacaccctccaagctaaaactgtccgccagtggtcaccacgaactgaatgacgaaggcttcgaggagactcagagtcttgtgtcggacactccgtctcacggaaagggcgagagcacaaactcctcctgcaacgagggtgtaaacgagactcctgcccgccagcggccgatgcagaagcaaaagcccacaaccaccagcatcagccagatgggcagtcggttggccgatcgcctgcagcaggccaggatgaagagttccggatcctcaggatcggcagccagcaagtcacaaaaccaaatccctgccacccaaactgcaacggtcaagaggagcctctccgccagcagaccgctgcgcatgcccaacggtcagccgttggccagtgcagctccgctgagatccgcatccactgtgagacgctcgccgcaggagcaacaggttctagccggcgtggagcggagcagttcgagaaacagtctgcgctcctcgcgatcgtccatcaacagtggagcctccactcaaactgtagtgagacgactgcccgccgttcagcgagcgggagccactgtgtccgttgactcctcgcccagcaaaagaccactggccgcccagaatctgcgacctacccagggacgtggagtccccgccagcaggagcagcagtagcgggtcgagtgtgggacccagtgtgatcttggtgcgcagcaagatgtccaacacggctccgaaatcgagtatccatggtagcaccagttttaaggaaaaccagtcccagtcccaaccccagtcacagtcccgaatgagcgccgctcgcagcgtggtgctggtgaaaaatgccctgaaccagcagcagcaggccaggatgagtgcgaaccccagtccgcagcagaggagcactagcagcagtcgatccgtgagcagcttcatgcgacccacggccagcagtgccaccaagcgacagaagtga

SEQ ID NO: 26916 - protein, 609 aa, DROSOPHILA
MDQESGKYQRVYADWKPSRTLEQTDVVANLQAIADAQPHDALRQHRRQRSQEQPSPIALQSIAEEDRRKSLIQKQGERDKSNERLQIYIRRSSSRELQPAKTEEHPLPPKSPKPQVSDDTFASLLSHHKTQNEMQGSSKDVDADNIETPPVSRRVIATPTTTVVTVSMTDKPKAATEEKINPAEQDAPGHFDRHALARRTRRYKRPTDYSSGNEEALTTSTAEAKTSPSKPEPPAPEKSKQKERTINKLEKVGRHISSINQEDVREAIRNLKSPTGTPERPWSPPRDITPSKLKLSASGHHELNDEGFEETQSLVSDTPSHGKGESTNSSCNEGVNETPARQRPMQKQKPTTTSISQMGSRLADRLQQARMKSSGSSGSAASKSQNQIPATQTATVKRSLSASRPLRMPNGQPLASAAPLRSASTVRRSPQEQQVLAGVERSSSRNSLRSSRSSINSGASTQTVVRRLPAVQRAGATVSVDSSPSKRPLAAQNLRPTQGRGVPASRSSSSGSSVGPSVILVRSKMSNTAPKSSIHGSTSFKENQSQSQPQSQSRMSAARSVVLVKNALNQQQQARMSANPSPQQRSTSSSRSVSSFMRPTASSATKRQK

SEQ ID NO: 26917 - DNA, 4682 bp, DROSOPHILA
cgcgcatccagcgggccaccacactcacctcgtccatgtccctgccggcggagtgcctggttctctccgtatccatgccctcgctcaactcggagcccaagcgtcccaagagcgcgggacccaagaagaagcccggccaggccgtccactcgaagccattccgcctatattgagcctgtcgaggaaggagctgctccacaagtcgcacgtgacgtcacccaatcgaagcactcagagatttgtgcacaagttgatatcgaggcacgcacttctaaaacatgcatatgcagaatacattttatcaaaccgttgattgtttagaaccgaaatggaaacgaaacttggcatttacaacataacaataaacgactaaatgagaggcaaagttaagcacaaaatacagctgtggtttgtttgtttgtttctttatataattacagtatatattttcgtaagtattaaatctgtttcacggctactacatcgctggagccaaacggccttcgtttacatttcatttacataagacttgcgtttgattttctatatataattagtacaaaaattgtcctgggatttcgttacgtctcattgcgtctttatcatcgtgctcattgtgtgtttggaaaactgtgtgcttttcttggtttctttaggttttgtattcgtttttgattcttgttcctttcgattattcgagtcgcgtcacatttaaatgcatttagttgcctttttccatttacatcatccttttgctctacttaagccataaaagttgtttatacaattcgtttttaaagttagggtaataaataggtcattataaaataataaacaacagttgttacattttcaaaagacatcgtcaaatgagcttcaagtgattatgattatgattcgagggtcgagttagaattaaaaaaatgcgcatgcttgaatatcataaaaagtggcttctctaagagctcgtcgtcaagtgaattggcctggtttcagatttggttagctgcggattggctgccttagctcatggctatatataactataatacatttaatgggaaactaggaaatgcatagatgctcgtgatatgcgaaaccaatgtttgctgcggttgttataattttctctttctgccagatactattcgtacaatacattcgattcaattgactagatttctacatatgtagtgcattagatttatgatttatctgtggtaccgattttgttaacaatgttttttttagttgttgcgggagggaatcgtggtttgccaaatgtgtgacagcaacgatccgcagaaaaaaacagccaaacaaagagaaatttcatacgaattttgatggcagtacatttcgattcacagaatttcgtacaatatttatcgtttgtttagagtttctttccgggttcggtgccttttacgagagtacggagaattttataaataaatacatgtaattgatttgtcgatgagggcgctgcgtgagtgtcaatttgttgtggccattgtgccggtgtacgtgtcgcttccgaggaatctctatacttcgccaaagccaataacattctaccttatttacattattaaacactttcgctggcgtcgctttagcggctctggtctgagcaccgcgcgcaccgcttcctcgaacacctgaatttgcaatcggagtgggaagggaaatttaatgatgaataaggggtaggtggagggtgtgccgggcaccgatgacttaccggcttgagaccgcgctgcgtcaaggcggagcactccatgtatttcacagcgcgtatcttgtttgccagcttctggccctgctcgcgcttcagcggcgtcagtccctgctctgccaggccgctgagtgtctctcgatcttcgcgcaaatcgattttggtgcctggaatacgcccaaagatatatgtatgattctcgttttctgattgcagttttcatgtcgcttggcaacttaccaactagaatgatgggcgcatcgggacagtggtgctttatctccggataccatttcgaggtgacgttctcaaaggacgagggactcgccacgctgtagcatatcaggaaaacgtctgtctgcgggtaggatagcggtctcaggcggtcgtagtcctcctgacccgccgtatcccacagtcccagcgagacctgtattgtgtccacttgcatgggcgccgagtagttgtcgaagctgtgaaagatatcatagtaaaagttagatatcgatctgcggtttgcggctatcgaggcacaaacttacactgtgggcacatattcgccgggaaagcagtctgtcgtgtaggagattagcatgcaggtctttccgacggtgccgtcaccaacgactacacactttatgggccttccggttgacatcgtgagtgtgctgagtgtgcctgtgccgatagctgtgtactgtctgtgtgctgtgggcaaaataagatggaagatgaatgtcttcgccagcttaattcaattaattaagttctattcgaggcaataaacccgccagtgccaactgaccgcaaattatttcacagtcgtacttccttaataaaaattctttaaaatagaaacaaatgctgtagaaatacatatatgacacaataaattatcctattcgttttattaggtttttataaataaattaactaccacatcgtttttggcgcgcaactacatatatataagataaacaattgcttaaatggaatttggcaacttttaaaatttgaatatctagacaaattgaatcaggatacttgcttcctgagtcgcaaactatttatattgtattaatggaagttatacttattggagtatgctacatcgtaaagtgggaatgtccaagctgtggaagtactactgtacagagtataatggcgaaggtctacggtatatctctgggatgatcaaaggcagggctctcgaaaggtgtgtcccggccgcaaaaagaaagcaaccgcagcggcggaggcccataaagcctaataaaacgaacgagggtctcatttcggttgcggtggcactttgttttcgcaaataaaattttcaaaaatagatcatgatgggcgacacagacggggaaaaacaaaaagcataaatgggagcagcggaccaaatggcgaccgcccctccagtggcgccccttcggcggtgggcggggtcgcccgagtgttgtggtgacgcggaagccaccggcagacgcaccgcatcgagaaaaagaaacacaaaatgggaaaatgaaccgcccgaaaatagacacaattaagttctcataaccgattcaattaaagttcaacacacagaggcggcacatattgcgccacatgcaacggggctgggcgtggccgcgggggcgggtgcggtagcaatgaaaatcttttgttgtggcacaacaccgaatgggaatacaatattattttaccgttttcaccaccacctatccttttcctttgtctgtcggcaggcggcgactgttttgtacttggcttatatcactgtgcgttttccggctaccgatatgcgttcgaggcgatggtccatgcggcgcatttaaataattgattcgcactatttcgcagcggcttttacttataaatatctgtttgagggacaaaacgcagcgtccccgaataattttcgtgtttttcctttttgtttccactccacacaaacacacacccacctttttgacagcgcagcgacgctctctctctcgccgttgacagtggtgccaacttagggccagaaaatagctgacggtaaatataaaaaaatcacttaaatgtatggtaccaataactaaacttaataagcatatcatccagtataaagtcgtttttctttttccaaaactaaaataaacttttttttacaattggcacttaaaaatcagctagacttggcgtgaaaaaagagagcgggtagtccagctccgctctctcgaaactgacaagcagtgctgcaaaaggtgcagggctcaggcggatttggcattatacaatactaataggcatggttgtgggagaggggttgcaaccaattttcacattgtaaacaaaattatttatttaattctatttcgagcagaatattgtaataattacctgttaattaaaaaattatcattttaaaattatcttatgtaagttcaataccctttaattgctatcgactacgcccatgctgcctatgtccactgttgttgtttcgagcgtcgtaatgagcagatttgtttataaacttttacagagtgcaaaccaaactagttcgggctgcagacgcatttctttggctactgtaagaaatgcggaaagcgaatctcaagagggtgcccctgcccgcacagttctggtggagaaggactcgcacataacacttattggcctaaatcgcgagcagcagcgtaattccattgatgccaacaccgcggagcagctgaccgaagccattagccaattcgaagcggatgatacttctccagtgggtgtgctctacggcataggtggctccttttgtgcaggctatgatctggaggagctagaggcggaggcgcaacgcggcagcctcaactttctgttgcgtcacgagggctccgtcggaccaactaggcggcatctccgcaagccacttgtttgcggcatcagcggtttctgtgtg

SEQ ID NO: 26918 - DNA, 1456 bp, DROSOPHILA
aacaaaaaggaaaaacacgaaaattattcggggacgctgcgttttgtccctcaaacagatatttataagtaaaagccgctgcgaaatagtgcgaatcaattatttaaatgcgccgcatggaccatcgcctcgaacgcatatcggtagccggaaaacgcacagtgatataagccaagtacaaaacagtcgccgcctgccgacagacaaaggaaaaggataggtggtggtgaaaacgcacacagacagtacacagctatcggcacaggcacactcagcacactcacgatgtcaaccggaaggcccataaagtgtgtagtcgttggtgacggcaccgtcggaaagacctgcatgctaatctcctacacgacagactgctttcccggcgaatatgtgcccacagtcttcgacaactactcggcgcccatgcaagtggacacaatacaggtctcgctgggactgtgggatacggcgggtcaggaggactacgaccgcctgagaccgctatcctacccgcagacagacgttttcctgatatgctacagcgtggcgagtccctcgtcctttgagaacgtcacctcgaaatggtatccggagataaagcaccactgtcccgatgcgcccatcattctagttggcaccaaaatcgatttgcgcgaagatcgagagacactcagcggcctggcagagcagggactgacgccgctgaagcgcgagcagggccagaagctggcaaacaagatacgcgctgtgaaatacatggagtgctccgccttgacgcagcgcggtctcaagccggtgttcgaggaagcggtgcgcgcggtgctcagaccagagccgctaaagcgacgccagcgaaagtgtttaataatgtaaataaggtagaatgttattggctttggcgaagtatagagattcctcggaagcgacacgtacaccggcacaatggccacaacaaattgacactcacgcagcgccctcatcgacaaatcaattacatgtatttatttataaaattctccgtactctcgtaaaaggcaccgaacccggaaagaaactctaaacaaacgataaatattgtacgaaattctgtgaatcgaaatgtactgccatcaaaattcgtatgaaatttctctttgtttggctgtttttttctgcggatcgttgctgtcacacatttggcaaaccacgattccctcccgcaacaactaaaaaaaacattgttaacaaaatcggtaccacagataaatcataaatctaatgcactacatatgtagaaatctagtcaattgaatcgaatgtattgtacgaatagtatctggcagaaagagaaaattataacaaccgcagcaaacattggtttcgcatatcacgagcatctatgcatttcctagtttcccattaaatgtattatagttatatatagccatgagctaaggcagccaatccgcagctaacc

SEQ ID NO: 26919 - protein, 195 aa, DROSOPHILA; identical to SEQ ID NO: 11766

SEQ ID NO: 26920 - DNA, 2351 bp, DROSOPHILA
gactgacaaatcaactaacacaatttgagccgctctccgccacgctcgctctcttctaacggtcttcctctcacacgcttctcgttctcacactcacggtctttctctctctctctctctctctttacttgcagacagctcctcgacgaacacgaccgagaatccgccatcgcccacttccatgagcccgaacaacaataataacaacagcaacaccactgccagctcgaaccaagccagcaaatcgccctctcaccacccactgcaccccctgtaccatcccctcggctcgcaacagcagcagcaacaacagcagcagcaccaacagcatccacagcagcaacagcatccacagcagcagcagcagcagcatcctcaccagcccaccacgcccaccagcagcagcagcagcggaggcggcagcagtctgacccaccatccgcatccgcatctgaccggctcacatggcggatacttgctgcccagcagttccaacgaatccgacgaggagggcgaggagatcatcgaggaggatgatggtacggacggaccctccgacagctcctcgccacatggtgatggcaactcgaagagaaagaagaaaaccagaactgtattctcgcgcgcccaggtcttccagctggagtccacgttcgatctgaagcgctaccttagctcctcggaacgagcaggtctggccgcctcgctccggctgaccgagacgcaggtgaagatctggttccagaatcgccgcaataagtggaaacgccagctggccgccgaactggaggcggccaatatggccaacatggcgcatgcagcacagagattggtgcgtgtgccggtgctctaccacgatggcacaacggccggatttgtgccaccgccgccgccgcaccaccaccccatgcagtactatgcggcggcacgcaacaccagccccccgagacccccgctctcgtcgctggtatagggagtggggtgcctggcgacggcgcccatgtcgctgctgaagccgcccaattccatggcacatccgccccatccgcagccaccgccgccggcgccgctccacatgcaacaacgctccttcctgggctgcgagcagctgacggagacggacatggactccgattcggagcaggagcgcagccatatgatggacgacgaggatgccgccatcgatgtggaggccgacgaggagcaggagtccgcatcgccagttccatcggccacgccccccaagagcagcctttgcctggaaagcaaggagagtggtggccagcacaaggagctagcgcaaggagctgctccggctgtggacaagtccggcaaccagaaggcctactgagcccaattcagtcaagtggatgcacggagaagaagtccttccaacgttgtatgctttaatttttcacatatggaaaatatacatactgaatacaacgattggggtcatgtaatagaaactgtgtttgagcacgctgaaatgttttgaaaattccacagaattccaatatcctacattccaggattgagaaatttccgtatcagtaacctcattcagatagtgtttctccactccgtgccggaccacatcaattggtttcaagttattatgatagtttgttcctaaaatccactgtaaatacgaacaactcaagctccttgtacatttggatgtctcttgctcaataagtttaggattttagaaataaccccacactatgtgtacataaacataaatatatatatatatatttatatatatatatattctgatcacaagcggattgggtggggcgcttggctcatcgtgtcgtttttgtgtttggcttttgaatctttaaattgctggtcaagtgtaggctaagttcgatatgctaagccgatttggtccctatgggcgatttgggcaattattgttagtctagtgctattcgtaagctgtgtgtcaagcaattaccaaataattagttaaattatttatatttttaatcgaatgctaacgtaatccaaacttcaactgaaaccaaaaaaccaaaaaaactcattagcgtgcacagacattcacatgagatgaaatgaaatgcgtataaatatacaaataacaaactatatataaacatattaataaattatataaacatatcgaaatgcatttttattgctttgaggaagtttcacgctttaaggtagataaatattttagaaaacagacttaatatatactatttaatggtgtccttcagattgttatcatatatagtatcttattgtctaaatactttgttgtatgttgtacacatttaaaagttcctcagagatagaagcttaaacactcatctact

SEQ ID NO: 26921 - DNA, 351 bp, DROSOPHILA
atgtcgctgctgaagccgcccaattccatggcacatccgccccatccgcagccaccgccgccggcgccgctccacatgcaacaacgctccttcctgggctgcgagcagctgacggagacggacatggactccgattcggagcaggagcgcagccatatgatggacgacgaggatgccgccatcgatgtggaggccgacgaggagcaggagtccgcatcgccagttccatcggccacgccccccaagagcagcctttgcctggaaagcaaggagagtggtggccagcacaaggagctagcgcaaggagctgctccggctgtggacaagtccggcaaccagaaggcctactga

SEQ ID NO: 26922 - protein, 116 aa, DROSOPHILA
MSLLKPPNSMAHPPHPQPPPPAPLHMQQRSFLGCEQLTETDMDSDSEQERSHMMDDEDAAIDVEADEEQESASPVPSATPPKSSLCLESKESGGQHKELAQGAAPAVDKSGNQKAY

SEQ ID NO: 26923 - DNA, 2558 bp, DROSOPHILA
aggaaaccgaaaaggactagaggcgaaccgggaaaaagtgaacaaatcggggcggaacacatttcataaatcttatccgcgattgagcacagctccggcagccttcgaatttgttttcgatttttttggccagtgctccccctagccggttattttgtggccgatttgtttttcgccaattgccattcgacgtgctgctccaccgctccgggtgatggcgatggtcacgagttggcgggagctacgactccgccggctggcattccggcagcatggaggcggtctggagtagcttctggtgcttgtacggaccgaaacgtgtgcgtgggtcggtggtccggccaaaggagatgaaggccttgggctgcttggctggcttgcaggagtccttttggggcggcgtctccacatcggctggaggtggcggtggcttctcttcctgtttcacctttattgggggagcacatttcgtgcggcccgaccagcgacgttggctttcgcagatcactttcagggcacacaccatggcgattatcgaggaaaccatcactatgatcaataggatcagttggcagagcgtccaggtgaccggattgccttcgtcctcgtgccactcctgatctcggctattcgtcacctggcgggcaacctctttgcgcagcttgtggcaatcgtaggcggacataagattaactcgcgacttgaacggagcgggcagctcgtccgaccaccatttgtcccagagctccgcctcctccacgccgggcagcaggtgggcgcagtgggcacacacctcgttcatccactcctggcattccttgctctccaggttcagtctgcacgccggattcattcttattactcaggtgaatatatattgggaaagtacatatattttaatctttacatttcatttttccctagcttgctttatttcactcgaaaagagaaggaatttctgtaaattaaattagtaatttaattaatttccaacaactaatcattgtgggctttcagtttctgattgtttttttcgattgcgcctaatcaagttggaccacttgattctgtatttcctttttggactacagaagggtgatcctgccaaagcctgactggtagatagaatcgtttccttgctatcagtttttggtacagattcggtggctctttgtgttgattcgccctccgtttctaagactggagatatggaaacagccgactttccccttaaactcattaaatgacagaagttcgccttaggaataccttgattggaaccggtgtacttcaatggattaccatcccagtcagccagttcatcaaagtaactaactttttggcttttgcattttggagttgaacctcctggaaagcgacgtacttccctgctcttaaacgcaaccggctcgctttgcgaaaagaggcagctacgcgatattaaccaaatccagaagccgatcaggaaaagcaacaaggtcagcataaggcacaggatcatcggactaacctcaaactcatctggcctctcggcttccagctcacgcttcagttgcatgcattcctgggaggtgatcagtttatgttccggtagcttggatatgatctcttctgccttccatttcggctcagctccaccgcaaacttgattaaggactgacattgtatttgatgtattaaggaaattttaaattgatagggctcacaatgaaattaaattcatgacgcgttatttatgtgaaattttttgataagccccgctaaagattctttgctcgaaagatattttagtcattttcatacaaaagttaaattgttaaatcgatatcttaaaagtaataatttttgtcggcctttgatacttttggatccttttctggcggagtcgatgtggactttggaggcggtatgggccgttccggaatgggtggtagagttgggtgtggaggaattggaggaagtgtcgggtgaggcggcaccgggggcagtgagggatgatcaggacgcggaggaatgggaatggatgaaggcttagtaggagaactcgaacgtgctgggggcttggtcagaagtggatagggttcgattgcatcatcggttcgattggatctaggcgacggctgaccactttgcgggcgaactcttcgactgctagttggttgttcaccatcctgggcagatcgcgagggtctgaaaaatggtggccatagccacgaacgcgccggtttgttttcttccacactctcagtggtttttccaacttcgggtttttcagttgtgctatctgtttgggcatcattaaagaaatcaggtggtgtacccgagatgtaaacttttggtgaaaataaatgtaaataatcgtaatcgtcatcgctatccctccggtcatcatcatcttgtgctgcatccgacgaatcctttccatccataaaaggtgccataatttccaagggtatggggaaaagtacattaacccgacgttccgatgccatggaacagagaatctgcagatgccttagctaagttggttagaaggagtcaggactgtgatgttcaaa

SEQ ID NO: 26924 - DNA, 558 bp, DROSOPHILA
atgcaactgaagcgtgagctggaagccgagaggccagatgagtttgaggttagtccgatgatcctgtgccttatgctgaccttgttgcttttcctgatcggcttctggatttggttaatatcgcgtagctgcctcttttcgcaaagcgagccggttgcgtttaagagcagggaagtacgtcgctttccaggaggttcaactccaaaatgcaaaagccaaaaagttagttactttgatgaactggctgactgggatggtaatccattgaagtacaccggttccaatcaaggtattcctaaggcgaacttctgtcatttaatgagtttaaggggaaagtcggctgtttccatatctccagtcttagaaacggagggcgaatcaacacaaagagccaccgaatctgtaccaaaaactgatagcaaggaaacgattctatctaccagtcaggctttggcaggatcacccttctgtagtccaaaaaggaaatacagaatcaagtggtccaacttgattaggcgcaatcgaaaaaaacaatcagaaactgaaagcccacaatga

SEQ ID NO: 26925 - protein, 185 aa, DROSOPHILA
MQLKRELEAERPDEFEVSPMILCLMLTLLLFLIGFWIWLISRSCLFSQSEPVAFKSREVRRFPGGSTPKCKSQKVSYFDELADWDGNPLKYTGSNQGIPKANFCHLMSLRGKSAVSISPVLETEGESTQRATESVPKTDSKETILSTSQALAGSPFCSPKRKYRIKWSNLIRRNRKKQSETESPQ

SEQ ID NO: 26926 - DNA, 2612 bp, DROSOPHILA
gaaatgtcgttgcgacggcggcggaaaatggcatataaatttcaactggcagccataatttgaacaacaatcatttagacataacgtatacacaagtgcattttgtctaaattgcttgcttcaatttcgatttgagtgtgcattcaattgaaattaaattcaattgtttttttatggccaatcccatgcactctgacactcactcattcagctccaaactccaaacaccaaccgccatccttcaaaacggccacccatccgtgagataaacaataccccatgcatttttaaaaattgcttgtatttgagattaacgacatccgccgtatttataggcaaaatgttgatacgctgccaggaacaacacttggccagccacttctccggggtcattccggccaaatgtacgggcatgcatgttttgggtccgtatcccgatccggatcgcgcttacgcacagtgggctcgctatggaaaaaaacaaattttcaaattttcattcatgtattcttgggattcatcttcaaggtgtagaaaatattgtgttgcttataatagagatattttaacgccataaggatattcttatgtagaatgtttaaaaagtaataaagtaacaatttagacatcttaaaataataatttaatatggaatcatattaaaatatttataaacttttataccatgtttagggccactgtgcgaacgtctgaatatttatttgtttttgtgtttcgtgcagcgcggcaacataaaaaaggaaaccgaaaaggactagaggcgaaccgggaaaaagtgaacaaatcggggcggaacacatttcataaatcttatccgcgattgagcacagctccggcagccttcgaatttgttttcgatttttttggccagtgctccccctagccggttattttgtggccgatttgtttttcgccaattgccattcgacgtgctgctccaccgctccgggtgatggcgatggtcacgagttggcgggagctacgactccgccggctggcattccggcagcatggaggcggtctggagtagcttctggtgcttgtacggaccgaaacgtgtgcgtgggtcggtggtccggccaaaggagatgaaggccttgggctgcttggctggcttgcaggagtccttttggggcggcgtctccacatcggctggaggtggcggtggcttctcttcctgtttcacctttattgggggagcacatttcgtgcggcccgaccagcgacgttggctttcgcagatcactttcagggcacacaccatggcgattatcgaggaaaccatcactatgatcaataggatcagttggcagagcgtccaggtgaccggattgccttcgtcctcgtgccactcctgatctcggctattcgtcacctggcgggcaacctctttgcgcagcttgtggcaatcgtaggcggacataagattaactcgcgacttgaacggagcgggcagctcgtccgaccaccatttgtcccagagctccgcctcctccacgccgggcagcaggtgggcgcagtgggcacacacctcgttcatccactcctggcattccttgctctccaggttcagtctgcacgccggattcattcttattactcaggtgaatatatattgggaaagtacatatattttaatctttacatttcatttttccctagcttgctttatttcactcgaaaagagaaggaatttctgtaaattaaattagtaatttaattaatttccaacaactaatcattgtgggctttcagtttctgattgtttttttcgattgcgcctaatcaagttggaccacttgattctgtatttcctttttggactacagaagggtgatcctgccaaagcctgactggtagatagaatcgtttccttgctatcagtttttggtacagattcggtggctctttgtgttgattcgccctccgtttctaagactggagatatggaaacagccgactttccccttaaactcattaaatgacagaagttcgccttaggaataccttgattggaaccggtgtacttcaatggattaccatcccagtcagccagttcatcaaagtaactaactttttggcttttgcattttggagttgaacctcctggaaagcgacgtacttccctgctcttaaacgcaaccggctcgctttgcgaaaagaggcagctacgcgatattaaccaaatccagaagccgatcaggaaaagcaacaaggtcagcataaggcacaggatcatcggactaacctcaaactcatctggcctctcggcttccagctcacgcttcagttgcatgcattcctgggaggtgatcagtttatgttccggtagcttggatatgatctcttctgccttccatttcggctcagctccaccgcaaacttgattaaggactgacattgtatttgatgtattaaggaaattttaaattgatagggctcacaatgaaattaaattcatgacgcgttatttatgtgaaattttttgataagccccgctaaagattctttgctcgaaagatattttagtcattttcatacaaaagttaaattgttaaatcgatatcttaaaagtaataatttttgtcggc

SEQ ID NO: 26927 - DNA, 612 bp, DROSOPHILA
atgaatccggcgtgcagactgaacctggagagcaaggaatgccaggagtggatgaacgaggtgtgtgcccactgcgcccacctgctgcccggcgtggaggaggcggagctctgggacaaatggtggtcggacgagctgcccgctccgttcaagtcgcgagttaatcttatgtccgcctacgattgccacaagctgcgcaaagaggttgcccgccaggtgacgaatagccgagatcaggagtggcacgaggacgaaggcaatccggtcacctggacgctctgccaactgatcctattgatcatagtgatggtttcctcgataatcgccatggtgtgtgccctgaaagtgatctgcgaaagccaacgtcgctggtcgggccgcacgaaatgtgctcccccaataaaggtgaaacaggaagagaagccaccgccacctccagccgatgtggagacgccgccccaaaaggactcctgcaagccagccaagcagcccaaggccttcatctcctttggccggaccaccgacccacgcacacgtttcggtccgtacaagcaccagaagctactccagaccgcctccatgctgccggaatgccagccggcggagtcgtag

SEQ ID NO: 26928 - protein, 203 aa, DROSOPHILA
MNPACRLNLESKECQEWMNEVCAHCAHLLPGVEEAELWDKWWSDELPAPFKSRVNLMSAYDCHKLRKEVARQVTNSRDQEWHEDEGNPVTWTLCQLILLIIVMVSSIIAMVCALKVICESQRRWSGRTKCAPPIKVKQEEKPPPPPADVETPPQKDSCKPAKQPKAFISFGRTTDPRTRFGPYKHQKLLQTASMLPECQPAES

SEQ ID NO: 26929 - DNA, 33472 bp, DROSOPHILA
tgctatcatctgatgctaagtggatgcggaaaaaacacaaagtcgacatggtaaccctagctggcactttgtaaacacaaattacccatctagtaggccttttacttccatttaaatgctcaaaacttactgtcgtagtagtaacaaacgcgctttttgctgtgagactgcattttgcggtgctgttggcgggtcttaaatccccttaaagtcgatgtttttctatccttcgtcgatcggatgaacttgcgagctcagaagatggtttactttggtgccggtccgatttttggcactttggcgcaactatatagccaaaatcggagcgcacaagacaaattcgcgaagaggaaacctctgcagatgggcagtgtgaccgcggacttttttaaatccacacttcccggctctgcagaatatacttttaatactaactgcatgaataccgaaaataccaaacaaatatatttaattatttattaaagaaatatatttaataaatttacatatgaaatacgattaccctcttcatacagagtggtcattttttattagatatataaacaatcagacctatgtacttatcaaaaattatcaaatatcacgacatattttttggaaaaatagcaaggatcaattataagtttataaagcaaagtttattggctaagatcacgttgcagagtctgaagctggaactagagatgttgttggaaaacatttaagtttaagcattcgaataaactaattgatttcaatattttctatacaaatataaatgattcattataatttaagaaaaacaaaaacacagaagtaataggttgtagtccggggtaaataatgttaagtcgattaatcgataggaatccatgctaatatcgaacttggcccatcgccagagggtgcattccctctctctctttcagagcatcacccatctcgctctaaaatccaccgcagtttcccacgattttccttctcactctaaaattcaccgttgaacgactcggacgcgattttccagcgcgggtgattttcctcctcggtcggcgtttttcggcggcttcttatcgacaaacaatagtgctcaagtacaacgagattttgtagtgttttggagttgctgaattagaggcgattgttaattgaataaaattaataaaacggcgacgcgtaagtttccaactcccccatgtgcaagtgtgcgtgtgtgccctgtgtgtgtgtgtgaaaaaagagaaagaagaatggagttgcagtggaaacacaaacacgctctctcgctccatctccctcgcacgcacacactcactgggcgaatgaagaagtggaaaaattaaaaccgaagtaaagtgacaaagcgaagtggccaataatgcaagaaaaaacatatgaaacccgcagtgaacatttaaaacaaaattaacatttttcataggcggctaaaatatcctgcgcagcttttctctttccgacttttctctttttcccttaagagtcttttcctatgcctttccccctcggagaccaacgcctctccttcgcaactttctgttactttatgttaacttctccccttctttctcttggttttcctcctgtatttttctctgttgttgttgctgtgcccgcaggatatttaagacctttttttgctggcgtttaattatagttttcattgctctctctccttcccgcatctctttttccaattagcgtcgaagttcggcgtaaagtaaacagcaaaaatatagtatttgttgtttttatttggcccgcagaccgtgcagtaaaaacaacaactttaacaggcgtaactgtaaagtccgctttgcttttgatagcaaataaagagaatcggaatccgcagcaaagttttgatttattctaattaaaaaaggtaagtgcgatataaaaccggattatagctccttttcattcgcacctccttggcccgaagtgccgttaggaagagaagccaatgaacgcaaataagtaaacacaaaaactaaaaaaaagagtgctagatttgctctcccgctgcatttctatttatgcttctgtggctgataatgtgtacagtgaaaagtcgaaagatgaaaaaataatgaagaaatggaataaagcttaacttaaggaatcttaagacttgttgtttgttatatttcgacacatactaaccatttcttcaggcttctttgcgcttaaaaaaatacccaattggagtaaatttgaaaaaaaaaaaacatttcaagctttatgataatttggttctaaaaatttatttgcaaccactaaattgtgtttggttcactttatcgacggtctaccgtatttagttattgctccggctgctgtaaaaagtcaaagagcatttgttgttgctgctattgtaattgcttccaatttgtggagagccattggatgacgagtgaatggggttggggaagggagatggaaagaagaagctcaagagcagcaggcgtcggcgcagcagctgctccttctctctctcttcctctcgctctttccatctggtttatcccttgtgcgctattttcggcattttgtgcttatttatttaccttttggtggcttgtttattaacccctcctcttcccttctactctaaatcgctccatgtgctttgaagttcaagccacaaaatttgtttttattattttttttatttgttcgtttctttttttttgtacatttgtagcttatctgttgcagtaaagtttcaccctcactccaaaaatttaaaccccttcaattaacattgctgccgtctgttttctgtttttgctacttctttcctttttccctcagttgtctttccttttttctccttttactttttgtggccagccgctgataaagaccgcaaatagtttgtctttgcttcacattttttgtgtacagtggctatcgcttaaaggtaactaaaaacgaaacaggaaacttaatttcaggaagtgcagagaaattccagtcctgagagcgttacttcgtcagaactcgatttgattctttaagattaattaaggtgtattgatactcgaatttggtgagctcatttaaacaccttaatataaatatgtgtgtgtacgtatccgaatcacaaatcttatctgattgtgacctttatgttggccgttgaaaatcatagccgtttatcactgtacagatttatggccgcttcttctggagtctgttgctctttaacccttaattggtgagtgggggttttcaatggagatccatttgagtgcaactgggcaattatgctgtttggccgctgtccgctcctaagccccattcccttcgccctccattttagtgccccctcgtctttgaccccctgctaaatcattgcaaaatggcaatcgcaaaatgctctcaaacaagtaaatctgcttagctcgactaacggcaaacttgttgagatcttttcatttctctattttgctcgcagttcgctcgctgttgttgttcttcttcaaatttcctattttgcacacaaagcgttttacatgatacggacgaccacaaaggcatagagtcaatcgaaaaggggagcgggtggtggatgaaggggataacacagcgtgggaggtgcaataaggagaatccaaacgaataaaaagtagtcaaagcaacagaagtggagacggaagaagcggaacaagtagaaaactcaattgttcatcgctctcttttagctcctcctttgttcctttccctgccagctgtgcgtgtatgtgtgcgtgtttggccacttagccagcaaacaatgcgcacagcagcaacgttttattgataagaactgaaaggaggagaaaaggcgatggaagtgaagagaggagagcggcgaaggcgaggaaaagtggaaagtgcgtggcaagtgcgacaaaaaagaattaatgtagagatgattgcctgagtggagaaaatttcaagtggattttccctttgattgccagaaaattactacttttgagaattttcaaataagatcttaaagatgcagtattgattgaaaactcttaaaaatgctattttcggtagctcatacttacatagaaactttattcaataaagcaagcaaaataaaccaatttaaaaacgcgaaatgtaaacaaacttagggtatcaactccattctccttctaaatgtattcctcaacctatcgtcgtcgaaaatgtagtccatatatggactaaaggtaaacagcattttgtataaacagcggtttatggccttcataaaacgatcatggctggagcaaagttttcctctcaccttcatttccttagcctcgttcagcttttcctccacctttaataaatacaccagaatgcgatccacatcgctttcaatgtagacgaatttgtcttccttgaagagtcttacgcagatgctgacgagtccttgaaggatccaaacaagaggttccccacacagcagcacatgatttagattggccagaggatctaggtcgtacaagtagctatagtactgcgatacaattggcaatcgaaaccataaacctttccgtatgctgtggacacaaaaacgttttggcggaggagtcggttttaccaataaacgaatttgaggacacttgggtttattgttctttagcaaatgacagatcttaatgggcgtagccggctccaaacaggaatccatccgggctagaaatgcatctaccatttccagtataatgtcgcgtaactctctccaatttcgatttcctagaccaatttccattttaaacaaatcaaggtacaagctacccgacatggcggcataaaaatcacgggctgccagcaattgaaatccatagatttccgtagtgtccagagccattgctactggtattgaaaatgtatagcgttgcatatccttgggcattggtttcatacgcattgtgcagaaaaagtattgaaagcggtcccatatcagattaaatagattgatacctgtacacttgtgcagtgctcttaaatcacaaatcagtgatagttttcgctgcaaaaccaggccataaaatttcggaacgatatttagtttgaacaggatcagtgtggctagtaaccaagcttgaaaaagtctttgaggttgcgttataataacacaacatccaatggtcactccgcctaattcggtagtgtccaggaaacccatggttggccagtagatgacggtaaataataaagttggaacgatagctgctttagcagaagtctttaattggtgacaccacatttgaagcagacacttctttatgtccaaatgcacaatgggtaatgggaatcttcgaaggcatcttccctgactcttatggtaataggaaataccacaaaagcagccaaaggtcatgaggtaataccaggatcctcctagcaagtaattcccattgttcaagtccacaaaggatgcataaagccagctggtagtcatggttatagagagtatcgatgcaatcagcccaagccttataggaaactcgtaggttattcttaaaatgttatttttgaagcatcggggattgttataatgtatgtggcacaataccaaaccaaatcccatcgtgctcactcgtatgagcaacattagtaccgaggaatacaccgaaaacagagtccatctcaggatttcagtgacggaaaccagtggacgcatcacctcgaacaaattgatggctacgaaaatcgtcagcatctgatagtccagccatgagcagagtaatgtggcaaataggaaccgatatagcaatatcttcttgatcttaaggggtagcaactgataatattggggcaacttcaccttccacatatttgcgtatggattttgatttgatttggtgaatagttgattctatatactacgactactgagctgcaacttttaaccttctttccgtcaatttactgtctcaattgacatagttcccaagtcggttggcctggtcatcaatctatttaatgggctgccgttgacctaacttacgcccattgtagaccccctgttgtccctatttcgtaaaagttcaaaagtttttatgccaatttaaagttttcctctctatatacccttacgagggctagccataatcaaggcagcgatttggtaacggcagaaaggaagtgtattgaaacttgtgtctctaatttaccaaactaattcaaaacattaagtcttcgttttcaagcatgaacttttgaaagtgaatagtagccatctaataaattgtttttatatgattctataaattttattgtaatatatgttcaaatgttctgctatctattaccactaatttatttaagtatgtcaagcttcaattccctggtgaaatatttttcagaatagctgttgcttacgttttattttttgccattcaggtggacaagtcagccaggactaagtgcatctaaaaataaagttgttgccgctgcaggcacaacattgcattttgcaattgtttttattcagcgagcgccactttattggagctctgccacctgcggggggataaatgcttgggttagctgctcccagctaaagttctaatttatgtcgctaagtttttgctggcaaaagaaaagtttgcagtcacatttaatggtcaaagcttcaggcgcaatttccaacgggcgaagagagcgtatttcgaacgggaactggacacggacatggaaatggacatggacatggcagaggatgttgctccgtccccactttttttttgtttgtttgccatttcggcctgtgtgtgtgtgtgtgtgtgaccgcctaacccaaaagctggccaggagtggagcgaggcccggggccaattagatttatgggattagcacaggtcgttggctataaaacactcgcatgcttgcaacggggcgaaatcaacgtgaaaatcgagtccatgtggatgagaatgaggatccatttggaaacacacacccgttcgcaaatggaacctgaagcgatgggatatgtgtgagcactgagagaaatttgtgtaggcttactcaattcaattgccagcttttatgctgatttgtctttagagaataaataagcgattcctttgagaacttttttttttcaagtgatcactgggagtataattagcacaaattaaagggagtttcgtgcaatattttctctgtggacactgcaaacatttgcattgttgtgtcctgttgagctcctctatatttctccctcgctctctctttctctctctgcccatatatctctccctatctgtctgcatgcagcttcggtttgagccaactccccacttaccacacacgcacacttcaccgcttaccttcgccgaacatccggtgggcaacaaaacattgtttcatcccataaaccgccgccaacttttgcatcggtggtggtttttttttcgctctcgcactcggcgagctttgttccggccttccgttccgttccctcggcgtcctcctcaccttccgccgcccatcgccacaccacgtcctgttcgccttgccattgagcggccgcgacgatgacgcgtgctcctggcccatgcccagaaccacgtaccgccgcacacatttccggactcaggcggactgtttttgtgcccttggaagagggtatgatgattataagagaatattttagtgtaatataataatcgtggaatgttatcgaagttatcaaatgttgtcgaatgttatcgaagtacgatgttctgaacatcctacgaagttctaatgatcccattacacataattgaaagatacaaatatatatcgtgagagtactttataagcaatccagctgataatatctcatatctagcccagcttagtttagtacctggtactaaagtacaacctggttagggtattccaaacttcgtcaccagactcgtatcgttctcacttcttttccatggattcgattgtgtggagctttggttggtggttgtattgctctttctatttcagcttctgtggccctgttgtgttggctagttttcgattttatcgattttcataaagctgcttttatgggcggcaggcattcagtggcaaaaagttttcggctctgttactccaattagagcacataaaccatgcaacacagccagccgtgcagcaacaaaacaacaaaaacgcacaggcgcacaaacggagcgacggaggtgagcaatttggctgctctgctgaccaggtgaagccaaacatttctggcattccaatcgcatttttcattgacttcgctccagcttcataaattgagtttttacttctcccaccgaccgaatattcctttgtcgatgcattggaccgagaaataaatttctctacgtatttattccgtttttgatggccatatgcaagcaaactaattcgggtggcatgctacatctattattttattgaacacgaggtcaaaagttcaaaacagtcacaaacaaataaaagaggagtgcaggacactcaaagagtgaaagaaatttcaaataaaaccatgcaatcagcaatgatttagattaccatggtgattaaacataatataacttaaatatattaataaatctattgaatatagttaagttcttcctacctcgctttgtaaatcccttaagaaggctggaaaatataatccctgcggctcaattaatccactcggttagtggagcacttttaatgagtgccactcacgtagaagaaactgcagctgcaactgaaactcgacccaattcgaaggcccaagcaagtcatccaaacttatgggatgacactaaaataagagctctgctttgcgacttactgaaaactttttaattacgaggatcaggacaataaaagtttatgaggcgaaaagtcctgccgcactggattccgcccctctcccccgcatatttcggtcaaataaataccaaaagcgtggtaaaaactaataaaactgaactcagctctcggcttccaacggtggtcgtaaaaaaaaaagctgagaaaatcgagttgaagttgaacgtttaatgtgtgtgctgccaaaaacttggctaatccctgcaaagcaaaatagcagcagaaagactagtcaataaatggggaaaaatgagactgttgcgcttatattggactttttggcacaaagttttgtaaatattttctcggacgagccaaaggtcctgggaactttgattattgccagtgacaggccaacgaaatggcaaatcgatttcgaatgcaatctctgtctatctgctaagggctaatattcaaatgaagtttcggtgcattgaacccgcatcagcaagtgcaaggtgtgaatttgccagccaaccaaggagcaggagccaggtgccaggatgtgaattggtcggtggcaggatggagcttcgggccaccaggcagataaatataaacacgaaagtggagcacaggcagagctgtagccgcaataactgtcttgggagatacaaatgccacccgaagcgcacgaaagtgcactaatataggaaaatattacctaaatttaatttaaggatgaatatgctgagtaactcgttcaatttgttagttactatcagaaaaaattattgactttatatattttattaagctggcaatacttattcttcaagatctgtttttttccagtgtactcggtaaagcagcgtgtggaagctgtgtaaattcgatgcaaaggcatttccagaatgacagcgaataaagcaaatgctctagatgccagcaacccttcatccaacccaagtccatatcccccactatcctaacccttaaccccccgactctggcaattccccaaacgcacggaaacttgacaacttcacatttctgggaggtcttagacaaactctttgcacacgcttacacacagagagattcctcactcaaaaccctcaaatgaaattaaaaagtttaacttcaaacttggaaatgggttgggggagggggtaggaacaacccctagctcacatttgtgcaacttgtgcctagacactcttcattttgctcatgaagttccagagatttttacttgtgctcataagacattagccagctactttgcggccaggaagttcctttgacttcggagatttcgtatgtgttgaatagttgaatggaacaatgtttgtaattagtcacaactgccacaaatctttagaaacatagttgtgcaaaacagggtcataaaagcggctttacagaaacttgagatacaccagtcgtaattatgggtgtaattaagtaagaaatcttagggaaccaacaaaagatgtataaacccccagataaacacttttaaagtcagttgtcaagatagttatttgatatacaaaatatatagtttagctggcgaaacttgtgaaatatatgtttattattatagcgcctgaactgagtgttccgctcagtcattcataaagttctcagcttattcgagtatttgttccaacacgtgaattcgttgtgacaaatacgtgataaattcgttgtagcctcatcaggcaaacaagcgcgacatgaacatagtttaagtctgacgggtcttgagctccacaaaagcgattttctgagaaggggaacttgtggataggggggcagtaagtgctgcttttccagacagctacaaattttcatagcatatttcaagctgacttcagttggcatgagagcgccacacaaaacgttagtgatagaaaaaaaaaaatgcaaaaagccaaacaaaagaaacacatttgttttgctttgatagttcccatgacaaagttttgataaactaaaatacttggatggagttttcagcttttcgcagcaaattgctgagcacaactattttttttatggctaagtcagtaaattgtacattttgaagagtataaaaacaaattgcattcttagattaagaaataaataacgcgaactgagttaaatgcaaatcaatatatatatatatactttttgcttttacaacttctgaaagctatctattttttaatgcagacattaaactcatttttctaataatcaaactctccagagagagttcaatgctgagatacttaatcacgagacattttttttattgccattacaagtgcaggaatctagaacaaacttttttgtgcagtacttccactgatgaagtagtaatttgtctccactttttagcttgactcgagttatttcttagcaactgcctcaattgaatgactgtccaaacgactgacaaaatgtcacgctgcgattgtgccgatagcgaaatctcgttctcattttcaattcggagggtgggctaagttttcaatgccccccatctcggcgatttttccccccattttcctgctgcattgcgccggagcttttgtctcaagtgcattgcagttggaattgtgtctagagtgggctgcacttgtcgcaaaaaagctgcaaaagttggtgtttttttttgtagcttcaatagaaaaaagctgaattcaaacctgatactgaactcaagtgaactggaattaaatgaatggaagaccaggacgctccccaaacgcttcttcaatgcaatgcactttgctgattattattgcagtttgctgtttttattttttatttattttttttttgctcactgggctacgtgacgcagctgtaatcaatttgacatagattttttaaaacaataaatgggcttgtcacgagccggggttaaagtgggatttgaccagggcttaagggccattcgatttcccactcaattaacacacacggcggatggagctcaaatttgctttttatctaccatgtttgctcagcaagcaagttttttttttcgaacagccagacagacaaacaaacaaacatttatatctcaaatagttcgttttctcttttcccaaacttttagatgcaattcgggcttttattgccggcatttctcgaatgtttttcgtaaattgcattttattttcgctgcgaggataattttcaaatacctaattctttcgtgtggtctatccgaaaatattttcccacatttgcatcgaatgtacaaggcaggcagctgagctgccggaaaattgttcacatgtccatattgcatgttcgagagctgccgccgccgctttttgcttgccaccgtgccacataaattgcatttttagctaggccaaaacatgttgctttcgttgtttattgggattgaattcggcggggcttttggctggggatcttacaacacaaaaagtacttcaagtttaattacttatcatggtgcaactgcctatcaaaagatattattaatttcagttgttttaatgaaattcaactcggcttacaagcttgtcatactttgacgtcagtttatttcattgacgtcaaatccgtgacgaatagtcttcaagaatttatttgtgcccttaatcataaggttcataaggtgattcgccgtatttgtttaacctcctgataaatggcaatgttgtcatttgtcatattttgcttgatttccgattgaattcaagttgattttttttattcttttattccaaaggagtatctttatttttatagtgcacaaactgcgcttttagtattcactattttttatttggccgccatataacagctctcttgagacactcttatctggtcagcacttcagttttgttttgattccatttgcggttttgctttgaaatgatgcagtcaggaatgtttgaacggcaagtgataaatctatttaaagtgatgcctgtctatcacagatatcagaatggctcttagagttctgcttttctatggttatgttaatgatgcattatcttagtgtgtactctttgatttttcaagatgtgctaaaagtcattggcctagaaaaaaatccaataaaatcgctgtccatcgtttgttctctgtcactccctgctgtttgttcaaattttgtttctagctatcttcaagtacccgatctaaaataaacatgagaagtgtgtgcacgaccctcgctggttcaacgcattttattttttctgttttgtggggcgtacacttctcgaaacggagaaagatacagatacatagaaaacgaataacagctggtaaagtaaagacctgagtcgagagcagaaaacccagctgactgacggaaaccgaaagtgatacatctgccttctcaaatgacccgagttgcctcatagggtcaggcgttgctcgtgctcaaaatatccttagaaaatgcctcgaggcgcaatccaaacatcctgagacgttgactttggcaagcaggtcacgtgagcctttcgccatttcagcagttcagccaacgaacagaataaaaacgaggcgaggctgacaaagggaaatcctagaaattcgtaggggtggtcgtcctgcaaatgtgattgctccaagaaaaaaaaagggggcgtactcctccactgcctttggccgttcctctctcatatcataaaatgcagaacaaatttcttagatttcggttcgctccgttttagcgccttttcttggcaattgtttcaacgtgtttgaaatattttaagctccatcgaaccagccaaaaagctcagggtctgggcccactttgttttggcttgttttgctttgggtcttttgtgtttacgcatattcggctgatgcatgtataaaaatgaagtttctgtggggttataaatacgaacgaatacgcttatacatacaaacatgaaaatcaatatttgcgccgcgtcgtcgtcacctttttgctagtgttgcgctcttttgataccctttacttaatattcatatgggggtatatggtgttgtgaggatgtgcataagtagaaagaactaactttgacaactgcattaatattaaaaaagttatatattctactgggtattctttagttgatactcatactggttctactggtttattattacatttattccgcctctatttgtattttctgtttgccccgaaagcagtctgtcagtcagagtaaaaaaccgagtcagacagcagcagctgataagccgccatgcggatgtgaaaatgtgcatggatggatgagggatagtaataaatctatttacttccatgtgagaatatataaaggtttatatatacaatttatttactatatccagtgggtacttttcacgataattgactaaattcgtatctctcttccatttcaggttgcgataaccaactttgaccgaatcaaaggtgagcagaacacggaaaacgtactggaaatatgttccatttttttcgaagatttttttttttcaagtgggggttttctcctttgcgactgccaagtttttgtcacatggccgcgggcgattttgaacttgttccactttggcagcgggaatttgtgggggcagctttatctttgcattcatctgtctatcgggccattctttggcccaacttctcctattctgcccctaacgcccagataaaacgcgaaatattctcctgttttttttggctcacagtattttccttttttttctcgagccagctgtgtgctcaattcaaaaatagaaaaagagcaaaaaacctgatggagctagagatgctggattataacagtggatggatactcgagcagcttgctccagttcttgaagtggactccaaaacgagtttttcggcacttgcccaaccgcaagccccgcctcgcatacgtaaatcagttgggttgagttaggtctggttttctgatagttgtttaagcgcatattaaaaaaaaaaatatgcaagagaacaagatccataggcctaataccaaggtttttccagtataagtatatactctttatgaccgcataaaatccgttattatatctttgacatgttcgtggctggtaataaatttctatgcatatccacacatctgcggctaattgaccaatctgaagtaacgattgcgttcgaggctaaaaaagaatcgtaaaaataaatcactaaagctatattttaaaagttcatatcttcagccatgtgcaggatgtgggaccaccgaagaaataaagttgaataaagctcgcttttggtttttttttaacattttttggctttttattgcaaattagatatagtgatgagtaggaaaatcttgaatctttttgccatccatacataagtttacttccttctcagttttgcttttaaacaaggtctgttttttttttgttcagtctgtcttttaatcgctggaaaacagattttctattccgctgacggatttcgatggataaattgaattaccatgttgcatgtgccacacgcaatacagttgtcggtctggctgtagctttttgtgatgaggtccagccaaggggaaagtcatcgatgcattgtcagtaccccctgtcccactccatttgggtttccaacgatgcatttcttggatcttttgttgtacactggggatatgtgctcaaatcacctgggccacacgctgggcgaagcagcagcagataccaacagttgaggtcaatggaatagcatagcttttaattttaatacaattgtatgggcttaaagacgaatgtactgcaaatgacttatgtcaagtatgatcttttatggtggaacttatatgtatgttatatactattttcttgacctgcgctgtgcgagggtagctgctgcatgaatgacacacgcggcaagttagccaagcgcatctggcgggcggtcgggtgtacgattggtgggggccaaggggactggggcaacccttcaatgccgcctagacaaacgggtctccaatttcatgactaattatacgggaacccatgtggcagcgggtaaggcgagaaggttaagcggctgccttcccttcacgaaattatgcggattatatttttgtactccgctgtttcaacttgcaattgtcgttgccacctttgccgttgggtttgcctttttgcctctttggccattaatgaagtaatggaactgaccctccggtgactttggggctgcatgggggatggttatttggtttcatgcataaaatagttgcacataagtgcaagctgcaactgcagcatgaaacgatgatgaaaatttcatgaatttgcaacggaccaaaggagcggcggtgtattctcattcctttttggcccagttgtgggatgaaatgcaatttcgccctgcctgttttttgagtggcacaaacaaacgaacacatgtgttgcacacactaatactcatttattttaataggtgtaaaggccttaagtttacaaattatgatactcagcaagtgtgtcccgggcactggaagattttttgggtcaaattgttgtgtaactttaacttttgcagtcaagacaataaggtcataaataaattactttaaaacgtcaaatgtcaagataaacttacgtttttagtaattatgcattttgaagggctaacctgaggttataaagtaaaacgtagttaagatctgcagcacctcccatttgttctattcgtatctcagttctaggtttttatcagtgcaaaatcagttgccttggcaagctgttgcataaatcaacttcacctgtgaacgtgagtgtttgtttttacctgtgccacactacgggtgcgtgtgtttgtattttagataactcagcgttaagcgcccgcttgaaactatgtcaagccctcccagacacacagaccatcacacgccagtgctgcactaatgccggcattaacccacagctgctgctgctgctgcttcacctaaagaggaagctacggatgctgttggttgctggttgctgggtgccagtgccaccatcatgtgtgctctataaaatatttgtttaaacttgcaacgcccactttgcccctggaagccctggctgttcgacgcccacattttctgcattttctggtgttgataagcacactttgctcacgaccacttgaggcagcgcgacgggtaatcacaacttaaatgagtagtttaattttgttcaagtgcagcactagagagatttaccttacaagaagaggcgaaggaacgttagcttctctttcaatcagttcttttacaaatttgaatttctttgaaacgcacatttttataaacatatttgaatcagagacagaaatgtttacattttcttgaatttctttaaatggtatcatatgccgaatattttctcccagtgtttgccataggtaaacgtatctttgatatatttctccccctgtcttcgttgaagatatagagccagagacctgctttatgaccaggccgagtggcaagttgcgttgcccgctagaatgactgtttattgtattcctctaaattgttgtttatgtctgcattcagacagcagactgcaactgcagctgcaacggcattggcgttgcaatgggaacttgcaactgcagcaacattagcagaggtagcaacatcagccagcgactcgtcaacaacctgacaatttgtgctgtctcccgtctgatggcaaagtgtggcgttgttgtctgtttcagacagttttgctgtagtggcagcagcaataaaagtgctaaaaagtttcatgcccccagactgcatcctgtgccaaagtcctgctccttctgccgctgatgttgaagttcctggcgtccacagaacatttttttctttaatcttttaaaactgagctgcattgttgtgctgcgctgtgtgtgtgctgctgcatttgaagttgtggaaagaagagcggaagaatgccggagagaatgccgcagtccgcccccaagaaccggctgaattttagccccgcttatgtccttgcatattcctcgagcctaatgagagcattataactttgtgacaaacttcgctgtagctctgatgttggaaaagcgagctaaagtacaaaaaaatagtagctgctaccgatgctaatgagagaatgagttttaaagcacaaattgtactcattaaagatgaaatacaactcaagttttgtgtaaatctctgcagaacggacagcaatctctcttggacggacacaactactctgtaggtacgatgaaatacaaatttgttttctctcattatacatcgagtttagtttctatatccatcacaagttagtaataaacatttctagcgcacctcaagttctcagttagttaaagaatttgttttgttttttttgtgaattttccttcccccatgttttgcttgctcttcggcttttctcccgtttcattcataatttctgtcgcatatgtaaatgcgggggttgcttggagtgtcgcaggatgtacctgatatgtccctgggggtggtgaaatgtggagctgggtgttatgcggaggtgggtgtcataatactcataagggggtataagggggcggttgaaacagaaacagaactttgtcgcgttgtcaagcctttgtggctgttttctatttatgttacgttatgttactgctacctgactgggactccctgacttttcccaccatgtctgatgtctggctgggtttatatacatctcccacttgggcatttccttcagcattttaccacccccaggatgtctgcacacgtacacagaaatgacatcagtggtagcctgaagctcaggctgcatcgttgagtaggaaattaaatacttcagttcagttcaaatttccgttgctgcctctcgtttccagctgaaaagtcagttaaaatttgccttcgcttccttcaaatattcatacacgatgcaaagcaatttgtatggttatttaaattgcatatttggctaaaattcctgcaaatttatgacccaacagagactttcactatttgattttactatctgccatgcctttcgccgattcccccgagcccctctatttttttttttattatcgcccattcaattagtctggctctaatgacatttagcccggctcccatgataatcaccccatggtcagcgtcggtttccactgctgcacttttgccccaatttccctcggttgccaccatcccctgtttttccacatttccgccccacactttgcgttgcactgcgccaaaaatgcaatgaaagcgatataaaaggcaacaaggcattgcagcctcatttcggtttttctttccctcttcgtttttgtgcagggtatcaggaatttgaggtatgctgtgttatacggactttatagtttaaagaaaaagtggcggtccataaagcagaataattgaataaatataatgttgaatagtttcttataaatgtttaaggacacatacataggcaacagtttgcaggttttcctttgagtaccaggtataccatagtctaatcacttgcatacatagtggaatttttttttatttttttggacacccttttgttgcctgttcagttgttgcgtgtaacacttttgcagctccccatcgccgccccccgcaacaaatgtcacacgaatgtggagcacgtcatgtgtttatgcatgcaaatgcagcaaacacgttcagaaaacaccgaaaagaaaaggatgcctctttcttcgaatctcgatcgcgattgttgcccacatgccgagttgtaaaagaacatttttttctttccttttttttttgtgctgagtgtctgtgacattacattttcggtaatttgtcttcttgatttaaatgtgtgataccattagttgtttactagcgatgggaaaaaatgtgttcacatgtatcgaacgaacatgtaaaatgtattgtcttaaaaatagatagttcttaagctaacattgtatatgttgagaagttaaatcagcacaatttaagtttcaacaagataaaaaccatgaagtacagccattttcgattgctgtgccattatacagattttaaatgctttccctttcccaaaactttgtaaactattgattgctgggccaaccgggaaatgcccctttaaacatttccatctctaaccaacgaaacgatgcgggaatgcccctaaagacttggaacagtgtctgcgataagcgaacccacctcctccacaggccattaaatgcactctatcgatatgcatttgtacatttcattttttttttgggttttggggtcaactaacgactctcgagcgtttaaattttgtgttgtccgataagagccgaccgcatctgatgggtcgcttctgttggagcagcgtcgtttgggcttaatggcttatcagccggtgggctgaattaccgcttcaccctgcatttcccccctcatccctttcgttggatccctaacaaaacttttgggtgtcgaaatcccgtgattgacccaattgtggaaatgcgacgtgggacccacacatgagaaatgagctgccaatggctacaagacttcgatttgggaaaaaacgttgagtaattgccgcactacagtcgcagctccgcgtcgaaaaaaaaactgaactttacccgcagactgtgcgaggtagttccaaaaataatggaatgccaactcaaagtcgagatgttgaagtcatatcaaaatgcgactagtacgaaatcataaatttaaacttcgtttacttatcaaagctacatcaattagcaggataaaccgaagcaggatatcccgcctgtcattggattatttccacaagcattgcccttgctaattttcggataattacacatttatttttcccatttacttttttcctcacactgaattaaattccttgcgagttgcgtgtgtggcaacatcaggattcaggatacaggcgttaatgccccattgtgtgtggcaatggctttcgctgtcgtcatggccattccacaatcgacaatcggacggcgttagtaacagcggcttgactgggctttgccaccacttaactggtcactggcggctttttagcctttttagccaagtgctgacgtcgcggggtcaggaacatgaacaacaagaaaaaaaaaaaagaaggagcgtgtaaatattgccacctcgtcacggcgtcgtcctgtcgtcgtcctggcgccgtatcgccatttcccggagcgcctgtaatttgccacgtccttcgtcctcttggtccttgggggtgttgtttgctgccatctaatcgcgaacaaatattgttttaatactgcagcaagctttcttcagttctttagctaaccagtccaacacacccacttccaactcgctatcctctgcagtcagcttaacctgcaattaagttttctcatggctatgaaaaggcaagtcgtgttattgttgacgaaaattacggctgtttgtactaccaacaattgtaactattacgttttgcgtttactttaaaaggagggaaaagcggttgccttatttaactactgggattggtatcctttaatccataatggtttttacatacgaaacatagaagcaaaaaattatttaatgtatttgtagttcagcaaaaaatgtgttcatgtttttaagcctgcgaaaatgacaaaacaagtaattgccatcataaagctacttatgccactgattaccactgataatccctcgagctactattattttttataacccataaaatatttaaacttttcgcaaccaattcgatttcctgagggagaatctttaaacgtcatctatggcatgtttgtacggtcagaattttattactggcgccctcggcgtgttggactcacatttttcttcaccagctcgatttcgtcatcgtttcgcacactccacgcccccatttcggtaacgtgttttccgttttttctccaacttttccgggttttttttcccctattttgccgtcctggcacgaaacgaactccggttctgaactaaccccgccttaattcttgtttccttaattttgttgcccattttttttttgttttgccattcccgctgctgtttctcacacggtaattagatttctgggttatatttggttgttcgcaaattcacccaagtcttccctttgacagtgcttatttatttagcgaactaattacgtgtctttggattgccgcctgttaattccaaacaatccctctcccagcacatcttgttcgccataaaaatcataacttttaacttgtagccacatacaaatatttcattaaaataaacgcgaataagccacaggatgtctgtcggtttggttgccatcccgcgaccgcaggcgtctacggaggtgggaacccattaaagtaatgagctcatctcgtgatgttgcaaaacgccccttaccatcctacatgccacattccacatcctacatccccttcagggtcctgcctttttgctgtttgctcatggtttcctcccaacgcctcgcggaggttgacaaacccagaccacagaactcacgcgcgctcatcattggaggcaacaccccatcgaggaatgaagtgctaggcgttatgatcacgcagcacttccggttccctgctccatcctctcatcaggctctagggtattcgtcaatcgaataatattccaataaagtttgtcaatccagtgcaaatataggattaggaaagaagccatgtcgaatattcttcaccatgaggttttgatcgaagggctgactagttaatcaggatttattgcgacgaaaaatgttgagctttttttcgggggaaaagaatatcgtccattcggtccttccctcttttaaaagttatttccacggttttttctttcataacccgcacgttcacagcaacaacagaaactgcgtgaaattgtgcgttacaagcaggtcacgcccccaaaaaggcgccctagacaaaacacgttcctttagctcctctttttttttttctccttaacccttcggcgccctgcggggaatccgggtttgtgcggcgccaacaaataaatctgcaaatctgtaccaaccagccactgggaataccctatccagtaagctttggccacataaaacccgggggataccctacttggagctttgctttatggtcggcatggcctagattaaatgagatttaatggaatttaaggaaaggatgaaaatgagtttttatgctggtttcacacagcattacctactgcagggtatacagaataataaggtttttttccatgcaatttttgattttatctctcgcattgtttttagttattgtgcacccttttttttgtccaagtacgtgacattttttaattgcgcatacaaactataaagctgctcccttccacctcctacgtcgcccagttttttttttattctcgcccagtccatatatacaactttaatctccatatggctgcggctgctcacgccatctgattgatttttgtcacatgaacttgtcacgctggccctgaagtcggtcagtgtacataaaaccatataaatatatctacacttgagcgaaaatcttaaaaagaaattatgttatcaatataaataaaaaaaattactttaataataataatatgcaattgagtccttacgagtcattatctaatcacataatgcgacattcttgatactactttttctcagtgttctcaatgtgggggacgctttcaatactcgggcttattatgattattgcttctagttcatttgtttaatggtctcggaggcgggaaaaggaaatcgttacactgccaagtccagaccctcgtaaatagaatctgtcgagcagatctcatccgtgccaagagtttcagggagttggtaatagatacttgcataaataaattgattggtcccttacacatctggctgtcaacttcccatttgcttgtggcataaattagcttaatttatgtgctcgttcattagctgccattacaatttgggcaccaacagacaaagttcaattaattccaacttcaaagaagtaatttcctgtgaattgatagtcatgaattgcacttatgtacatatttgaatttcactagtaattctttccagttaaataactttaaataaatggtatttaattcgtaattggctacaaaatatttcgcttgtctgataaacaatttaatattcctgaaatgtcataatttcatcaacattctgcttttaataccaattcattttttttttttgcttttgcgaacttttcccttgatgcattattaataactccagcgcaacaaggataaatgtataaaaattgttatttgtttgctggcgagtaaaagcttacagtacgtgccaataaacactatgatatatttatgttttcatttatttacggcgctctgaagtcgagtgcaatttaatattaaagcgccgagcatggaagccagtcgaacgggttaaatgcaatgttttatgcaacaaattcaatttcgaagtcatgtcaacgtcactcggatgggtagtaattcatttaatctatagagcctatcctcttcacttgagcggtgcacataaatcgagaatttattgtgttattcattacttagtcgaaggcaatttcactggcacacatttcccatccgcaccagtagcagatgttcgtatatattttattttattcggttaattcctttcgaggactaatcgatagcacgtgacgcttaaaggtgaacgactgtgccactccgggttgaacgcacagataagacaacagttggtggggaaattgggagagtgcggcatcggcatccacattcacacagccacagccacatatccacggcaacaggatgacaacgaggacgtcacacaaattgactttttaagtaggcaacaatgtggctacagctgacgaaggacgatggcgtggggatgcggtataataataatggagcgcaataaaaaaatgtgggcgaaacagaaccattttccatttccattctgcagcaaccacccccaaaaataccccccttatcaaagacgctccacatttctcagattgtctgtgtgtgtgtgtgtgtgtgtgtaggactgtcatcgggaaatgacggcattacggcatttacagttaatgcctttatgtcctcgaggatttggcctgacatgcgattggttttgggactccccgggggaatcacattcttttttgcataatatttgattttattaggcagtgggtcagaccattttcgcaactattttgagggcacattgttaatttggccaaaatgtagttcaaatggctggtttaaaccagggaaaatataaaggaaactaggtttgaataaattgaataaattccaagactttaacctaatttgttatgttatttaatttactttatatgtaacttaagagcggaattataatgattaggactgataggctttttgataaatatttgctgccacctcttcttaaatttgttttaattggtcttcggaactcgttttgttgctccacttttttacttttccatcttgacacaaccaaacaaacatgcatcataactgccaagttttcacattcgtgttgccgactttgtagcgcattcaaagccgcaatatccaattaagtattcatttagttttgtcaacttcaacaatggttatttattgctcgtgtgcaacaacacatccctcccacaacacatgatgctacgtgtgtacgcccaaacccccaaaagtaaactagaaaattacattttcatgtcacacacacacagaaatgaaaccgaatcgctgtcagcggtggaaaacccgagaattggtaactggcaactcagcttttcatttgctggccatcaactatgatatattcgtatactttttcgattccaactcttttgcccgcaatccccaatcgaccatttgctttcggtttttgatataccagtgcgtaggggtcataaatcgctcgtttttgcggcaaagtctatgtaccatgtagctgctgtgtgtcacctgttcttctggggcaaaaagagttaaagtgtgaataatattatggagagggattttatggcatttgcatttgagaactatgttacctaactatgtgatattaccggaaaaagtgtttcaggatacacaagagtatattagattttgaagtacgactataactactatattgctttcattcatcgttgtctttgttggataacaatgaaaagcactcattcatctttacaagctgttgtgatagcattactagcatattaccctatcactttatcccatcgccagtccatcaactgttgctctttctttgtcgaacgtagggtagtaaaaaataatccagtcagtcagtgacttttaaagtacatctcgtaaagccacgtacataattgtatagaatttcccaacattattgcagcttcaatgccggctactctgtttcgttcacttcgaccccaaaatgtaaaggttgcttgacccccgtggaacttcacgctgttgtttttgcttttgccgctgggcggacgggttcatgaactcgccgaaaaacaaactttgactttttatgggcaaacgaacgcaaatccattcaaacttttgtgcttgttgttggcggattttaaagcgtcgcacgttgtgtgtgtttatcaagttgaggggacaacaaatgcagacgtcgcgccgacaaaactcagacagtttaaatgtcctggcacaatttccaacactctaggcactgtcaagtcaagtcagcaacactttctaccattttcatttcggttgcgatttgggcgctaatgcactgaaaacaaaacgggcttaatactgataaggcttttaagtggaaacacaatgtgttccaacctacaaagtaatttctttaaaaagatagtacccaacttggtgtaaatgatcttacttaggggatgatgctcaactaatttggtgattttcctagtgcactttcgttgtttgccaaggcggcttgacttgagtctcgggtttaacatggctttaataattgacggcacgccaggccaggcggaccggaacaatgtcaggatattagctaatgccgcaaatgcatcctggcaactgccagcatagcgacaatttcatgccagctgcgcacacacaacaaatgcgcaacaataacaattaaaattggaaactgcagcagcaatctagattgttaggggagtgtcctcggcgcaggaagagccgggccatcgagtggttcaaccttggcctaacagcacagcacgcccatgccacactcattcgtatccgcatccgcatcctcgactgcgcattggagaccataattatccaattgaacaataaacagatgcctgccaggcttgagtcaatagacaatggctgcggcggagtgaagttgagccagcccagctggcatcctttcaaatgttgttgcagcggttgatgttgctcctgcatttgctgtattgtggtcattgtggcatcgtcgagagtttgtgtgcaactattgccctacggcagacgagagtgatgagttttgccggccaggagtagtgttgtctcttggggatcttaattgagttaaatgtgagtgtgatttaacaaaatatgcctgcactctgaatgtgttattaaatttcagaataaaaatcgaaataaaagagatgtttttaattaaagaattttaaatggaatgtcgcaattgaaggccaatttaattgtttgttttatacccatttataaattttaacggaccaagataaagaatgctaattaaaaatgatatgagataacacagaactcatagcaaataggtaaaatcataagccaaacgaattaagccaattaaattagacatgttttatttaatttaatattcgtatctctgggcatctctagtacaaaagaagaggctgatgaacccaaagcagctttggaatagggtaaactctagaatatactaggggatttcagtgcataaaccgaattcgcctgccggccaagtcaagtgtaataatgtgccaaaaacgtttaggaagccacaggatgtcggacaattggcaaaaggcaactgtcgtccggctgagtggacacgggtcgggtcagtggactgaacagtggacaggacactgcttgcattcctttgtctgggcgaaaatgtttatttaatgaatatttattaacactaactaattttggttttctccgctttgtttgctcccattttggctcacaggtgactgacgaccaggacggccagcaatgtgcagacggtcggtggttgaaattgctggcaggactcagaaccagaccgcaaggatcaacccaatcaaggagcagcaattgcagctgtgaatgcatcagcgcaactggcaaccggcaactggctactttttatatatacacatccagaacgaaatgcgtttttgcagctcggccaacaaggagatcagcacacggatagcagttgatagatgaactaaagcaaatgccctccaattgcagcttttgatgcaaaacttaaggcaggggcccaacacagaacccaacttgactgatagtttaaactacttactacaaagtaatcgaacaacataattacaaaaacgaaagggctgcaataaatttttaattattgttaagaacaactcgttaattgccaaatatgtgttgcctgatgatctaaagctgaacaaaacttaggaacatatatatacacacacatatatatatatagataataataatctaacattaatcctaaaaaaccgccacgaaaagctcaagatcaagagttagcgccaggagacacttgcttaagccatgggcaacaaatgctgcagcaagcgacaggatcaggaactggcactggcctatcccactgggggctacaagaaatccgactacacctttggccagacgcacatcaacagcagcggcggcggcaacatgggcggcgttcttggccagaagcataacaacggtggctcgctggactcgcgctacacgcccgatcccaatcatcggggtccgttgaaaatcggcggaaagggcggcgttgacatcatcagaccacgcaccacaccaagtgagtactttcgcgaataacattggattgtccaatctaatatgcgtactatctattagtctactattagtagctacagtgaaaccccctttgtaccagaacctttaacttgtctaaattgcattccatctatgcaattttttttttttatttagttagttcagttaggactctaaccatttcattcccaaacggaagttgtgttacctacagctatggatttgaaatcctttgccctgaattttttcacgaatttaaccaatttcatataaatgaagctaaagtggtttggattttcgctgtttgttttcgtattatcatgcattagtaattagctgttggctgttagtctctcctgggtcgtgggtggagtgataattccagcatttaattagtaatttgactttttgcctgccacagagattggcttttacccgctggttggccttgtgtttgcataatgtggcagtcaggcaggcagccagccagccagctagctagctagcgaactaacctgccacataaccaacgttcatccaagtcaccagtgccagggctccgtagtaccccacatccataattagagttcccctcccaggaggttcagaggtggagtaaagtcatttgccaggtggcagcgcaattctcatatttgcagtggtaatacgatgagagtcgttaaccttgaccacttctcgtgtgcgtggcctagtaatggaaggaaagaagggggtctcattgctgctcttggtgttggtttaatgccaccttgacggcgatattgcactccatatgacacgacattgcgtttacgagaccccagggagttgggcaaggagttgcagctggggaggaggttttcaagttgccagcagcagggcaggggcttgttgggctatgtttgcacaagaaaattgtaaggttcagtacaggaaattcaagggataaagaaattatcaatgcaaataaagggggttctgtttaaaagtagcactttcaaagtggcactctaaaagtagcacacatacttaagccaagcatactatgaaggcattaactcgttaactcctcttaagaatctttacattttgtagcaacctatacaaatttccataaaaaatcggtcacttaggtgtaccattgaaatgaacgaattattttgttgagaggacagacctcgctggcagccgattaactgctggcatttctatccgtactgccttatagcatatatggccgtaaagccgcttaggtcgtgtaaacccaccgagaggttgagtgcttggccagtgatttgtgccgactttgtcagcacgaactttgcattcggcatttggcatgggcatgtggtgatgatgaaaggtggggttcggcgaaccagaagggtcaaaggaggaagggcgggcgttgcaatggagggcagcgagcggccaaggcaactgaactggcaaagcggcgagagcagtttatttatgcgttgcctcgatgtgagctaaatcaattagccaaatgcaagtcagtgccaaaaattgtggcttggcagcgttttcgaggcacgaaatgaaattgtttcgttgtttatggccccggcccctagaaaagtatgctatccaatttgcaatttgcatttggcaccctcaacgtgcccatactttaactcattaaattctaattaagtttcggtcatggctggcaaattggttagtcaaaataggcaaggaaaataaaaaaatattatttcccaatttgtcgccataaattgcaatttaaggacgcaaatcaaatttgcccagccagacgaaaattgccactaacccgactcgtcctcttttgcctcatcctttccacttttttttttatatataacttccagccggtgttcctggtgtcgtgctcaagcgcgttgtcgtggccctgtacgactataaatcccgcgatgaatccgatctgagcttcatgaagggtgaccgcatggaggtcatcgacgacaccgagtccgattggtggcgcgtcgtgaacctaaccacccggcaggagggcctcatcccgctcaatttcgtggcggaggagcgcagcgtgaacagcgaagagtaagtgccctgcatccattacaatttaatttattttgggtactttttacaagagctaatctagcatcttaatattaagtatttcgattaaatattaaacggcctcttctattcctagctggttctttgagaatgtgctacgaaaggaggcggacaagttgctgctggccgaggagaatccgcgtggcactttcctcgtgcgaccttcagagcacaatcccaatggctactcgctgtcggtgaaggattgggaggatggacgtggataccatgtgaagcactaccgtatcaagccactggataatggcggctactacatagccaccaatcagactttcccctcgcttcaggccttggtcatggcatacagcagtgagtatatagatttcgaatagtatgggactctaaaacctattaattaatttccttatctctgaagaaaacgctcttggcctgtgtcacatattgtcgcgtccctgccccaaaccgcagccccagatgtgggacttgggtccggagctgcgcgataagtacgagattccgcgctcggagattcagctgctgcgcaaactgggacgcggcaactttggcgaggtcttctacggcaaatggcgcaacagcatcgatgtggcggtcaaaacgctgcgcgaaggcaccatgtccacggctgctttccttcaggaggccgcgattatgaagaagttccgacacaaccgcctggtggccctctatgccgtttgctcgcaggtaagtgctataaatctattgtgattaatgtgtattaacttgaactatgaatcgcttgcaggaggagcccatttacatcgtgcaggagtacatgtccaagggcagtctgctggacttcttgcgcgagggcgatggccgctacttgcacttcgaagatctcatctacatagccacccaggtggccagcggtatggagtatctagagtccaagcagctcatccatcgcgatctggcggcccgtaatgtgctgatcggagagaataatgtggcgaagatttgtgattttggactggcgcgtgtcatcgcggatgacgagtactgccccaagcagggatcccggtttccggtcaagtggacggcgcccgaggcgatcatctacggcaagttctcgatcaagtcggacgtgtggtcctatggcattctgctgatggagctgttcacgtacggacaagtgccctatccgggcatgcatagtcgcgaggtgattgagaacatcgagcgcggtttccgcatgccgaagccaacgaatcactacttcccggacaacatttatcagctgctgctccagtgctgggatgctgtgcccgagaagcggccgacattcgagttcttgaaccactacttcgagtccttctcggtcacgtcggaggtgccgtatcgagaggtgcaagactaaacagagtccagcctattcacacacatcaccaacactctctcacacgcatacacacacgtacgatatatatatatatagtatataaagttatacatatattatacatttatatgcatatttactataattcttaagactttttaatggcatagttgcataccaaccaaccaacacacatgaactctatatgtatggtatatgtatgtgtttaagcgtatcttaacaattcagaaaccaactacaaacaaaaaaaaaatcaacaaaacaaacaaaaaaactaagatcggaaaacaaaattttatattttacacgcaaaactattttataatttatatacctaactgtatgtactatggaaatagaaagtatttaactagttttttaagcttaaccgaaaagggaaaggcgccgagaaatgataccaagaaatcaagaaagaaattgaaggcaactctattgaatttcaaatcgaatacagctacaatttaacgctactttaatcggtgcttacgttttatgtataaacaatccaatccaatccaatctacaactataactttttgatcttaacctccctctgctgaatagttttttctgatactttccacacacacacgactatcgactaagccaagtattatttgactcaatcaaaccgtatcaagaaatcgaacatttatgcaaaacaaattgttgctaatgagaaactccaatgatggcatttacttataaggtggcgtccaccactcgtctctacttccaaatcagaaatctacacgatctatcacccgaaacatagtatgttgcttcctcctcgagcaggtgaagctaggaaaaaaaaataagtaagaaaagcgaaaattgcattttgtacaaatcattgaaaaggagagaaaaacgcatttgacatatttcgttgttagcaattgaaccaatgaatgtttatagtacatttaagtttatgccaaaattattgtttatactttgttcgtatacttaa

SEQ ID NO: 26930 - DNA, 2422 bp, DROSOPHILA
ttgaacgactcggacgcgattttccagcgcgggtgattttcctcctcggtcggcgtttttcggcggcttcttatcgacaaacaatagtgctcaagtacaacgagattttgtagtgttttggagttgctgaattagaggcgattgttaattgaataaaattaataaaacggcgacgcgtgactgacgaccaggacggccagcaatgtgcagacggtcggtggttgaaattgctggcaggactcagaaccagaccgcaaggatcaacccaatcaaggagcagcaattgcagctgtgaatgcatcagcgcaactggcaaccggcaactggctactttttatatatacacatccagaacgaaatgcgtttttgcagctcggccaacaaggagatcagcacacggatagcagttgatagatgaactaaagcaaatgccctccaattgcagcttttgatgcaaaacttaaggcaggggcccaacacagaacccaacttgactgatagtttaaactacttactacaaagtaatcgaacaacataattacaaaaacgaaagggctgcaataaatttttaattattgttaagaacaactcgttaattgccaaatatgtgttgcctgatgatctaaagctgaacaaaacttaggaacatatatatacacacacatatatatatatagataataataatctaacattaatcctaaaaaaccgccacgaaaagctcaagatcaagagttagcgccaggagacacttgcttaagccatgggcaacaaatgctgcagcaagcgacaggatcaggaactggcactggcctatcccactgggggctacaagaaatccgactacacctttggccagacgcacatcaacagcagcggcggcggcaacatgggcggcgttcttggccagaagcataacaacggtggctcgctggactcgcgctacacgcccgatcccaatcatcggggtccgttgaaaatcggcggaaagggcggcgttgacatcatcagaccacgcaccacaccaaccggtgttcctggtgtcgtgctcaagcgcgttgtcgtggccctgtacgactataaatcccgcgatgaatccgatctgagcttcatgaagggtgaccgcatggaggtcatcgacgacaccgagtccgattggtggcgcgtcgtgaacctaaccacccggcaggagggcctcatcccgctcaatttcgtggcggaggagcgcagcgtgaacagcgaagactggttctttgagaatgtgctacgaaaggaggcggacaagttgctgctggccgaggagaatccgcgtggcactttcctcgtgcgaccttcagagcacaatcccaatggctactcgctgtcggtgaaggattgggaggatggacgtggataccatgtgaagcactaccgtatcaagccactggataatggcggctactacatagccaccaatcagactttcccctcgcttcaggccttggtcatggcatacagcaaaaacgctcttggcctgtgtcacatattgtcgcgtccctgccccaaaccgcagccccagatgtgggacttgggtccggagctgcgcgataagtacgagattccgcgctcggagattcagctgctgcgcaaactgggacgcggcaactttggcgaggtcttctacggcaaatggcgcaacagcatcgatgtggcggtcaaaacgctgcgcgaaggcaccatgtccacggctgctttccttcaggaggccgcgattatgaagaagttccgacacaaccgcctggtggccctctatgccgtttgctcgcaggaggagcccatttacatcgtgcaggagtacatgtccaagggcagtctgctggacttcttgcgcgagggcgatggccgctacttgcacttcgaagatctcatctacatagccacccaggtggccagcggtatggagtatctagagtccaagcagctcatccatcgcgatctggcggcccgtaatgtgctgatcggagagaataatgtggcgaagatttgtgattttggactggcgcgtgtcatcgcggatgacgagtactgccccaagcagggatcccggtttccggtcaagtggacggcgcccgaggcgatcatctacggcaagttctcgatcaagtcggacgtgtggtcctatggcattctgctgatggagctgttcacgtacggacaagtgccctatccgggcatgcatagtcgcgaggtgattgagaacatcgagcgcggtttccgcatgccgaagccaacgaatcactacttcccggacaacatttatcagctgctgctccagtgctgggatgctgtgcccgagaagcggccgacattcgagttcttgaaccactacttcgagtccttctcggtcacgtcggaggtgccgtatcgagaggtgcaagactaa

SEQ ID NO: 26931 - protein, 552 aa, DROSOPHILA; identical to SEQ ID NO: 123

SEQ ID NO: 26932 - DNA, 7818 bp, DROSOPHILA
cacttagacttttttaagaagcagaacatccgcgggacgggtgtgtccaaaacacaagatttcaattaccatcagttgaagtacaagcaggcgctctacttggccactttgggtggcgccaaagcgctgtccctcgatcacttgaccggaaactttgctctagggaaggatttcgatgctttgttggtggatgtcagcgtcgtcgataaacccttgcggaggctgagcgtcgatgagctggtggagaagttcatttacacaggcagtgaccgcaacattgtagaagttttcgtggccggcaagcgtattaaacagggataccaatgagtcacagagcagttctacctttaacagtggcatttcacaaggaaacgtatagagaatttatttttatagtggcaaacattaaatgctgaaacggaatttagataacctctaatatgcttatttatgtacacagctaaaaagtaaaagcaaatggttttttactagttttacattttatattcggaacagctatgtacaaatgccatactttttgcttccatcactttatagattaatcatataatcatatattgactaatcggtcaagggcataccgcaattaatctaattacagcgaaaaagtgtatattaatatacacgaataattgatctctattgtttgatggataaggcgtgaaatcattgggtagtcgccgaagtctgaaggctttgttcttaactttccgacgttatttttgggcggactgttgttggatgcaatgggaatgttggattcgggttttctgttacgcaaattaagtagaatgtcctcgggcgttcataatttttaaagtttgtttgagctatctaaattgcatacgcatacatatgccaatacttcaactttaaagattaaagctcacacttttacatgaatttacattagattcagctaagagtacgaaaatacgggctaactgtgatatatatatatgtagatataagacgcgttttacgcattaaacatattttgctgcgtggcatcgttttcaaaatctgtccatgcgttgtttagttccataaatataagcttggcaatctcttcattctctgttccattatgctaaaaatagattgcattaacataaaccacctagtttttgcatacatcttgtcacataccttatcaggatgcactgctaggcaggcgcgacggtatgctttcttaacctcggtcggtgtcaccatggtggacatctcgcagcgctgccacttggcattgtcccacaacactgtgtgcatagagcagagaagcgcacggatgttgtttttcttaccatcagtctgcaaattagtttagttttaatttactaacgacgaagtttttttcttgtaagttttcgtttgcacatacccattccataatccgcactttcttcgggtccatatccttgaacaaatcttccttgcgcatttcattgatggatcgtggacactggttcattttgctgccaaaggagtatccttgttggcccagaatgtcagcaaatatgtcagagttcttggacccgccagtgcccggttgctgggctgctttctgagaatcaaagtgaagtcgactgtagtctggtcttgattgagcaggtaccgcctgtggctgcgtcggcgtcctgatagacgatgtcgagggcagagtctgcggtgtcggcggtgtatgcataaacgttgcttgtggttgcgaggatggcgatggcttgtgagtggggcttgagaactgagtaggctgcggactagtgttgacgggagactttccacttagcgtgctgcggttaaagtttaagttgagccctgtcgccaggtcggcgatgttcgcaaatggatctgcagatgcccttgccggatgagttggtgaaggattggtggtagccgctggctgagcaacaaaagttggtaaggagccaacgaaaggtggaaagcctgatggcttcatgctgggcacgccaccttggtccacagatccaaatatgtcgaatgggtcattgtttatttttggttgcggctgctgcagtggcggtggtggcagtatgtcaggaattggcgcagatcctatgcccgtagagtcatcatcaccgaaggcccctagcaagtcaaagctggcatctgtgctgggcttagcgctggttaacggatctgctgctggtacgtcactgggctgctggtttaaattgagcaagtctatgggcggagatggctctggcatgggcgaaggcagttcgtgggcggtctccgtgacgtcgggcaaaacgagcggagagctgacgcgatcactcttgcgggcacctggtggtggtgaggaacgcgtgctaggcttggttactagaacacgcaacaaaattaaccataatgcacagagccaacgagcacacgcacttaccaaaattgtcgagcatttctgcatactccaaatctgagctgaacaaagcggcgggtgaccgcttgggcttggctggcatccatggtggcttatggctgggaggtgattccgagtcagtaacagccagagaaagtgaaacgcagaaccgaggtgtcacctgctcagggtctggcagatcatccaagtcctggtttgtgaatgtaatcaacgtttctggttcggggatgaatcccgtgttgaattggaactgacatatcttgaggccttgtggtcgcaccattcctttgcgggcgtgaaataataccactgtcacatcaccgcatgcggtcaagttaatcggcagaactattttgccggggccggcctgatacaacctgcaagagttggtcaaccaaaagtaatttacaaatatgtcttgctctaattcttaccgcattttttcatagtcctgtagagtgctgagtagcaagtttccattacaataaacctccatatagatcctacagccgtcgcgtgccttggtcattctgggcacaggctggcagctgagtgaaacaagggttgtgttcttatagtgcggcagcaggggcgtgggccgcaggatgtcaccgaagtaatacaggtaacggaactcggaggggcggaggttaatggtatgccgcttaacggcgaagacttgcaccgcgtcctccggctcccgcagcaaatctgcatacataagaagcgcgcatataacggtggcagcagtgcatccacccgagtctccagtctgcacgataacgacagatttggggtccgcatttagaaaattgtacatgtcggctgatacggtaaaaaggccctaatgaaaaaatcaagatttcatttgtatttcattatataagagtccttaaatgtaaaaatgtttttcaagcgcgaagaaaacaaaattttttcttttcgatatacaccaaaagttcgggcacatacatttgataccagctaaaacataaacccaactgttttcggtcatgatatgtacatatgtcaaaggttggtctttacacaataaacctactgctgtgttcataaaaataacagtgcgagggaaactatgtaatacaaaggtatttttgaatgtcccttttgggaatcgactttttattccacttattagtgtaaaatggaatggaacgttaagtcccgaaattttcaatgttttctaaaaagtgagggaaataaattaaaaaaattatattttagtgggtagacaacagaactgctcccaggagaaaagaatgttaattcttaagctaagaaaggacggaaaaacatataaggacattaaaaaaacccttcaatgttctgccaaaatggtattcaatgccattaaatatgaaaggaagcccgaaaaccgtggctccaaacgtaaaaccacagatatagaggatccacgcttagttcgttacagcaaagtctatcctttcgcatcctctagggtcataaagtctgagctgaacttgggaatcagtgacgttacagttcggggacgactacttaatcaaaatttaagtgcgagaagtccacgaaaggtgcccctacttagcccaaggcatattcaggcaaggttaaacttcgctaaaacctaccgaaactggtcagtcttcaaatggcgtaatatcttttggactgatgggtcaaaaatagttatatttggtggaactggttcactacagtatatctgacaaccaccaaacacccaaaaacgattgaaaacctgtggggggacgtctaaggttcagctttggcaagttgtgcaggatgcatgtgcaaaaattacccccaaacgttgccaggaccttatgccgcgtaggtgtaaggctgtgctggctaacaaaggcaatccaaccaagtattagaccctaattaacacattaaaaataaaaactatgttagtcacgttgaattttgttactattttttcatagcactgctatttcattgaacaccagaatttctgcctattatgttgttttaatctatatttttgaaactattgaagaaataaaaatgaaacatttgttgaattgtatgaaattaaatacctaatgatcatataaaaaaaagatttcctattaaaactttgaatcataggattttttatcttaaactcgcaggacccaagcactgctatttttatgaacacagctgtacatggtcttaaacttatctcaagccgtgattaaattcctgcctgaaacttcacatacctgcagattaggagcatgtgcctgtgggcacccataaaccgaacctgcctcaactgttcgcacgggtggcggtagccgtggctctgttcgttggccaaagttgtaaatgcttaatttttgtgggacaaatcggctctccagagatagtcggacgtcttcgatgttgttcgtcttgtacgtcgactcgaatccgtcagaggggcagggcattaccaggatgcgagaggtaatgtggcttatatcaagatcgttgcgagcaagagattgctgcattgtttgcatcactttggtggacgtatctttaatgttctttaaaagcgttccagcgccaccacgcagtgacgacagaagactgccgtgtccattataagatgatggtatggcggcagaaagcggttcggtgtaaacctcagagtaagcagaacttttgagaggactttcggccggaagggactcgatgggcattatatgaaggtctagaggtcctttgagcgaccaattgtgtgtctcagcgagggctgcaaggccctccagcaccatagtaatatccaggcgctcgaacgggttcacttttaaacagccacggattatatcgctgaagcactggtactgaggatctggcggaagcatgtaattggcgttaatgatccgcagctttccgccatcctcgtagggatgcttgcggtagcacaggaagtagagaatgcatccgagagcccatatgtccactttgggcccaatcgggttgttggaccaagtgtcgagcatctcaggggatcggtacatcggagtagtaacagtgtttagctggtcctccagcatgctgcgctggttggcgctccactcaaacgtgggcgacaggacctccgtgctggcggacccaaagtcgcacagcttgatctgtttgtcgttgccaatgagaaagttctcaatctgcaatcaaataggattagggtattagtctgttacttccagctatggttggagaccaacctttatatctcggtgggctatcggcggtgactgtgagtgcaagctggccacagcccgcgccatttggtagaagatgcgcagaacacaagtcggattgaatggagcattgtttgttctgaagcagtccaccagagatccgcctgacaaggatagaaatccatgtgctcaaatgttcacgtagtatgattggacgccctagggcgtcccttacctttacacagctcggtgaggagcaagtactgggctcccaattgagttgatggggcggtataactggaacccacaaaggcgacaatgttctcgtgccccgacagctgcttgtggatgttgatctcgttgatgatggcggtggaggcttgcatgtcagccccgatcagacgcttgagggcgtattctgtgccagtttgcacatcttgggctacatacacgaaggcgtatccgcctgaaaaagggggtggaagcgagagacaagtagataacgaggcacagataaggccctgcctaagtgctaagtgcggcacgctcggaggaaggggttgaccggctggtagcctgctatatatttacgaattctgtcttccagctccctgcagagctacgaactttcagccaccttcaggccactgttgttcttatataagaacttgttaaaaaaaaacccgatcggtttaatgtgccatggctcgcaggtgggcaccagcggtaacgcgtaaccgtgatggtggcaatgcactatcgccacaattcgtccgttggcttggctcaagcagagctgcgcctctcgagctcggaaagcgcaaacaagaagcatttaagttcttggatcggcctggtggcttcggcttcacttcctattgatttttccacccacgttcctcaccttcggcgatgacacacttgatgcgcagcctgtgtccagcgacttcaacgacctggcccacgaagtcattgtccagcctgccaccgagggcctctggtgctccgtttcctgcagctccgttgacctcgctagaggagaagtagttgaggttgagcgacttaaagaactcgcccattttggtggtggccaatgctagaaggctgtaatcgacaagtgatacacctaaaatatctggcgcccgttaactgaactaaaacattttcgtagcgccgtggccacaaaaaaataaaaagaatccagggctgcggaggagcaggttcctcagcagggtggagcggaatcagtttgctccgatagcttgatcgcgcaggcctggctcaccatcgatatgtggcgctgtgctcttatcgatatttgacgctgggctcttatcgatgtggcgcgcggataactagattatgaatttcgactaaatttagagtgcttttaagcaaacattttgtatgttgactcttcaaaattcagacgtttaatcctggctttaagattgcacctgaggtgattgtattatatttaaaatgcgtgcagtgccaacgcccttgcgaggttttaagagatcacagtttttgtacgagcagtcatgtcaagatatatgctctaaagagttccttccgctagttcatactcttcaacaagtacccatttagcttgatacggttaaaagagcgcacacaaccacatttatcagaggtctagaggtattgcatttttgactggggctgtgacagctttgaaagaaaataaaatgtaattgaaaggttaaacacttttttcgaaaagtcattcccctttgagtcgcctgagtaaattcccgcatttagctgtgcatcaagcgtgcatgtgtctttgagccaattcaaggtccagctctgaagtttgagtttcctatgtacattgtgccaggtagagttggctgattgaagtcaacagctaaggggaaacccaggggacaaccgctgcaacagctggccgtcggaatgaagaaatggagtatgactagtaagcctttggggcacctcccctccgtggaacagcaacaagttggtaacggcagtatatttacacatctgtctttggataattgagagctgtgttgcgctacgcttgggccgctggcgaatacggatagttacagatgaccgatatggccgtaagtttgcgcaaaccgagctccgcttattttggacattgaagttaagcttgcaatttgctgt

SEQ ID NO: 26933 - DNA, 3597 bp, DROSOPHILA
cacggcgctacgaaaatgttttagttcagttaacgggcgccagatattttaggtgtatcacttgtcgattacagccttctagcattggccaccaccaaaatgggcgagttctttaagtcgctcaacctcaactacttctcctctagcgaggtcaacggagctgcaggaaacggagcaccagaggccctcggtggcaggctggacaatgacttcgtgggccaggtcgttgaagtcgctggacacaggctgcgcatcaagtgtgtcatcgccgaaggcggatacgccttcgtgtatgtagcccaagatgtgcaaactggcacagaatacgccctcaagcgtctgatcggggctgacatgcaagcctccaccgccatcatcaacgagatcaacatccacaagcagctgtcggggcacgagaacattgtcgcctttgtgggttccagttataccgccccatcaactcaattgggagcccagtacttgctcctcaccgagctgtgtaaaggcggatctctggtggactgcttcagaacaaacaatgctccattcaatccgacttgtgttctgcgcatcttctaccaaatggcgcgggctgtggccagcttgcactcacagtcaccgccgatagcccaccgagatataaagattgagaactttctcattggcaacgacaaacagatcaagctgtgcgactttgggtccgccagcacggaggtcctgtcgcccacgtttgagtggagcgccaaccagcgcagcatgctggaggaccagctaaacactgttactactccgatgtaccgatcccctgagatgctcgacacttggtccaacaacccgattgggcccaaagtggacatatgggctctcggatgcattctctacttcctgtgctaccgcaagcatccctacgaggatggcggaaagctgcggatcattaacgccaattacatgcttccgccagatcctcagtaccagtgcttcagcgatataatccgtggctgtttaaaagtgaacccgttcgagcgcctggatattactatggtgctggagggccttgcagccctcgctgagacacacaattggtcgctcaaaggacctctagaccttcatataatgcccatcgagtcccttccggccgaaagtcctctcaaaagttctgcttactctgaggtttacaccgaaccgctttctgccgccataccatcatcttataatggacacggcagtcttctgtcgtcactgcgtggtggcgctggaacgcttttaaagaacattaaagatacgtccaccaaagtgatgcaaacaatgcagcaatctcttgctcgcaacgatcttgatataagccacattacctctcgcatcctggtaatgccctgcccctctgacggattcgagtcgacgtacaagacgaacaacatcgaagacgtccgactatctctggagagccgatttgtcccacaaaaattaagcatttacaactttggccaacgaacagagccacggctaccgccacccgtgcgaacagttgaggcaggttcggtttatgggtgcccacaggcacatgctcctaatctgcagggcctttttaccgtatcagccgacatgtacaattttctaaatgcggaccccaaatctgtcgttatcgtgcagactggagactcgggtggatgcactgctgccaccgttatatgcgcgcttcttatgtatgcagatttgctgcgggagccggaggacgcggtgcaagtcttcgccgttaagcggcataccattaacctccgcccctccgagttccgttacctgtattacttcggtgacatcctgcggcccacgcccctgctgccgcactataagaacacaacccttgtttcactcagctgccagcctgtgcccagaatgaccaaggcacgcgacggctgtaggatctatatggaggtttattgtaatggaaacttgctactcagcactctacaggactatgaaaaaatgcggttgtatcaggccggccccggcaaaatagttctgccgattaacttgaccgcatgcggtgatgtgacagtggtattatttcacgcccgcaaaggaatggtgcgaccacaaggcctcaagatatgtcagttccaattcaacacgggattcatccccgaaccagaaacgttgattacattcacaaaccaggacttggatgatctgccagaccctgagcaggtgacacctcggttctgcgtttcactttctctggctgttactgactcggaatcacctcccagccataagccaccatggatgccagccaagcccaagcggtcacccgccgctttgttcagctcagatttggagtatgcagaaatgctcgacaattttgtaaccaagcctagcacgcgttcctcaccaccaccaggtgcccgcaagagtgatcgcgtcagctctccgctcgttttgcccgacgtcacggagaccgcccacgaactgccttcgcccatgccagagccatctccgcccatagacttgctcaatttaaaccagcagcccagtgacgtaccagcagcagatccgttaaccagcgctaagcccagcacagatgccagctttgacttgctaggggccttcggtgatgatgactctacgggcataggatctgcgccaattcctgacatactgccaccaccgccactgcagcagccgcaaccaaaaataaacaatgacccattcgacatatttggatctgtggaccaaggtggcgtgcccagcatgaagccatcaggctttccacctttcgttggctccttaccaacttttgttgctcagccagcggctaccaccaatccttcaccaactcatccggcaagggcatctgcagatccatttgcgaacatcgccgacctggcgacagggctcaacttaaactttaaccgcagcacgctaagtggaaagtctcccgtcaacactagtccgcagcctactcagttctcaagccccactcacaagccatcgccatcctcgcaaccacaagcaacgtttatgcatacaccgccgacaccgcagactctgccctcgacatcgtctatcaggacgccgacgcagccacaggcggtacctgctcaatcaagaccagactacagtcgacttcactttgattctcagaaagcagcccagcaaccgggcactggcgggtccaagaactctgacatatttgctgacattctgggccaacaaggatactcctttggcagcaaaatgaaccagtgtccacgatccatcaatgaaatgcgcaaggaagatttgttcaaggatatggacccgaagaaagtgcggattatggaatggactgatggtaagaaaaacaacatccgtgcgcttctctgctctatgcacacagtgttgtgggacaatgccaagtggcagcgctgcgagatgtccaccatggtgacaccgaccgaggttaagaaagcataccgtcgcgcctgcctagcagtgcatcctgataagcataatggaacagagaatgaagagattgccaagcttatatttatggaactaaacaacgcatggacagattttgaaaacgatgccacgcagcaaaatatgtttaatgcgtaa

SEQ ID NO: 26934 - protein, 1165 aa, DROSOPHILA; identical to SEQ ID NO: 327

SEQ ID NO: 26935 - DNA, 3773 bp, DROSOPHILA
tatgtgaaattccagagtctttggcgtcctgtcctacggagttaggaccagcttcttttcagttcacatgtccgatttaccttaaggtaaaataatgtataattatgtatacaaaaacgagttaaaccaatttaccttaaattatcgtttctgtgagtagtgtttgttgcttattgtaaaataaatccattacctgtaattattattgaattaaattccaaaatatttacaatttttttttaaaacaagcactcaaaatcgcgtctacttctcacaaaagtctataggcaagtgatctgcaaacatgttctatgtacattacaaatttaaaatttaaatttaaatttgcaattaaataaaaaatcgcatactgagaccttcggttagaaattaaaaagcgatgaatttgttttcaaaatcatcgcttattcctcgttatgattaagaacattagcatcgctttaaaattttaagagagagatgatgtaatattttttaatagcgatgaattgtgggactacagggtaggtaaaggttacatatgtacaggtgcgagcagtgcaaatatgtttattctaatgaaatcttagactaactgtaaattatataatggctatatttcttttacccgtcactcttactcttctttacttccagaaagggggttttgtcttagctaaacatatgattaatgtattctatgttttttcaatattcattccaatatacaattttacaattaatggttttgcaacagctattttgaagttaattattgcttgttttgtagtttttaccgataaatcacacgtgtgcaagcgatcgcttattaaaacagtaataagtaataatatttaaagtaacgaccaaacgattgggaataatctttccagcgatttaaaccttgaaataaaaagtaagtgtcatccccgtatgattatgcgcacattcgcagggcgacgcgtgcacctaggcgagagttttaaaacttgttcagcggatcttgatcattacattctcaagtctgtcgtacagcacgtttaagcccgctgatagtaaatcagagcaatggcaaccgtgtttcttggaactgtcgtgcacaccaagtcgttcagcgagtttgagtcctttgaaggaggattcctggcagtggacgacgctggcaaggtaggcaatttaatgcccagaacaaaacaatgagcaatgaacaatttcgctcacagataataggagtgggacaagactaccatgcgtgggcaagcagcaatccggcccacgccaagggtctgaccgaggttcacctgtcggactaccagttcctcatgccgggcttcgtcgactgccacatacacgccccgcagtttgcgcaactgggactgggactagacatgcctcttctggactggttgaacacatacactttcccgctggaggcgaagttttccaaccaccaatacgcccagcaggtctaccagggtgtggtcgtaagtagtacttgggagcacacaaacgtcttatcgatgggtcgcaccggccgtctatttttattagctgataatgataatattacaccccaggaagcaacactgcggtgcggaaccactctggcgtcctatttcgccaccaaccatctggagtcaacgctgaccttggcgcgggaggcggtgcgtcaaggccagcgggcactgataggcaaggtctgctccaactgcaacagccccgagttttacgtgtaagtacagagcgtgacggatttggtctggtcaactcaatgttgttgctctgcacagggagactgcggaagagtcggtcagtgcaaccctggctttcgtggagggcgtgcggaagctcggcagcccgatggtgatgccaacgattacgccccgctttgcccttagctgcagcaaggagctgctaaagagtctgggcgatatagcaaagcgatttgacctgcatatccagagtcacatcagcgaaaacctggaagagatcgagatggtaaaggggatatttaagaccagctatgccggagcatacgacgaggctggactgctaacgaataaggttaactcttttaggttccagtatgtgtcctttcttaacctttactaccttacagactgtactggctcacggcgtgcatctggaggacgacgaggtggcacttcttaaagtccgggggtgctcggtagcccactgtcccacttcgaacacaatgctaagctccggtctgtgcgatgtccaacggctggtgagcggcggcgtgagcgtaggtctcggcacagacgtttcggggggaaactccgtctcgattcaggacgttctgctccgcgcattggacgtgtcaaaacacttagacttttttaagaagcagaacatccgcgggacgggtgtgtccaaaacacaagatttcaattaccatcagttgaagtacaagcaggcgctctacttggccactttgggtggcgccaaagcgctgtccctcgatcacttgaccggaaactttgctctagggaaggatttcgatgctttgttggtggatgtcagcgtcgtcgataaacccttgcggaggctgagcgtcgatgagctggtggagaagttcatttacacaggcagtgaccgcaacattgtagaagttttcgtggccggcaagcgtattaaacagggataccaatgagtcacagagcagttctacctttaacagtggcatttcacaaggaaacgtatagagaatttatttttatagtggcaaacattaaatgctgaaacggaatttagataacctctaatatgcttatttatgtacacagctaaaaagtaaaagcaaatggttttttactagttttacattttatattcggaacagctatgtacaaatgccatactttttgcttccatcactttatagattaatcatataatcatatattgactaatcggtcaagggcataccgcaattaatctaattacagcgaaaaagtgtatattaatatacacgaataattgatctctattgtttgatggataaggcgtgaaatcattgggtagtcgccgaagtctgaaggctttgttcttaactttccgacgttatttttgggcggactgttgttggatgcaatgggaatgttggattcgggttttctgttacgcaaattaagtagaatgtcctcgggcgttcataatttttaaagtttgtttgagctatctaaattgcatacgcatacatatgccaatacttcaactttaaagattaaagctcacacttttacatgaatttacattagattcagctaagagtacgaaaatacgggctaactgtgatatatatatatgtagatataagacgcgttttacgcattaaacatattttgctgcgtggcatcgttttcaaaatctgtccatgcgttgtttagttccataaatataagcttggcaatctcttcattctctgttccattatgctaaaaatagattgcattaacataaaccacctagtttttgcatacatcttgtcacataccttatcaggatgcactgctaggcaggcgcgacggtatgctttcttaacctcggtcggtgtcaccatggtggacatctcgcagcgctgccacttggcattgtcccacaacactgtgtgcatagagcagagaagcgcacggatgttgtttttcttaccatcagtctgcaaattagtttagttttaatttactaacgacgaagtttttttcttgtaagttttcgtttgcacatacccattccataatccgcacttt

SEQ ID NO: 26936 - DNA, 1511 bp, DROSOPHILA
atcttgatcattacattctcaagtctgtcgtacagcacgtttaagcccgctgatagtaaatcagagcaatggcaaccgtgtttcttggaactgtcgtgcacaccaagtcgttcagcgagtttgagtcctttgaaggaggattcctggcagtggacgacgctggcaagataataggagtgggacaagactaccatgcgtgggcaagcagcaatccggcccacgccaagggtctgaccgaggttcacctgtcggactaccagttcctcatgccgggcttcgtcgactgccacatacacgccccgcagtttgcgcaactgggactgggactagacatgcctcttctggactggttgaacacatacactttcccgctggaggcgaagttttccaaccaccaatacgcccagcaggtctaccagggtgtggtcgaagcaacactgcggtgcggaaccactctggcgtcctatttcgccaccaaccatctggagtcaacgctgaccttggcgcgggaggcggtgcgtcaaggccagcgggcactgataggcaaggtctgctccaactgcaacagccccgagttttacgtggagactgcggaagagtcggtcagtgcaaccctggctttcgtggagggcgtgcggaagctcggcagcccgatggtgatgccaacgattacgccccgctttgcccttagctgcagcaaggagctgctaaagagtctgggcgatatagcaaagcgatttgacctgcatatccagagtcacatcagcgaaaacctggaagagatcgagatggtaaaggggatatttaagaccagctatgccggagcatacgacgaggctggactgctaacgaataagactgtactggctcacggcgtgcatctggaggacgacgaggtggcacttcttaaagtccgggggtgctcggtagcccactgtcccacttcgaacacaatgctaagctccggtctgtgcgatgtccaacggctggtgagcggcggcgtgagcgtaggtctcggcacagacgtttcggggggaaactccgtctcgattcaggacgttctgctccgcgcattggacgtgtcaaaacacttagacttttttaagaagcagaacatccgcgggacgggtgtgtccaaaacacaagatttcaattaccatcagttgaagtacaagcaggcgctctacttggccactttgggtggcgccaaagcgctgtccctcgatcacttgaccggaaactttgctctagggaaggatttcgatgctttgttggtggatgtcagcgtcgtcgataaacccttgcggaggctgagcgtcgatgagctggtggagaagttcatttacacaggcagtgaccgcaacattgtagaagttttcgtggccggcaagcgtattaaacagggataccaatgagtcacagagcagttctacctttaacagtggcatttcacaaggaaacgtatagagaatttatttttatagtggcaaacattaaatgctgaaacggaa

SEQ ID NO: 26937 - protein, 448 aa, DROSOPHILA
MATVFLGTVVHTKSFSEFESFEGGFLAVDDAGKIIGVGQDYHAWASSNPAHAKGLTEVHLSDYQFLMPGFVDCHIHAPQFAQLGLGLDMPLLDWLNTYTFPLEAKFSNHQYAQQVYQGVVEATLRCGTTLASYFATNHLESTLTLAREAVRQGQRALIGKVCSNCNSPEFYVETAEESVSATLAFVEGVRKLGSPMVMPTITPRFALSCSKELLKSLGDIAKRFDLHIQSHISENLEEIEMVKGIFKTSYAGAYDEAGLLTNKTVLAHGVHLEDDEVALLKVRGCSVAHCPTSNTMLSSGLCDVQRLVSGGVSVGLGTDVSGGNSVSIQDVLLRALDVSKHLDFFKKQNIRGTGVSKTQDFNYHQLKYKQALYLATLGGAKALSLDHLTGNFALGKDFDALLVDVSVVDKPLRRLSVDELVEKFIYTGSDRNIVEVFVAGKRIKQGYQ

SEQ ID NO: 26938 - DNA, 7802 bp, DROSOPHILA
caaatgtggcggcagcttgataagcgagagattcgtgcttaccgcagcccactgtacatccatatacgagtgagcatgccagttagccccctgacccccagtcccgtgactgtaattttcctcttagggcgccccccaagtgggttcgcatcggggaccttgacctggcctccgagaagcggtcggtggaggcccagctgcttcggattgagcaagtgttcgcgcacccaaattacaaaaaaaagatgtactatgacgacatagccctacttaagctggagaaggaagtggagtgggtacccaacaagacagaagtgcgaccgctgtttgctaacacgattctctaagactgacggaatacgttagacctgtccgcctgtgggtctttccagagctgcccactacgatagccttcgcaatggggtacggcgcaacgagcttcgccaagcccatgacgaaccgcctcacaaatcttaacctgaccgtagtgccgaacgctgagtgcaacgccgagctgccgcctcttgctgaaactcccagtggagttctggaaagccagatctgcgcccaggactacattctcaacagagacacttgccagggggactcgggtggacccctacaactgaatttgccgggtcggcgccgagggcatagaatacactatcacctaattggcatcacctcatacggcgtgttctgccgcagtagttacccatcagtttacaccagagtgtcttctttcttggactggatcgaacttactgtttgggcctgacagatgcctacatcaggtttgtatgatgttgatgaaatttaagccaaaatatatattaaaagaaatggtatattctttccatttatatttcgattcttcctatggcatctgtgtgtatgtatatggaccaatctagcccaacaactattttcacaggagatatttaaatacattgctacaacattacactagtgaattgtaaaaataaattgtgctaaacagtggccatattgaaatttattttaaagttatattagataaacataggtgttagaaaggcaaaaacaaacatattttttggtaaattttgctgagaattgaatcattggttttagacttcattgttggcatcaataacaagttgcttcatgtcttcatagctgggctggttctacgagaccaagaaaagggttaaaaatacatagaaattatataaatctattgtgtagcgactttacaattaagagaataggccatcagcattagtaatcagcttactgtacaagcaagcagttaaacgaagacaaactctaggtctggtttggatcacgtacctgccaataattatcgtcccagttggggaacatgcgtttgaaaacccttggttccttgccctgggggacgcgaatgatgctcaccgtgtcgaaggagcgggcggtaggctctaaattaaagtaaagctgtaaatcaagaaaagacgtataattagacgtgatagaaagcgatggtgggaaacgagaaaacctttgccgtgtccagaagcttcccattttcctcctcagacacgccatagccaacccaaaggtagatctcatcgccagcatccagtagcattatgtcgtccgagtccaagtcctcttgctcgtattgagcaacttcttcaaccttcaaaaatccaccagagctcagatgacagtggaaaaggcgcgactccagcagtggagctccatcgtcacccaagctgcggtcgtactggccttcgccgtttaattcctcccagaactcatctggctcggcaccctcctccacctgctcgagctcaacgtcgtcccagtagtcagaaaagcgatcaaccgctgcttgtttttcgaaggcagatgcgcccaagccattccaaatgtagattttgtgggactttcccgaatgaaggacgaaggcatcacttgaggccaaagatgagctgtcggcggccacctcactagcatgaacatcactttcgacggtgccgcgaatgcggaaaagctgcgccgtcaccggaagtgcagtaaaggatgttaataacttccccttaaatatcttgtagaagtggcgcggctcgtggccctgattggtctggacaagaagaccatccttggaacctactagaccctcctcaaaagcacgtttcctagcggcagcagaggcctttactccatgccacacataggttagagaaccagtgtccccgttgttagcctcgtagttgtaagtgagcacataagaggcaaatcccaaaagaggaagtttctcatcgaagggaacggtgctgaccacgatctcatcggaaccaggctttgcaacgtactgtgtgatggtttcaataacgttctgaccgtgatccggcatgaacccaaaggcacgaccaccgctcttctttagctgagtcaccacggagtcgatttcgtcatcgtttaataattcatcggagccgatacccagagccgagcgaataaggcgactatgggacattccagcatcacgccaggtgtcaaagtactgcttaaatggggcggactcggagccctctacgatgcggtgaatttgggtccaggccgggtacttcttggtgcgtaggaactcctgcgccttggccatggcgtccgtcttctccttctgagtggcgccttttccgacccacacaaaaatgccagatccagtatccaaaataaagcactcgcgagtgtcgagcatagcctgagtgagtggtttttgtccaatgatgtccaccttcagcttgccgctggcgtcgctgaccttgtagagagaaaccgctgcggcatctgtcctctcgaaggcactatcttcgtcagcagttgactcatcgggcacctggtcagcagagcccgatcccagcacgtcgaagaagtgctgcttatcggcatcagtgctgaagtcgtcgacgatctgaacacgggctcgtccgttatgatcctggtccctgatctggtttgcagcgctgatagcctttagcttctcaacgcgcttggcctgggagcctacgtagacatatatatcgctgccggcatccaaaataaagcaatcacccgtgttcatcgacgacacggaaagattcacctgtcggacgcgcacgtttcgcttgcccttgacctggaatagtcgtgtttctccttgggcgtttgtctctacatgcttgaagccagttccgacgccgccctgttcatagcgaatgcctacaacaacattcagtttaatgaaacgtccaaatcggtttgactacttttaccgtttttgaaatagctcagaaacagctgggactcgtggtcctgcacctcgcgatgttgaacagggccaccattcagcaagtcatccaactggacggtgagaatagctgcagctccggcctcatcggtcgaggtctccaatcccagccagaagtgcacatcccaagacagttttttgtctttcttgttttcaattgtctaaatgaacataatgattcgattttggaaaagtttatgtgaggtattgcagaaaaatgtaaagtttattactaagctaagcacagatgcctttttacatgactttgacaaggttaaaaccttccagttgctaaccaagcagttcactccacgcgtttaattaaaactttaacaattcaaatgcatacttacattaagaacaataaacgagtccccagtgtaaaatttgccgtagttagttttgggatatataacgggctcaaaattctgaaaagataaaaaaaactattacctgatttccagagaagataatttccaaaaatgtctgactgtttggtataaacatttattctggtcatcgcctgattgtacacaaacgcatcgcatctcgaacctaataaatttggccgatgttggagttaattaacaagaaggatcagacgtctaatgtatacaagcaatttccatatatcttctcgggaaagatacattatgtatgtatatttataaacacatggccgccacactgcccgaattccagaatagaagcaaatgtctgccgatctcgagctggcgcgtatcgggcgccatccctccgccttcgtacccttctctcccagccttctgggtgccactgcataagcaccgcacctatcccatcgatgtcagcgcgatctgctccttacttacgcttatttattctattccccgtacccggcaagagaacaactaaatcccaaaatctgactcacctcgatgcgccagatttccaggccgggagtacggccggcgttggcgaaggaaggatgcatcacgcgtctggctgcctgcttgctgttctggccgctgggctgaatttcgccggattgtacgggaaacgcaggacgggcgttgagggtgccggctgagcacagactggacgagagggccaaaaacacaagcaggctgaaagagacaagcaaaaagctattatggcagcttaattgaccaaagataacagaactactctaaaaaaatatatattccactaaaggactcttgcgagtctatgagggttttctcttgattagtatcaccaacaagttgttatagccacgtccgtttctcagcccgacgcaaaatagtttatcagtttttattctatccaaatgatgcgttccgaaaagtcttctttgcaatgcaggtagggtatcacaaaatttgatattaaacaggtgttttcttcgatagttctttagtaaacacaaccgaaactatattttttgaaccagaaagatttcagtctgctacacgaaagcgacttttcttttggataatacaggtttcagggaaaaaggacaataggtggatatggcttacaacattcaggcactctattcacaattacgcgcaactccaactgatacaccgctctgtagggtgttcaagacatgaaattgtgctctctctcagcgcaattaaactagatacacctaaatagtacatccgactgtttatatgtgagtcatgaccataaaaggccacaaactaggcacaccacaactgccacatggggcaaacctggcgaaacctagaaatgaacacaaaagtcgggtgttgaatcacaccgcagccacttttacgcacttactctatttgaaacggctgttttctcgaattggtgttagcgatgtcgcgtacgactgctaaagttttgttaaaattcaggaactgagtacttatcaccccagagctttctggacagcgaactgctcgcttgcattacctggagaggactgccattgtggcggcgccggaggcatccatttcgagtctgcctcttctctggtcgacgaccgagggttccgaggagctttgtttattgttgcgataagtatctgtgagtcgcaaatagcgtatatgcccgatgtgtttgggtacgcgatcttttgtattggcctttatttttgtcgtagcgttggtttctagttcaaacagcggcagttgctcttccagatttaagcagagtgtgtggaaactgcaagtaagagaatcatcagggcaataagagaaggaaagatgttaatattttcgaacgaatcgctgagcactgatgtttaaccgccaacaagtacgcgtatgttatatacagccacccagaaaacaacgtctttaaataataataattgtcttcaacaataagagcttccccaaactcgtttaagctaaacttcctgatggatttcttaaatgtgagttgtagaatgctaaatgatacttaatatttcccgaaaagttgttctgctcaccagctcctctcttgtatgatatcatgtttgtatctcgagtgcgctgcttgatcagagcataatgttaaggagagcaaaaaaaaagtgccgcaagcgtgtaatcgcatattgtcattcagttaattagtttcacctgcgtatgagatcacgactgttttcgtcaagcggcaagcccatttggcccttccttgcaactgggtcacagccaaaaaaaaagaaatcagtttttattgagaactcagtatgggatggaatcatataagatttttaaattatgtcggcaagcacattagttccaatttgtaaaggcttgggagccagtcaggagtacgtcatacgtacttcgaaatgatacctatttgaaatgaaagtgatgggccacagcatgttcggaataatattccgaagccggccataagttggaccagcttgaattggttggataaaggcagttacccattttccagtgccaaaatcatacaaacggattcttggacaaaccgcgcgcatgggtaacatttaaacattcaaatgtgtatccaattattcaaatccaatccaaatgccaatgaagttggggataatttaacggagataaattaaccaaattttgtaggtaccatcaatttaatttgatcatattatacagtgttatgaatttattttttcaagaacacacagcttggtaaaaagctagtggcttatctaatataaaaccgacctcagttccgatgattgttttcaaagcagtagataagacaaatcaacgaccaatttaacgaaatgaactcagcaaaataatagctttgaaagttgttaatgtctatataatcagccttcaattgaaatcatttaggctagtctgaattttactttatactagagtaacctactattctgggcgatgttattacatattgctgataaaacatcatttaatttttggggcacacttacttgtaagtcaatacgatctgcgcaatttctcacgatcccagtgcgatgattgaataaaagcgcttcgaacgacaagcatgcagagctctgcctcagacactaaacgaaagccaaagctcgtcttcgcttttataatatttttcttaagcccgaaacgcgcgcgcgtccggccgagatcgctctctggggttgctgggacgattgataagcaaagcttcgtgcgataagcagcaaactgaacttaaaacagagtgaaaataaatttaaaagttcccagaaaagtatgtatgtatactaatctatttattactattttaatttggtggtggtagtggtttagtaatccgcagcggtgttagataggtagtcgcgacgtcctatgtttgaagcttgcttgttctgaacagcctcaagttttgggcactccgtgatgcgatggcccagaccaccacagtaggtgcagccatgcgagtcacccaggtccaggtgctggtgttcggtctcaggtgccagttcgtccaagaagtccgggacctcttgcttgccctcgattagcaggtgcttcaggtcgagcagaaccgactgctcggtagtcttgtttatcagcgtcgtagccaatcccttagtgttggaacgacctgtgcggccaatacgatgcacatagttttcaatatcgtccggcatgtcgtagttaataacgtgttgcacgttagggaagtccaggcccttcgatgccacgtcggtggccaccagcacatcttttttgcccacgcggtaagcatcgactgcccgcgatcgttcttcctgatcctttccgccgtgaatagccaccgcctccacgcctttcaacagcagatactcatgtatgcagtctacatcctgcttcttctcagcaaaaatgagcacgggcggcgcggtcttctgtaggcagtccagcaaatataccacctttgcctcttgcttaacgtactcaacctgttgggtgacgttcattgacgcagcacctgcgcgacccacatttattgtgacaggcttcacgagagctgatcgagcaaagttctggatcttttttggcatggt

SEQ ID NO: 26939 - DNA, 2932 bp, DROSOPHILA
catgcttgtcgttcgaagcgcttttattcaatcatcgcactgggatcgtgagaaattgcgcagatcgtattgacttacaatttccacacactctgcttaaatctggaagagcaactgccgctgtttgaactagaaaccaacgctacgacaaaaataaaggccaatacaaaagatcgcgtacccaaacacatcgggcatatacgctatttgcgactcacagatacttatcgcaacaataaacaaagctcctcggaaccctcggtcgtcgaccagagaagaggcagactcgaaatggatgcctccggcgccgccacaatggcagtcctctccaggtaatgcaagcgagcagttcgctgtccagaaagctctggggtgataagtactcagttcctgaattttaacaaaactttagcagtcgtacgcgacatcgctaacaccaattcgagaaaacagccgtttcaaatagacctgcttgtgtttttggccctctcgtccagtctgtgctcagccggcaccctcaacgcccgtcctgcgtttcccgtacaatccggcgaaattcagcccagcggccagaacagcaagcaggcagccagacgcgtgatgcatccttccttcgccaacgccggccgtactcccggcctggaaatctggcgcatcgagaattttgagcccgttatatatcccaaaactaactacggcaaattttacactggggactcgtttattgttcttaatacaattgaaaacaagaaagacaaaaaactgtcttgggatgtgcacttctggctgggattggagacctcgaccgatgaggccggagctgcagctattctcaccgtccagttggatgacttgctgaatggtggccctgttcaacatcgcgaggtgcaggaccacgagtcccagctgtttctgagctatttcaaaaacggcattcgctatgaacagggcggcgtcggaactggcttcaagcatgtagagacaaacgcccaaggagaaacacgactattccaggtcaagggcaagcgaaacgtgcgcgtccgacaggtgaatctttccgtgtcgtcgatgaacacgggtgattgctttattttggatgccggcagcgatatatatgtctacgtaggctcccaggccaagcgcgttgagaagctaaaggctatcagcgctgcaaaccagatcagggaccaggatcataacggacgagcccgtgttcagatcgtcgacgacttcagcactgatgccgataagcagcacttcttcgacgtgctgggatcgggctctgctgaccaggtgcccgatgagtcaactgctgacgaagatagtgccttcgagaggacagatgccgcagcggtttctctctacaaggtcagcgacgccagcggcaagctgaaggtggacatcattggacaaaaaccactcactcaggctatgctcgacactcgcgagtgctttattttggatactggatctggcatttttgtgtgggtcggaaaaggcgccactcagaaggagaagacggacgccatggccaaggcgcaggagttcctacgcaccaagaagtacccggcctggacccaaattcaccgcatcgtagagggctccgagtccgccccatttaagcagtactttgacacctggcgtgatgctggaatgtcccatagtcgccttattcgctcggctctgggtatcggctccgatgaattattaaacgatgacgaaatcgactccgtggtgactcagctaaagaagagcggtggtcgtgcctttgggttcatgccggatcacggtcagaacgttattgaaaccatcacacagtacgttgcaaagcctggttccgatgagatcgtggtcagcaccgttcccttcgatgagaaacttcctcttttgggatttgcctcttatgtgctcacttacaactacgaggctaacaacggggacactggttctctaacctatgtgtggcatggagtaaaggcctctgctgccgctaggaaacgtgcttttgaggagggtctagtaggttccaaggatggtcttcttgtccagaccaatcagggccacgagccgcgccacttctacaagatatttaaggggaagttattaacatcctttactgcacttccggtgacggcgcagcttttccgcattcgcggcaccgtcgaaagtgatgttcatgctagtgaggtggccgccgacagctcatctttggcctcaagtgatgccttcgtccttcattcgggaaagtcccacaaaatctacatttggaatggcttgggcgcatctgccttcgaaaaacaagcagcggttgatcgcttttctgactactgggacgacgttgagctcgagcaggtggaggagggtgccgagccagatgagttctgggaggaattaaacggcgaaggccagtacgaccgcagcttgggtgacgatggagctccactgctggagtcgcgccttttccactgtcatctgagctctggtggatttttgaaggttgaagaagttgctcaatacgagcaagaggacttggactcggacgacataatgctactggatgctggcgatgagatctacctttgggttggctatggcgtgtctgaggaggaaaatgggaagcttctggacacggcaaagctttactttaatttagagcctaccgcccgctccttcgacacggtgagcatcattcgcgtcccccagggcaaggaaccaagggttttcaaacgcatgttccccaactgggacgataattattggcagaaccagcccagctatgaagacatgaagcaacttgttattgatgccaacaatgaagtctaaaaccaatgattcaattctcagcaaaatttaccaaaaaatatgtttgtttttgcctttctaacacctatgtttatctaatataactttaaaataaatttcaatatggcca

SEQ ID NO: 26940 - protein, 740 aa, DROSOPHILA
MHPSFANAGRTPGLEIWRIENFEPVIYPKTNYGKFYTGDSFIVLNTIENKKDKKLSWDVHFWLGLETSTDEAGAAAILTVQLDDLLNGGPVQHREVQDHESQLFLSYFKNGIRYEQGGVGTGFKHVETNAQGETRLFQVKGKRNVRVRQVNLSVSSMNTGDCFILDAGSDIYVYVGSQAKRVEKLKAISAANQIRDQDHNGRARVQIVDDFSTDADKQHFFDVLGSGSADQVPDESTADEDSAFERTDAAAVSLYKVSDASGKLKVDIIGQKPLTQAMLDTRECFILDTGSGIFVWVGKGATQKEKTDAMAKAQEFLRTKKYPAWTQIHRIVEGSESAPFKQYFDTWRDAGMSHSRLIRSALGIGSDELLNDDEIDSVVTQLKKSGGRAFGFMPDHGQNVIETITQYVAKPGSDEIVVSTVPFDEKLPLLGFASYVLTYNYEANNGDTGSLTYVWHGVKASAAARKRAFEEGLVGSKDGLLVQTNQGHEPRHFYKIFKGKLLTSFTALPVTAQLFRIRGTVESDVHASEVAADSSSLASSDAFVLHSGKSHKIYIWNGLGASAFEKQAAVDRFSDYWDDVELEQVEEGAEPDEFWEELNGEGQYDRSLGDDGAPLLESRLFHCHLSSGGFLKVEEVAQYEQEDLDSDDIMLLDAGDEIYLWVGYGVSEEENGKLLDTAKLYFNLEPTARSFDTVSIIRVPQGKEPRVFKRMFPNWDDNYWQNQPSYEDMKQLVIDANNEV

SEQ ID NO: 26941 - DNA, 7798 bp, DROSOPHILA
caaatgtggcggcagcttgataagcgagagattcgtgcttaccgcagcccactgtacatccatatacgagtgagcatgccagttagccccctgacccccagtcccgtgactgtaattttcctcttagggcgccccccaagtgggttcgcatcggggaccttgacctggcctccgagaagcggtcggtggaggcccagctgcttcggattgagcaagtgttcgcgcacccaaattacaaaaaaaagatgtactatgacgacatagccctacttaagctggagaaggaagtggagtgggtacccaacaagacagaagtgcgaccgctgtttgctaacacgattctctaagactgacggaatacgttagacctgtccgcctgtgggtctttccagagctgcccactacgatagccttcgcaatggggtacggcgcaacgagcttcgccaagcccatgacgaaccgcctcacaaatcttaacctgaccgtagtgccgaacgctgagtgcaacgccgagctgccgcctcttgctgaaactcccagtggagttctggaaagccagatctgcgcccaggactacattctcaacagagacacttgccagggggactcgggtggacccctacaactgaatttgccgggtcggcgccgagggcatagaatacactatcacctaattggcatcacctcatacggcgtgttctgccgcagtagttacccatcagtttacaccagagtgtcttctttcttggactggatcgaacttactgtttgggcctgacagatgcctacatcaggtttgtatgatgttgatgaaatttaagccaaaatatatattaaaagaaatggtatattctttccatttatatttcgattcttcctatggcatctgtgtgtatgtatatggaccaatctagcccaacaactattttcacaggagatatttaaatacattgctacaacattacactagtgaattgtaaaaataaattgtgctaaacagtggccatattgaaatttattttaaagttatattagataaacataggtgttagaaaggcaaaaacaaacatattttttggtaaattttgctgagaattgaatcattggttttagacttcattgttggcatcaataacaagttgcttcatgtcttcatagctgggctggttctacgagaccaagaaaagggttaaaaatacatagaaattatataaatctattgtgtagcgactttacaattaagagaataggccatcagcattagtaatcagcttactgtacaagcaagcagttaaacgaagacaaactctaggtctggtttggatcacgtacctgccaataattatcgtcccagttggggaacatgcgtttgaaaacccttggttccttgccctgggggacgcgaatgatgctcaccgtgtcgaaggagcgggcggtaggctctaaattaaagtaaagctgtaaatcaagaaaagacgtataattagacgtgatagaaagcgatggtgggaaacgagaaaacctttgccgtgtccagaagcttcccattttcctcctcagacacgccatagccaacccaaaggtagatctcatcgccagcatccagtagcattatgtcgtccgagtccaagtcctcttgctcgtattgagcaacttcttcaaccttcaaaaatccaccagagctcagatgacagtggaaaaggcgcgactccagcagtggagctccatcgtcacccaagctgcggtcgtactggccttcgccgtttaattcctcccagaactcatctggctcggcaccctcctccacctgctcgagctcaacgtcgtcccagtagtcagaaaagcgatcaaccgctgcttgtttttcgaaggcagatgcgcccaagccattccaaatgtagattttgtgggactttcccgaatgaaggacgaaggcatcacttgaggccaaagatgagctgtcggcggccacctcactagcatgaacatcactttcgacggtgccgcgaatgcggaaaagctgcgccgtcaccggaagtgcagtaaaggatgttaataacttccccttaaatatcttgtagaagtggcgcggctcgtggccctgattggtctggacaagaagaccatccttggaacctactagaccctcctcaaaagcacgtttcctagcggcagcagaggcctttactccatgccacacataggttagagaaccagtgtccccgttgttagcctcgtagttgtaagtgagcacataagaggcaaatcccaaaagaggaagtttctcatcgaagggaacggtgctgaccacgatctcatcggaaccaggctttgcaacgtactgtgtgatggtttcaataacgttctgaccgtgatccggcatgaacccaaaggcacgaccaccgctcttctttagctgagtcaccacggagtcgatttcgtcatcgtttaataattcatcggagccgatacccagagccgagcgaataaggcgactatgggacattccagcatcacgccaggtgtcaaagtactgcttaaatggggcggactcggagccctctacgatgcggtgaatttgggtccaggccgggtacttcttggtgcgtaggaactcctgcgccttggccatggcgtccgtcttctccttctgagtggcgccttttccgacccacacaaaaatgccagatccagtatccaaaataaagcactcgcgagtgtcgagcatagcctgagtgagtggtttttgtccaatgatgtccaccttcagcttgccgctggcgtcgctgaccttgtagagagaaaccgctgcggcatctgtcctctcgaaggcactatcttcgtcagcagttgactcatcgggcacctggtcagcagagcccgatcccagcacgtcgaagaagtgctgcttatcggcatcagtgctgaagtcgtcgacgatctgaacacgggctcgtccgttatgatcctggtccctgatctggtttgcagcgctgatagcctttagcttctcaacgcgcttggcctgggagcctacgtagacatatatatcgctgccggcatccaaaataaagcaatcacccgtgttcatcgacgacacggaaagattcacctgtcggacgcgcacgtttcgcttgcccttgacctggaatagtcgtgtttctccttgggcgtttgtctctacatgcttgaagccagttccgacgccgccctgttcatagcgaatgcctacaacaacattcagtttaatgaaacgtccaaatcggtttgactacttttaccgtttttgaaatagctcagaaacagctgggactcgtggtcctgcacctcgcgatgttgaacagggccaccattcagcaagtcatccaactggacggtgagaatagctgcagctccggcctcatcggtcgaggtctccaatcccagccagaagtgcacatcccaagacagttttttgtctttcttgttttcaattgtctaaatgaacataatgattcgattttggaaaagtttatgtgaggtattgcagaaaaatgtaaagtttattactaagctaagcacagatgcctttttacatgactttgacaaggttaaaaccttccagttgctaaccaagcagttcactccacgcgtttaattaaaactttaacaattcaaatgcatacttacattaagaacaataaacgagtccccagtgtaaaatttgccgtagttagttttgggatatataacgggctcaaaattctgaaaagataaaaaaaactattacctgatttccagagaagataatttccaaaaatgtctgactgtttggtataaacatttattctggtcatcgcctgattgtacacaaacgcatcgcatctcgaacctaataaatttggccgatgttggagttaattaacaagaaggatcagacgtctaatgtatacaagcaatttccatatatcttctcgggaaagatacattatgtatgtatatttataaacacatggccgccacactgcccgaattccagaatagaagcaaatgtctgccgatctcgagctggcgcgtatcgggcgccatccctccgccttcgtacccttctctcccagccttctgggtgccactgcataagcaccgcacctatcccatcgatgtcagcgcgatctgctccttacttacgcttatttattctattccccgtacccggcaagagaacaactaaatcccaaaatctgactcacctcgatgcgccagatttccaggccgggagtacggccggcgttggcgaaggaaggatgcatcacgcgtctggctgcctgcttgctgttctggccgctgggctgaatttcgccggattgtacgggaaacgcaggacgggcgttgagggtgccggctgagcacagactggacgagagggccaaaaacacaagcaggctgaaagagacaagcaaaaagctattatggcagcttaattgaccaaagataacagaactactctaaaaaaatatatattccactaaaggactcttgcgagtctatgagggttttctcttgattagtatcaccaacaagttgttatagccacgtccgtttctcagcccgacgcaaaatagtttatcagtttttattctatccaaatgatgcgttccgaaaagtcttctttgcaatgcaggtagggtatcacaaaatttgatattaaacaggtgttttcttcgatagttctttagtaaacacaaccgaaactatattttttgaaccagaaagatttcagtctgctacacgaaagcgacttttcttttggataatacaggtttcagggaaaaaggacaataggtggatatggcttacaacattcaggcactctattcacaattacgcgcaactccaactgatacaccgctctgtagggtgttcaagacatgaaattgtgctctctctcagcgcaattaaactagatacacctaaatagtacatccgactgtttatatgtgagtcatgaccataaaaggccacaaactaggcacaccacaactgccacatggggcaaacctggcgaaacctagaaatgaacacaaaagtcgggtgttgaatcacaccgcagccacttttacgcacttactctatttgaaacggctgttttctcgaattggtgttagcgatgtcgcgtacgactgctaaagttttgttaaaattcaggaactgagtacttatcaccccagagctttctggacagcgaactgctcgcttgcattacctggagaggactgccattgtggcggcgccggaggcatccatttcgagtctgcctcttctctggtcgacgaccgagggttccgaggagctttgtttattgttgcgataagtatctgtgagtcgcaaatagcgtatatgcccgatgtgtttgggtacgcgatcttttgtattggcctttatttttgtcgtagcgttggtttctagttcaaacagcggcagttgctcttccagatttaagcagagtgtgtggaaactgcaagtaagagaatcatcagggcaataagagaaggaaagatgttaatattttcgaacgaatcgctgagcactgatgtttaaccgccaacaagtacgcgtatgttatatacagccacccagaaaacaacgtctttaaataataataattgtcttcaacaataagagcttccccaaactcgtttaagctaaacttcctgatggatttcttaaatgtgagttgtagaatgctaaatgatacttaatatttcccgaaaagttgttctgctcaccagctcctctcttgtatgatatcatgtttgtatctcgagtgcgctgcttgatcagagcataatgttaaggagagcaaaaaaaaagtgccgcaagcgtgtaatcgcatattgtcattcagttaattagtttcacctgcgtatgagatcacgactgttttcgtcaagcggcaagcccatttggcccttccttgcaactgggtcacagccaaaaaaaaagaaatcagtttttattgagaactcagtatgggatggaatcatataagatttttaaattatgtcggcaagcacattagttccaatttgtaaaggcttgggagccagtcaggagtacgtcatacgtacttcgaaatgatacctatttgaaatgaaagtgatgggccacagcatgttcggaataatattccgaagccggccataagttggaccagcttgaattggttggataaaggcagttacccattttccagtgccaaaatcatacaaacggattcttggacaaaccgcgcgcatgggtaacatttaaacattcaaatgtgtatccaattattcaaatccaatccaaatgccaatgaagttggggataatttaacggagataaattaaccaaattttgtaggtaccatcaatttaatttgatcatattatacagtgttatgaatttattttttcaagaacacacagcttggtaaaaagctagtggcttatctaatataaaaccgacctcagttccgatgattgttttcaaagcagtagataagacaaatcaacgaccaatttaacgaaatgaactcagcaaaataatagctttgaaagttgttaatgtctatataatcagccttcaattgaaatcatttaggctagtctgaattttactttatactagagtaacctactattctgggcgatgttattacatattgctgataaaacatcatttaatttttggggcacacttacttgtaagtcaatacgatctgcgcaatttctcacgatcccagtgcgatgattgaataaaagcgcttcgaacgacaagcatgcagagctctgcctcagacactaaacgaaagccaaagctcgtcttcgcttttataatatttttcttaagcccgaaacgcgcgcgcgtccggccgagatcgctctctggggttgctgggacgattgataagcaaagcttcgtgcgataagcagcaaactgaacttaaaacagagtgaaaataaatttaaaagttcccagaaaagtatgtatgtatactaatctatttattactattttaatttggtggtggtagtggtttagtaatccgcagcggtgttagataggtagtcgcgacgtcctatgtttgaagcttgcttgttctgaacagcctcaagttttgggcactccgtgatgcgatggcccagaccaccacagtaggtgcagccatgcgagtcacccaggtccaggtgctggtgttcggtctcaggtgccagttcgtccaagaagtccgggacctcttgcttgccctcgattagcaggtgcttcaggtcgagcagaaccgactgctcggtagtcttgtttatcagcgtcgtagccaatcccttagtgttggaacgacctgtgcggccaatacgatgcacatagttttcaatatcgtccggcatgtcgtagttaataacgtgttgcacgttagggaagtccaggcccttcgatgccacgtcggtggccaccagcacatcttttttgcccacgcggtaagcatcgactgcccgcgatcgttcttcctgatcctttccgccgtgaatagccaccgcctccacgcctttcaacagcagatactcatgtatgcagtctacatcctgcttcttctcagcaaaaatgagcacgggcggcgcggtcttctgtaggcagtccagcaaatataccacctttgcctcttgcttaacgtactcaacctgttgggtgacgttcattgacgcagcacctgcgcgacccacatttattgtgacaggcttcacgagagctgatcgagcaaagttctggatcttttttggca

SEQ ID NO: 26942 - DNA, 2897 bp, DROSOPHILA
cttgtcgttcgaagcgcttttattcaatcatcgcactgggatcgtgagaaattgcgcagatcgtattgacttacaattgcaaggaagggccaaatgggcttgccgcttgacgaaaacagtcgtgatctcatacgcagcgcactcgagatacaaacatgatatcatacaagagaggagctgtttccacacactctgcttaaatctggaagagcaactgccgctgtttgaactagaaaccaacgctacgacaaaaataaaggccaatacaaaagatcgcgtacccaaacacatcgggcatatacgctatttgcgactcacagatacttatcgcaacaataaacaaagctcctcggaaccctcggtcgtcgaccagagaagaggcagactcgaaatggatgcctccggcgccgccacaatggcagtcctctccagcctgcttgtgtttttggccctctcgtccagtctgtgctcagccggcaccctcaacgcccgtcctgcgtttcccgtacaatccggcgaaattcagcccagcggccagaacagcaagcaggcagccagacgcgtgatgcatccttccttcgccaacgccggccgtactcccggcctggaaatctggcgcatcgagaattttgagcccgttatatatcccaaaactaactacggcaaattttacactggggactcgtttattgttcttaatacaattgaaaacaagaaagacaaaaaactgtcttgggatgtgcacttctggctgggattggagacctcgaccgatgaggccggagctgcagctattctcaccgtccagttggatgacttgctgaatggtggccctgttcaacatcgcgaggtgcaggaccacgagtcccagctgtttctgagctatttcaaaaacggcattcgctatgaacagggcggcgtcggaactggcttcaagcatgtagagacaaacgcccaaggagaaacacgactattccaggtcaagggcaagcgaaacgtgcgcgtccgacaggtgaatctttccgtgtcgtcgatgaacacgggtgattgctttattttggatgccggcagcgatatatatgtctacgtaggctcccaggccaagcgcgttgagaagctaaaggctatcagcgctgcaaaccagatcagggaccaggatcataacggacgagcccgtgttcagatcgtcgacgacttcagcactgatgccgataagcagcacttcttcgacgtgctgggatcgggctctgctgaccaggtgcccgatgagtcaactgctgacgaagatagtgccttcgagaggacagatgccgcagcggtttctctctacaaggtcagcgacgccagcggcaagctgaaggtggacatcattggacaaaaaccactcactcaggctatgctcgacactcgcgagtgctttattttggatactggatctggcatttttgtgtgggtcggaaaaggcgccactcagaaggagaagacggacgccatggccaaggcgcaggagttcctacgcaccaagaagtacccggcctggacccaaattcaccgcatcgtagagggctccgagtccgccccatttaagcagtactttgacacctggcgtgatgctggaatgtcccatagtcgccttattcgctcggctctgggtatcggctccgatgaattattaaacgatgacgaaatcgactccgtggtgactcagctaaagaagagcggtggtcgtgcctttgggttcatgccggatcacggtcagaacgttattgaaaccatcacacagtacgttgcaaagcctggttccgatgagatcgtggtcagcaccgttcccttcgatgagaaacttcctcttttgggatttgcctcttatgtgctcacttacaactacgaggctaacaacggggacactggttctctaacctatgtgtggcatggagtaaaggcctctgctgccgctaggaaacgtgcttttgaggagggtctagtaggttccaaggatggtcttcttgtccagaccaatcagggccacgagccgcgccacttctacaagatatttaaggggaagttattaacatcctttactgcacttccggtgacggcgcagcttttccgcattcgcggcaccgtcgaaagtgatgttcatgctagtgaggtggccgccgacagctcatctttggcctcaagtgatgccttcgtccttcattcgggaaagtcccacaaaatctacatttggaatggcttgggcgcatctgccttcgaaaaacaagcagcggttgatcgcttttctgactactgggacgacgttgagctcgagcaggtggaggagggtgccgagccagatgagttctgggaggaattaaacggcgaaggccagtacgaccgcagcttgggtgacgatggagctccactgctggagtcgcgccttttccactgtcatctgagctctggtggatttttgaaggttgaagaagttgctcaatacgagcaagaggacttggactcggacgacataatgctactggatgctggcgatgagatctacctttgggttggctatggcgtgtctgaggaggaaaatgggaagcttctggacacggcaaagctttactttaatttagagcctaccgcccgctccttcgacacggtgagcatcattcgcgtcccccagggcaaggaaccaagggttttcaaacgcatgttccccaactgggacgataattattggcagaaccagcccagctatgaagacatgaagcaacttgttattgatgccaacaatgaagtctaaaaccaatgattcaattctcagcaaaatttaccaaaaaatatgtttgtttttgcctttctaacacctatgtttatctaatataactttaaaataaatttcaatatggcca

SEQ ID NO: 26943 - protein, 798 aa, DROSOPHILA; identical to SEQ ID NO: 309

SEQ ID NO: 26944 - DNA, 2743 bp, DROSOPHILA
ttttgtcaatgtcaatgttataaaaactatctttatgaaatacttaagcaaagcttataggttcaaaaaattttaataaaaaagaatacttcaaaacttcaatatttccaaaaaggcacttaattaatcaaacccctaatggattaaaatgtttctgaagcaccacttagacacttgtctcttgtgttcatatctaaaaccagattgccctattaaataagtgttcccagccattatttcacccccattttatgaaggaggcggttggttagcatggattctcaattacggatgcaggcgtctgcggtttatcacttccgaaattgcacaataaagtacaacttacaactggtcactggacctgtgtacatatatttcgaaacccgatttttgaagctaaacatggcaccgcacttccattaggaatatatctacaatcaatcgagtttttatctgcggattacaaggggaatggaattacgcctatttctttgagggaaaaacgtaaaatgctcttttataaagtcaagtgcttttgtttcttataataaacaaacaattgagatatctacgccccagtgcagaaaaagggggagaaaatatcttgtgtaccataaaaatacaaattccgagcagagatctcaacgaaatgaaaaagccaaatagaatagtagaactataactatatatcaatgcaaaaaaacaaacaatacgccccttatagcgggaacattgtctttatctatatctttgtacaacaaaaatcagcaagccaatatgttttttgaatgaaatatcaattaggttatggtatcttaactcatttacctacagtaaaaacaaaaaagatttttaataatttttttgtttgaatgcatgaaaagcggcaaaaatatgtatgaattgttattccgccggataaacttaaatccaaaattcaaagcgatcaatttaaatatatgtagtgattggtttgttattgaaagcatgacaaagtaaattactctcttacttgaatctctgatttcaaacagtgcttcttttcgctacagatctttcgactgaccggcttaagttcggctcgaaatccgccttttggatccagatctccatcaagaacattaactaaatagtttatgtacaatatggccaacttcaatgttttaatctgtcaagtaaaccaagcaaacggacacaaacaaacttcaaatttataaataattgaataagttattataaaatatatttttcgctggctattttatcttaattcttaaacaaagtaaaagtagaatatagttaagattgacttaagtaggaaacattaaaatccaaccttcatgtgcttattggtgtatttaagtattaaattcaagattatctatccgtcggtgaagttacctttgataatttagtatctgtaggaacgttgggaatcttttctcgcagataggaaaacgcattgtttatactttgggttcgccttctctcctttttgttagctgtattacgtttcttaacaatccgagtattcgaagttggcacataacctaggtgacttgtgttatatatttgttgctgaacttgactttcggagtctgaaatatttggaaaatatatacattattttccatacacacgaaaatataaaataaaagtcgcttttgtactggaattggtaccacaaatcactgtcccaattttatttaaataacagcgaagtaagaagaatgatttaaacatttacgtttcatgtcgaacatgttggaagtattataaattgagttataatacatggttgagtattcgcacgtcaaggcaacggaattcttaaacattttctaatttaacgtaattaaattcaaatcaaattcgcggcttaagatcgacattttcgcagatagtgcgtcgcacgtaaaactcgtctttgatgtctggcaagtaactgaaaaactttttcacttgtttagtgaatgtgcgccgtcgagtgaacaacatctggatatcctccctccaaatccaccaatcgcaatcgccgacgttttgcgtcgaccaatggtgggcacttcaagatttatatgtatgtatgtactcccgtgtatacatacatccatatatatccggaatatgaactgcctttcatggtctagtgatccgtagttctctagatggttcagtcctgtttctggagtcaccttgaaaacttctcctaacaaaaagcacttcctaattgttacaaactttttgtaaaaaaaatataagctacttggtatattagttatagaaaaccacctatctttattttttcctgttatatatgtaaagcctacccatattaatatcataaaacatatttttcaacaaaccaataaccattaataggcacaaaatccatttcacatgtgatttttacaaaaattttattgcattcatttaatttattgataaatttgctctaatggtacatcattatatctgtgctttggtacagacacatataggcatcgcaaaaaatacgcttggcgtgttcaggtaatactttatcgttcgttgaagtttcatttatagatcgtgcgccttcttccgagagccactgtgttaattctggaacacacgtaatttcaggtatattgtatccattctgttcgcctgaaataacatttgcgtaagtataagaaacttgttaggttaaaactaagattttgcttgccttttcgatcagccattgaatcgaagaaacacc

SEQ ID NO: 26945 - DNA, 468 bp, DROSOPHILA
atgtttaaatcattcttcttacttcgctgttatttaaataaaattgggacagtgatttgtggtaccaattccagtacaaaagcgacttttattttatattttcactccgaaagtcaagttcagcaacaaatatataacacaagtcacctaggttatgtgccaacttcgaatactcggattgttaagaaacgtaatacagctaacaaaaaggagagaaggcgaacccaaagtataaacaatgcgttttcctatctgcgagaaaagattcccaacgttcctacagatactaaattatcaaagattaaaacattgaagttggccatattgtacataaactatttagttaatgttcttgatggagatctggatccaaaaggcggatttcgagccgaacttaagccggtcagtcgaaagatctgtagcgaaaagaagcactgtttgaaatcagagattcaagtaagagagtaa

SEQ ID NO: 26946 - protein, 155 aa, DROSOPHILA
MFKSFFLLRCYLNKIGTVICGTNSSTKATFILYFHSESQVQQQIYNTSHLGYVPTSNTRIVKKRNTANKKERRRTQSINNAFSYLREKIPNVPTDTKLSKIKTLKLAILYINYLVNVLDGDLDPKGGFRAELKPVSRKICSEKKHCLKSEIQVRE

SEQ ID NO: 26947 - DNA, 2961 bp, DROSOPHILA
taccctggcgtggccgcccttttgagatctccacgcgcagctgggagccgagcagctcggatccgttcagtatgtcgcacgccttttcggcgtcgtcgcggtgctcgaactcgacgaacgcaaatcccggcggattgaaggctatccacaccgaattcagcttgccatactttgtgaactccccctccagatcatcctttttcactttgtcggtcagattgccgacatacacccgtgtcccgcgctgatcacccatgctggacatctggattcactgtttctgattcgttttcggagttatcctgcaaatcggatagctgccttgaaaaataaataatcaataagttatcaccaccggacaatttagcgtttgtatctatatcaacttttcgaccagggtggttaaactcgttgcaaaaatgctaattttcaaaaatatcctcgcatttggaacactgagaatggacgtgtgttgggatgtatttatagtttaacggccccgtaaaaagggacttcccgctgctctagtgacttgtatttttaattatttttatactttgtgctgggaaatgtatcatggtaatctgaataatacgtcaatttaatttatataattttataaatatttgtatgatctttagtaaagtaaataaagtaaaacaatatataaaatgtttgttaatatatagccgtgtacttttatattttcttcaaaccccaaataatgaataattatattgaacatttattaattattatttaattaatttataatttaactattatcataatttaactatttaaatataatgactattatcattttaagtcattaaaagaaaatttgttacgatttaaactttatttatatttttgttcttaaatataaaatacaaatagttcccttaatgtgttccattccatcgtttctgttaagatatatttcgattggcacctttgtgtgtagtggttttgtttattgttaccttgagtatttacgaaagacgcataataacaaagagttgcaaagttgttgtattatttgagagttataatggctgatatggagatacagagcaacaaaatgtcaataacggaggaaacacaagtggtaatatattattaaatataaaagatgtggtctttttgtttgaacatgatctgaattgttctaatgcgcagtaaggccttgcgtgtatgtatatacacatatataagctatcttctgtgtatgcgtgtatatacatatgtgatttttatcatgcaaaagcgcctattttcaaaaaagattttaagtttgacttatcggaactaaatttttgcgaataagaatattgaaagcaaattgtttttgggatatcgtcaaatatttacattttatattatatttataagcagacgcgcaaggaatgtggaaaaaggggacgaaaaccaggaagaaagacgtctactgaaaaattggacatgaaagccaaactaggtaagaacaacattaatttccacttataatacttaaacaacggtattatttttaatagtaacaaagtttccaaacactaatacatgttatttcctatggaattttatataacgtgtattttcccttgcagaacgcagcagacaaagtgccagggaatgccgggcgcgcaagaagctgcggtatcagtacctggaggaactggtggcggatcgggagaaggctgtagttgctttgcgtacggaactggagcgcgtcggtatataacttatcatgccacgtccaaccaatttatttattctcatctttattgcagttaattcaatggaataaccagttgagcgaaagcaacactccaaccaacaatgaccagttacttcaggaactcggaatcctcaaacaagaataacctacattcttatttttagcttaagaatattacttttataataaatgtacgacggttactatttatattattacgaaaatactgcagaaatttttgttattttctatattgcattttacagctttttattgtttcatttgtatagtgattaaagccaaattaaagtatttttatgataaataagaactaattaaatatttgttatttaagggtgttaaaccaattggtacactggaacagtgatatatggaacgattattctaagggttcgataacttagtcgtgaaaagcctatcaatggtttctcccatctctccatcggcataaaaatacagaatagtctaaggaactgaataaatgtaaacattatttataaacagccattaatagttattcaattgacaaacttttgtgctgtaagcagcgcttacatatgtgccaaaatattctcacaaccaacagaatctccaacaagatattatggctttaaatggatttttagaattcttccaaaagggcaaggtgtgtttggtcaataacaaaatcatatgcagttgatgtatttttaaactaattttcagacctttaggccaaaaaagccatttgcctccggaaccattaggtattccttacataagcaagcccaggccagtttgcaatccgggattaatctgcggcaagtggtgcgtttgccgcaaggggagaatctcaacgactggctagctgtgcacggtgagaattgtgaattatacaatatatacagtatacccaacgttgtatatttcagttgtggacttcttcaatcgcataaacttgatctacggcaccgtttcggagttttgcaacgaaactacgtgtcccacgatgtctggcggttccagatatgagtacttatgggccgatggagatctgtaagtgcaggaaatgatattgcgaagagcataaactaatgtagctacgatttcagatacaaaaagccaaccgccctttcagcccaaaagtacattgagcatttaatggactggattgagacacaaattaacaacgaagctgtttttccagtgtccacgggtag

SEQ ID NO: 26948 - DNA, 486 bp, DROSOPHILA
aaagacgcataataacaaagagttgcaaagttgttgtattatttgagagttataatggctgatatggagatacagagcaacaaaatgtcaataacggaggaaacacaagtgcagacgcgcaaggaatgtggaaaaaggggacgaaaaccaggaagaaagacgtctactgaaaaattggacatgaaagccaaactagaacgcagcagacaaagtgccagggaatgccgggcgcgcaagaagctgcggtatcagtacctggaggaactggtggcggatcgggagaaggctgtagttgctttgcgtacggaactggagcgcttaattcaatggaataaccagttgagcgaaagcaacactccaaccaacaatgaccagttacttcaggaactcggaatcctcaaacaagaataacctacattcttatttttagcttaagaatattacttttataataaatgtacgacggttactatttatattattacg

SEQ ID NO: 26949 - protein, 76 aa, DROSOPHILA
MKAKLERSRQSARECRARKKLRYQYLEELVADREKAVVALRTELERLIQWNNQLSESNTPTNNDQLLQELGILKQE

SEQ ID NO: 26950 - DNA, 6692 bp, DROSOPHILA
tatggatttccttaaatttgcaactcatcatttggcgcatatacatgtatagtaaattgccgagttatctagcttatcttgtgcaaattatatcagttttatctgattaataactcattttattacactatttagttcttttcctttttagggaggtcctatatttctgtatcccgcaaacaaacaacattcatttatacacgtatttagaagtacatatttgcaatagatggagcggctaagcattcagttgtatattttaattaaaaacgtattctgcagttatctaccagctattaccgaaagtatgcaaaaaatcaatttacttcaaattccaaagacaatcggcattgctaaaaatttaagtgatgcgccgcaatgatataaccacataccatcctgatgaaacgccaataagcatctgcgaatatgctgaacgttggccaatatcgttaaaaactttcttaaaaatttccgaataattagtcatttttaaaattagatgtcgacgttaagatgcgaaattctgaccgcccagtttacgtcaatttaacacaataatatatgcccgtcaagatagcgtcaatttggacaacatttttgtgttgggtttattggaactcggaagtggaacatatgttaggggaattatgggaaaaagagtaagaaaaataactggtagcacttaacgtagaaactggaataatcatactttgaatatttattattaatctgataattacctttgtgaatcctgtatgctttgcacaacaattggcaaatttcaagaacctcttattatttatttatcttagctattgcctcatttgaaactattagttaaattccaataaaatatgagatatccatttaatcgctgcacttttcgtgtcgaaaactagtttcgagatcaaaactataaatttaagtatttttttctaaacgtcaattatttctccccccttactttagacaaaaacccaaagttcgaatgaaatctacaatacaaaatgtacatgagtttatttaaaataattgttaaaactacttaaataaatatcatacagtatatttacaaattcgaatagattagccaattacttagcaattttaattactttgctaaatcaccaagaattataagtccgtaataagcattgattacaggtatgttgattcacctggaaataaagaaaaatattcatttattagtttagatttttttgctcaaacaagcttaatgaatttattaactaaaactcaacgagaatacgataaaaatcaaaatagcatgaatgaattaaaagcagaagacttttgatgatgatgaaacacacaaaagacacattctgcttcaggatatttagttttcaacagcaacagtgaaatagtcgaattagtcgaagttcgacagttcggtgctagttttgttaaatgaattgagtagaaggacaatggcagtgcccagagtcacatacttatgaagcggtgagggatgtgtgatgaaaatcgatgcggatactgattaaggattgccggttagttgaccattcgagccgcaggcatgggctcccactcactcacctatgtacattaaattctaaacagatgtgcagagcgcagctgtaatcgatcgtttccccgtgaaaggaagtggatctgtgtaagcctgtctctgctagtatactcgtaaaagtcttggggacatataaatccagttctggtggcttcgttttatacatcaaaattaagagatcgttcagccagaagtcttttaaatcgtctcgggtgattattctggcgaattcaataagtcaataagaatataaatgtgtggacgatagcatatgtcgataaaggctatctcttttaacaaatcttaatttgaatactcatacaatacaattaattacaaaatcaaaccgataatggtccagaaatcaattgaatcgaaactcttagtattaaataaatgtgaaattagaacaattgttcggtattactcgattaaaacggatagatttttagtgagatctggtcattgagagtatagtgtgcagcaaactcaccggattcccaatcttcctcgccatcttcggtaccacagttgaattttggagaggattgtttacatgtgatgtatgaattgtaattgatgttcttattttcgtttatacttcgagtgtcagaggtgatatgaacttcactattctgccatttgattaaatcagttttcttaatggacggttgattaaatatatgatttcgttttatttcctcttttgtggaatcattcaagcttggtaaaagagttttgctattaggctgtttgcgtttgcacgcagtcgaagtattttttgaattggttgatgtgtcgtattgaattttagtctacgaatattagatttatagattaagcatattgatcggcgcaaaacgtgttttcacttacaactatatccttatgatccaacgtttctattgtttgacttttcgttgtattatcattgacgatcgcagttaagacttttttttcggcatagcagtttggagacaaactgtcatagtctgatctttcgaaatttaaaacattttcgtttctctctttttcggacgcttcagcttgaacatcattgctaaaattctctgcctcaaaaacgattgaaatctgaaaagagagcaagcacatttatttggtaatttcgcagcatctattaaaatgcttcgaaatatcctaccttgaattcttctgaaaatcttttatgttcactgtctttatgtacatcatcgatttctgatttgcttaaagtgtgtatatatttgttaactgttccatcggactcgcaagctaaagagaatgtttaattaaatcgtttatttaatgcatgtgcgatattaagtatacttacgtgaatagtttcgtacaaaaaacgtatttagccaaaagtgacaaatgattttatctggggatttttttgtgagttcaaattttacatcgccggaaactggtattgatggtttaatggtcaaaacaaatgatttttgaaaatcaatcggcaaggttttcagtctctgcaattataaaaaaaagaagaatgttactgctggttagaaaggtattcgaaaaggaacactttactgcactgaaatcgtgtgaaatatacatttttaaaatgctgtctatagtctatcaatgatgtatctatatactttatatacttacatctggctttgcattttctgtggctgagtcgtgtaatacagatattgaacattctaccatgcctaagttttgcacacaactggactccgagaagcgtatttcacatacctgagatacaaaaaatgcatatttagattttgtacggcgctgaatgtggcgctgctgctggaaatactcacgttaaggcttactttcgaatatggaacacttgaacaaactagtttggaaaaatactgaacatatcgacgctgagatgggattgtcacaccttttcggtcctttgtacgcttctcatcataccacgctaatgcctcgtcggcggattttttaattccactgaacactaaatatgcgcagatcatggtacctgaaatgaaaaaaaactgggttagttttttagccctacaaatatcgaaacaagatcatagtgtgccatgatatttatgaactttcgcacaaaatgttgaacacatttcctaccggttctgccctttccagctttacagtgcacggctacaacattggacgaatcttccttgagccacatatcaacatcactgcaaaatcgttgtattaactcaatcgttggagggttatgatcatcgaacggataaacagctactctctgtaatgcgaaatagtatattttacatattttacgccgacaaatagaaaaagttcaacaaaattaccccgcgaaatttagcaacgtcgtaactacgctccgagcataggttatagattttgtaatgctgggcatgattctcttccaatagcttaaagacatcttccagacggtttctgaataggccctctagtttatccggtgctggatagcccatggcaattatgttatcattaatgtctgtgggtaaatagataatttaatttaatattccaatgattgcggttgattcaataacttacatgttaaatccaaatcgtatcctttttctttgtatcgtatacgttttttactcactacattgcgtatcacgttggacattaacgaaatagtgttggccatatttttaaggtttaaagacttgtcttttttatttaaattagattagctgcatccattcaaatgtatttgggaaccagtgcttgtcttctatttactccattgcaaagtgtacgttctgaaaggaatgtaaagcatattaattaatatgcatatgattctaactaatctgtttattttccacagcaagttagaaaagtattgactcaattcagcttagttttctactgcgaattcaaacctaaatcctttaacagcagacaagtttctaatatggtcaatagaaactgcttaattatactgtgccaaggcattctaaagggatatatggaactaatataatgggcttgttttctcccgatccacttaggttgttctatataaactaatacttcttactcggctaagatatattcctgtttgcagttcttgcttggatacatatttaagcacgtacatacacatacagacagaggtgcactctctataggaatagttccctacttgttttcccaggaacaggtaaagagttaacttcagttcggtttatatatccacaaatatccttagcacaaacatgcacacactcacacacactcgcacatgcacacgcacatatgtacatacacacacacacacacacaggcaggcatttgcggcacacacgtgaaacatacttacatgtatcggcatattatcaaagataaacaatataacaatcttccgcttggcataatacattcagattggttgtcaaatggtcctggttttaattgtaactggctaacagaacagagttcttttattgaagcccaacgcacggcgatttcgatacgaattcgagcaattaaatgggttcgttggctgagggggcgattttcgaggggtgaaaatcaaaatcaaaatccgttttagaaacaccgagcagtaatttcgaattacttaacatagcgactgatttggcaactgttttttgttttatctcgccgagtagacacacttttttgacaaactgtttgcgaatggtggtatgtattgtagttagagcacatatgcatgtacagaaatatgcagatatggatgatgggcatgtgcacatatatgcaccgatttttgtgcatttatgtacatatttgtttaaacaaaaacatatttacaattccacagacattttacacatttacactatcagcaccacacgaatatatgtgcccactgtttaatacatatgtatgtatgtgcatatgggtatgtttaagtcaataagctaaatgttccaaccgagcaggttctggctactgcatttcaaaaagctatcacatgttttgctctaagccacgaaatttcaaataaaacttttcaattatgtgtaaaagttaaacagtagcgctcatgctctattaaatgtattattaatttatcaagcgtgagatccacagggtgtttacggcgagcgataccaccacaagatttgagaaaatgtacatccagtgctatcgacgtgcgtggtgccctctcgattaaattgtgtatgcaaaaactatcgatgggtcatcgatacaaccatttattttttagcactgcggttttaaacaatatgtaattatctatgcatttattttaatcttattaaacaacacacatataacttcatgctaccaaaaacatgactaccaacacatcttttactcgagttctacccacgaaactaatattgctacagctattaaaaattccatttcttgcaaaaccaatattatttttggtatgcaattttttaaaacgcaaacatttttaagatttacgaataccttttatttatttttttttccagccattgaaatgctattgaaaactatcagtttgggtaataccattaatgtaatcctctctttttttatttacaatcgataaaagtgcaacaggttttttatgggtattcgattattttgacataaatatgattggaatttaaagttcctttattcaaaagcaaaacctgctatctgaataatttaaaattttaaaaaattttcaaaactttaaaaattacactcgtatcttaaggctagttggtttccgcaaaatgaattcttggtaccacttaattctcaactgttgactttaattcgtaacttgaataaatcaaaataggccaatcatcagtaaatgttattgaagcaaaaaggactcgaagacgaagaaataaaaacaagtgttttgccgtgttaaccaatttctcatttatttgtctcgctttttatttgtttaaaaagtttctgcagtccatcgtttaaatatttaatagccccttgggctaactaactaatcgtcgttatcataagtattgcttagctatgttttgaactttaagcaatctaataaatctgaaagtgacgttaagagatactccaacaaatgacctgttaatttagttaaatgaaa

SEQ ID NO: 26951 - DNA, 2529 bp, DROSOPHILA
aacaccctgtggatctcacgcttgataaattaataatacatttaatagagcatgagcgctactgtttaacttttacacataattgaaaagttttatttgaaatttcgtggcttagagcaaaacatgtgatagctttttgaaatgcagtagccagaacctgctcgtttgtcaaaaaagtgtgtctactcggcgagataaaacaaaaaacagttgccaaatcagtcgctatgttaagtaattcgaaattactgctcggtgtttctaaaacggattttgattttgattttcacccctcgaaaatcgccccctcagccaacgaacccatttaattgctcgaattcgtatcgaaatcgccgtgcgttgggcttcaataaaagaactctgttctgttagccagttacaattaaaaccaggaccatttgacaaccaatctgaatgtattatgccaagcggaagattgttatattgtttatctttgataatatgccgatacataacgtacactttgcaatggagtaaatagaagacaagcactggttcccaaatacatttgaatggatgcagctaatctaatttaaataaaaaagacaagtctttaaaccttaaaaatatggccaacactatttcgttaatgtccaacgtgatacgcaatgtagtgagtaaaaaacgtatacgatacaaagaaaaaggatacgatttggatttaacatacattaatgataacataattgccatgggctatccagcaccggataaactagagggcctattcagaaaccgtctggaagatgtctttaagctattggaagagaatcatgcccagcattacaaaatctataacctatgctcggagcgtagttacgacgttgctaaatttcgcgggagagtagctgtttatccgttcgatgatcataaccctccaacgattgagttaatacaacgattttgcagtgatgttgatatgtggctcaaggaagattcgtccaatgttgtagccgtgcactgtaaagctggaaagggcagaaccggtaccatgatctgcgcatatttagtgttcagtggaattaaaaaatccgccgacgaggcattagcgtggtatgatgagaagcgtacaaaggaccgaaaaggtgtgacaatcccatctcagcgtcgatatgttcagtatttttccaaactagtttgttcaagtgttccatattcgaaagtaagccttaacgtatgtgaaatacgcttctcggagtccagttgtgtgcaaaacttaggcatggtagaatgttcaatatctgtattacacgactcagccacagaaaatgcaaagccagatagactgaaaaccttgccgattgattttcaaaaatcatttgttttgaccattaaaccatcaataccagtttccggcgatgtaaaatttgaactcacaaaaaaatccccagataaaatcatttgtcacttttggctaaatacgttttttgtacgaaactattcaccttgcgagtccgatggaacagttaacaaatatatacacactttaagcaaatcagaaatcgatgatgtacataaagacagtgaacataaaagattttcagaagaattcaagatttcaatcgtttttgaggcagagaattttagcaatgatgttcaagctgaagcgtccgaaaaagagagaaacgaaaatgttttaaatttcgaaagatcagactatgacagtttgtctccaaactgctatgccgaaaaaaaagtcttaactgcgatcgtcaatgataatacaacgaaaagtcaaacaatagaaacgttggatcataaggatatagttactaaaattcaatacgacacatcaaccaattcaaaaaatacttcgactgcgtgcaaacgcaaacagcctaatagcaaaactcttttaccaagcttgaatgattccacaaaagaggaaataaaacgaaatcatatatttaatcaaccgtccattaagaaaactgatttaatcaaatggcagaatagtgaagttcatatcacctctgacactcgaagtataaacgaaaataagaacatcaattacaattcatacatcacatgtaaacaatcctctccaaaattcaactgtggtaccgaagatggcgaggaagattgggaatccgaataatcacccgagacgatttaaaagacttctggctgaacgatctcttaattttgatgtataaaacgaagccaccagaactggatttatatgtccccaagacttttacgagtatactagcagagacaggcttacacagatccacttcctttcacggggaaacgatcgattacagctgcgctctgcacatctgtttagaatttaatgtacataggtgaatcaacatacctgtaatcaatgcttattacggacttataattcttggtgatttagcaaagtaattaaaattgctaagtaattggctaatctattcgaatttgtaaatatactgtatgatatttatttaagtagttttaacaattattttaaataaactcatgtacattttgtattgt

SEQ ID NO: 26952 - protein, 509 aa, DROSOPHILA; identical to SEQ ID NO: 11925

SEQ ID NO: 26953 - DNA, 5673 bp, DROSOPHILA; identical to SEQ ID NO: 11923

SEQ ID NO: 26954 - DNA, 2129 bp, DROSOPHILA
ctgcaaacaggaatatatcttagccgagtaagaagtattagtttatatagaacaacctaagtggatcgggagaaaacaagcccattatattagttccatatatccctttagaatgccttggcacagtataattaagcagtttctattgaccatattagaaacttgtctgctgttaaaggatttaggtttgaattcgcagtagaaaactaagctgaattgagtcaatacttttctaacttgctgtggaaaataaacagattagttagaatcatatgcatattaattaatatgctttacattcctttcagaacgtacactttgcaatggagtaaatagaagacaagcactggttcccaaatacatttgaatggatgcagctaatctaatttaaataaaaaagacaagtctttaaaccttaaaaatatggccaacactatttcgttaatgtccaacgtgatacgcaatgtagtgagtaaaaaacgtatacgatacaaagaaaaaggatacgatttggatttaacatacattaatgataacataattgccatgggctatccagcaccggataaactagagggcctattcagaaaccgtctggaagatgtctttaagctattggaagagaatcatgcccagcattacaaaatctataacctatgctcggagcgtagttacgacgttgctaaatttcgcgggagagtagctgtttatccgttcgatgatcataaccctccaacgattgagttaatacaacgattttgcagtgatgttgatatgtggctcaaggaagattcgtccaatgttgtagccgtgcactgtaaagctggaaagggcagaaccggtaccatgatctgcgcatatttagtgttcagtggaattaaaaaatccgccgacgaggcattagcgtggtatgatgagaagcgtacaaaggaccgaaaaggtgtgacaatcccatctcagcgtcgatatgttcagtatttttccaaactagtttgttcaagtgttccatattcgaaagtaagccttaacgtatgtgaaatacgcttctcggagtccagttgtgtgcaaaacttaggcatggtagaatgttcaatatctgtattacacgactcagccacagaaaatgcaaagccagatagactgaaaaccttgccgattgattttcaaaaatcatttgttttgaccattaaaccatcaataccagtttccggcgatgtaaaatttgaactcacaaaaaaatccccagataaaatcatttgtcacttttggctaaatacgttttttgtacgaaactattcaccttgcgagtccgatggaacagttaacaaatatatacacactttaagcaaatcagaaatcgatgatgtacataaagacagtgaacataaaagattttcagaagaattcaagatttcaatcgtttttgaggcagagaattttagcaatgatgttcaagctgaagcgtccgaaaaagagagaaacgaaaatgttttaaatttcgaaagatcagactatgacagtttgtctccaaactgctatgccgaaaaaaaagtcttaactgcgatcgtcaatgataatacaacgaaaagtcaaacaatagaaacgttggatcataaggatatagttactaaaattcaatacgacacatcaaccaattcaaaaaatacttcgactgcgtgcaaacgcaaacagcctaatagcaaaactcttttaccaagcttgaatgattccacaaaagaggaaataaaacgaaatcatatatttaatcaaccgtccattaagaaaactgatttaatcaaatggcagaatagtgaagttcatatcacctctgacactcgaagtataaacgaaaataagaacatcaattacaattcatacatcacatgtaaacaatcctctccaaaattcaactgtggtaccgaagatggcgaggaagattgggaatccggtgaatcaacatacctgtaatcaatgcttattacggacttataattcttggtgatttagcaaagtaattaaaattgctaagtaattggctaatctattcgaatttgtaaatatactgtatgatatttatttaagtagttttaacaattattttaaataaactcatgtacattttgtattgt

SEQ ID NO: 26955 - protein, 514 aa, DROSOPHILA
MANTISLMSNVIRNVVSKKRIRYKEKGYDLDLTYINDNIIAMGYPAPDKLEGLFRNRLEDVFKLLEENHAQHYKIYNLCSERSYDVAKFRGRVAVYPFDDHNPPTIELIQRFCSDVDMWLKEDSSNVVAVHCKAGKGRTGTMICAYLVFSGIKKSADEALAWYDEKRTKDRKGVTIPSQRRYVQYFSKLVCSSVPYSKVSLNVCEIRFSESSCVQNLGMVECSISVLHDSATENAKPDRLKTLPIDFQKSFVLTIKPSIPVSGDVKFELTKKSPDKIICHFWLNTFFVRNYSPCESDGTVNKYIHTLSKSEIDDVHKDSEHKRFSEEFKISIVFEAENFSNDVQAEASEKERNENVLNFERSDYDSLSPNCYAEKKVLTAIVNDNTTKSQTIETLDHKDIVTKIQYDTSTNSKNTSTACKRKQPNSKTLLPSLNDSTKEEIKRNHIFNQPSIKKTDLIKWQNSEVHITSDTRSINENKNINYNSYITCKQSSPKFNCGTEDGEEDWESGESTYL

SEQ ID NO: 26956 - DNA, 4962 bp, DROSOPHILA
ggaattggatgtggaattgtgaattcataattggctcactgtgctggcgctgtaaagattgtttatttcgttttcaggtttctgcgcattgcattaagataaccgcagctagatgctcattttattatacatatatgtacgtacatatgtacatacataagtacgtgcgcgcgtatgtttgtacatattttgttttatagatgagcatcataaatatatatatatatttatatgtacatatatctgtggaattctaatacatcttacatacatatgtatctgcgagttatttttccccgtaggcatgtatgtacaaacaacgatacatatggcacactctggtggtatcatttacaaacgcacatggatatgggaaataatacctcaacgccaatgtggctgggaaatgtgttacctaagacgtctagctgcccgtatgcccgatatgcgcgaaatcagtgtttactagttatccgcgcgatacatttagcatttgtattattattgttcaccaacgcaattctttattatcaaacccacatttattcgcgatgacactttgctgttatcgttatcgcagcataggaataacagtacgaagttgccatcccgatctctacaccggtgagagttgccagcccgatttacacgccggcttattcgatactaattgagttatcgaatgaccgtttgtttcgtttaaatttagtataacagttttttatttaatcatcattttaaattttttgtattttagaaatgtttttatcggtaactaaattatctactttccatattcttgtatgaaacaaaattttaaaagtatgtatcgactttatataccgaaataatttatatggttaaacttttccatttaaattttatgaatttatacaaagattaaaatgtaattagctcctgaaatcaggacaatgaaatgattaaactggtattttaacgatttaacttaagaaagcgggctcaaaaaacaaggatgagtaagaaattacaaagtttcgcatattgattttattttttaatggttactatatttttaaatacaatttgaatattttatttgttgtaataatttaacaatacacgccgtattgttggtaagctttagttttcttgtgactgactaaggaggaaaaagtcgttctctaccgcgttctattatttgtattgtgtgcttcgtagtccatgacttcctcatagattagctccttccactgctccacagtgtgttccctttcgtccacgctgtgatcatatggctccggagcgggctgcaagagatgcatgcaattaagcgattaaaaacattcaacattcctagaaatccagtttatgccagaatcacttacagcatccacttcctcagcatcataccacacgttgatatattcatgcttcaaagcctcgtccacagatatccgctgctctggatcaatgactagcattttactaagaagatttctagcgtcagaagccttccggcggctattctgattattatcatttggaaacaagccatcggggaaaagtctatcaaatgagtatccagtgtatctaggacgattttccacatagtttcggacggttggctgtaaccgttgcataaacgagggtgatggtgtacctaattgctctgaaaaaacgtaaaagttgacaatcataacgagaatcaagttatttaagcagcaacataccaataattttattccactgatctatatgatccgttccaggaaacagcacaccgccccgtatcatttcgcccataatgcaaccgacggaccatatgtccacgttctctgtgtatcccatgcccaaaatgacctctggagccctgtaatatcgggtgaccacatagggagtcatcataaaggtagttcctgcagtacgtgccagaccgaaatccaaaatttttagagtgcagtcggcctttacaactatattggatggctttaagtcctgcaaatgaagtatttcatatatttcatactcattttaaagatgtattcatactgtacgtactctgtgaataattcctgctgagtgtaaatgttttattccgcacaacatttgataaagcaaataggacattctgtcgtgatccaagtccatttggatgacctggcagagattagcgtccatcagctccatgaccaggtagacatcctgaaactcttccaagttcctttgcggcgtaaaagcattaagtaagccaattatctacggattaaatacctatgtttagtagaaatttgttaaagttaaaggtgcaagtttcatacgtttttatggttaacaagcttcattagcttgaattccctatatgctcgcttggcatgggttacattttggaatggtcgagatagtttcttaatcgccacattttgctgggtgatagtatcgtaagcggcgctgaaatgcattaaatttgttatttttttttttcatattccagctaatcccatctaatctaatctaatatacaatggagcgttacaaatatgacttcatactcatgcgaaatatcttaattgtttaagccaaaaaattgttaaatgtattatatgtaataacatattgataaccacttaccatactattccttgggcacctgatcctatgggccgtagattaatgtaccgactgtggatggtgaagttggtgtcccccacctcgacggtgtagtgttggtgctgagctgtcgtcattgttcactgattttatttattactagttgagagcaaggagcatatcggccttttcaagagggtaaataagataaatcaatacggttttacagtgtgattctgttttatataaggagcaaagacgtccgtatgtatggctccattctgaatgggtggaggcagttttcagacaacttcgtctggaattagggggtaggaaaacattaactttgcctggccttatttcggcagaatgttatggccattaagtgggtctctgttgtcgcgaggggtgaaatttactggctagtgtgtggcgagtttgttgccaaaccacgagcaaaaaatatcgagttccttcaaaaagatacaattgcataacgcagtcacttatttgagccgacttcgaatgccgaacccccttttctattgataagcatttaaatgtttgccgaacacatgtcgaatatggttggaaaaacacccaacagaaataaccgagcgtttcgttctttgagcaaagtgtttagcggcacgcacaggaaaaaaaaccgatttaaaatcgatatgtccggcttaaacataaaagtacggaatgttggaccacagcgatgtacatagcgttcatgtgtatgcatgccgttgcctgtgtaaatatgtacatacacacgatttgtatgcggatgaaaactgtaaacttctactggtatacatatgtgtaagatgtaagccacatacatacatatgcacatacagccacacaaatgtgggtcgataatttagtaacttttcaaactatctctcagataaaagatattccccgtattcgtacatcgaaaaagcgctcgtttgcgctgcagataataaagcggtctacgcttcgggtagtgtcgatatgtaaacgttagacatttgcgcatacataggtacatacactctttgggcagttgacattttatgttaaatatcaataatttttttcataaccggcacaactataattgctttcaatcgattatggcacgttttgcaggagtgtttcggtgattcgatatttgatgtgaatggaacgtaatagaatatttatttaccatttaacgaagaagtacagaatttcttgtgaaaatataaaatcgattttttttctattttattctacacactgggcactcaaagtggcgagcattttaaactatgttaatgttattgaaatttaagaatcaactatctgcggcactttcgcatgagaataattgtacatggatacaatacaatatacgaaaatctattggaatattcgatcacaacaaagttacttaaatcgatgtgaccagattgcagtaggaccaaaaccagaaacggctaaagtcagccaatcgacttttgattaaaattaggtttaattaggggtttaaaacctaataagtgttaataacttacaaataaacatatacaaatgcaatttatttaataaagaccaaaaactaagttggcgcagtgtttcatttcaccgttccggtcattagatattcctttgctcgacttatcgagtatacatcgaatgacgaatgagaaatactgtcatcactaacaataaataaaaacaaaagagttgaaatacacagcgatatgaggacggttggtttttggccactgatgaatcacataagctgataagtgctaattttaaaatcttgtccttgcagtcatcaccagcacttaaatacctattggagaaggatgttcaggtgtcgaagcattttgtagtagccgtctccaatctgtcgttcttcaaatccctgcggatccacagcagatttctggagatatcatgcgatggaatcgcctggtttgtctcatggatcgccttcatctggttgctcagctcgaagagcttgtatcaaatgcaagtcaatatgctcttcggcctgatactcgacgtagtgatcgtggccgtgctgaaggcgcttgttcgtcgcaggcgaccggtggccagcaaggatatgctgaccattggacccgataagttcagctttccctcaggtcatgcctcccgggcgttctttgtgctgctgttcttcgccaagctgtatccgcttcacatcatattcctaatgccggtcacagcttgggctgtaagcgtggccatctcacggctcatcctccagcgtcattatattttggatatctgcgccggtgctgccatcggagtgttggaggcactaatcgtgggacttctgtggatcagcgaggaaac

SEQ ID NO: 26957 - DNA, 1497 bp, DROSOPHILA
acaattattctcatgcgaaagtgccgcagatagttgattcttaaatttcaataacattaacatagtttaaaatgctcgccactttgagtgcccagtgtgtagaataaaatagaaaaaaaatcgattttatattttcacaagaaattctgtacttcttcgttaaatggccgatatgctccttgctctcaactagtaataaataaaatcagtgaacaatgacgacagctcagcaccaacactacaccgtcgaggtgggggacaccaacttcaccatccacagtcggtacattaatctacggcccataggatcaggtgcccaaggaatagtatgcgccgcttacgatactatcacccagcaaaatgtggcgattaagaaactatctcgaccattccaaaatgtaacccatgccaagcgagcatatagggaattcaagctaatgaagcttgttaaccataaaaacataattggcttacttaatgcttttacgccgcaaaggaacttggaagagtttcaggatgtctacctggtcatggagctgatggacgctaatctctgccaggtcatccaaatggacttggatcacgacagaatgtcctatttgctttatcaaatgttgtgcggaataaaacatttacactcagcaggaattattcacagagacttaaagccatccaatatagttgtaaaggccgactgcactctaaaaattttggatttcggtctggcacgtactgcaggaactacctttatgatgactccctatgtggtcacccgatattacagggctccagaggtcattttgggcatgggatacacagagaacgtggacatatggtccgtcggttgcattatgggcgaaatgatacggggcggtgtgctgtttcctggaacggatcatatagatcagtggaataaaattattgagcaattaggtacaccatcaccctcgtttatgcaacggttacagccaaccgtccgaaactatgtggaaaatcgtcctagatacactggatactcatttgatagacttttccccgatggcttgtttccaaatgataataatcagaatagccgccggaaggcttctgacgctagaaatcttcttagtaaaatgctagtcattgatccagagcagcggatatctgtggacgaggctttgaagcatgaatatatcaacgtgtggtatgatgctgaggaagtggatgctcccgctccggagccatatgatcacagcgtggacgaaagggaacacactgtggagcagtggaaggagctaatctatgaggaagtcatggactacgaagcacacaatacaaataatagaacgcggtagagaacgactttttcctccttagtcagtcacaagaaaactaaagcttaccaacaatacggcgtgtattgttaaattattacaacaaataaaatattcaaattgtatttaaaaatatagtaaccattaaaaaataaaatcaatatgcgaaactttgtaatttctt

SEQ ID NO: 26958 - protein, 372 aa, DROSOPHILA; identical to SEQ ID NO: 11958

SEQ ID NO: 26959 - DNA, 3919 bp, DROSOPHILA
accaagaattcgcaatgattaacaaaacggtagacaccgagatctacaatcacaaatatgataacatagttacagtacacaacactttcttcgtaaaaaaaccatttgttgtagttgctatcgaatagtcgaagtgagaactgactgctaaatggctgaaataattgtgacaaatactacccagtcttcaaattgaaacgcggaaatggaacaaaatgtgatgttgcacttttactttgctcttaaaaaagttttttactgtaaataaaatacatgtactggaatttttgtgtaaaatcgacatcgaattaattcgattccatcaaacacagctgacgcaaacatctgttaatctcttatacaaagtaaaggagagttgtatacctttaaaaaactttaaaacattttttttattatggtatctttttctagctttttagtagcacacaaggacgaggtccgtgatataaaaattttgttaaagagaagaagaagcattaaatagttaagtggaagataatatataaaaaaagtatccctctgtatccctctttcatcaaacctcttcacgcaacgacgacaattgtggtgaacatttcgttgcaacccatcacaagcaataaatcaactgatgacaagtatacacacatgttgatccgcaggcctgtgcaaaagttcgtcaaacatcgatgaggtgccacgtggaacttacattttgctacgttgagatcaaactttttttttatttctttccgggcactaataagtgtttcaatttatggacgttttgtaaaaattgcaataaatttgtttatttactcgcacatcaaaaagcagttcgtatgagaatgagaacgtgttaaaaatttggttgaaataaaaatgtcgtgtttcatttccatcgtttcagtagcaataaaaaacgaatccgatggcgtagatatcgatatacctgcattccctttcaaacgtgttatcgtattgttcagccaattgtgcaacgtgtttgagtaaatctgcgggcgaaagactaaaaatgaaagtagaggcattggacaaattctgggctgacaagagccgctacgatcttgccgagaagcgattctacgagggtccccagaaggtaaaatctctaagcaatcacagccataagtacttaagttgttagccagtttcacgtggccggtaaatcagttcaaatggtttcggcaatgtttattgcaaatctgtttgttttaacagcaaggacgccgaaacacacatgttctaaacttcaatacatacgtagaatgatctattaaaagatttctatatttatctgcctttgattttcaattgctgtgttcatattgcacattacattggtatattcttgtagctgtatgtaacaggtgaacgtttaacacttttaaaaaatataactatgtgcgtaaagtgtatacaaaacagagtgtgagagaaaactaactctggcaagccaaattttgaatacactttccgtttggcaattggtataaatacaaaatatagtatgcaaaacataagtacttaacatgacacctacacaacaaaattcgtttattcaatggaaatgtgccaaaaacaaatcgatgtatacaaagttaaaacctattgaaattcagggaaatactatagttaagtaaaggtttaaacacgttgtattctatctacacaaatatactacacaaaatgcatagcactgcattgtataatatttaaactacgtacaatttttgggctgattagagtgaggcttatcagtatttcagcatgcttgcatgacaacagacttgaagtagatgcccgtacataaaacatctcattttgcttaaaaattattatccctagaatcctttgtcaaccattcgatacaccaaatgtcagttcacacaagtaatcaatggtgttgtcttatttttaaaggtaactgatcgcagccactacagcccattagtaagcgaaatcgcaaaggctagggaacacatacagaactcgctggaaaaggtaactattgtgataaatctttgtatttcaacatttgatttgttcacattcctaggtttctttcggtttctttaaaactttgtagagaattgtataattattatttacaatatatttagtctgtacttatgatcaacatatcccaatgaggacttgaatttgaattattaatcaagccttttgtgtgtgttccagatcgatggcgttactctggacgatggcttaaattccgagctggccaagcgtctggcccaattggagggtgaacacaaggagttgaagacccaggtttccttgttgaacgaacttttgactgccacagtgaagcgcttggaaactcagctgaaattgacgaatggagtgtcgaaagagcccgaggtcgaagcgaaaaaaccagaagcgaacgacgacgatgacgatgtggatctatttggatcggacagcgaggaggaggatggagaggccgcccgcataagggaggaaaggctggcagcctatgctgccaagaaggccaagaaagttcaaattattgccaagtcgaacatcattctggatgttaagccgtgggacgatgagaccgatctgaaggttatggagacggaaatccgcaaaatcacccaggacggtctactgtggggagcttccaaattcgtgccagttgcctttggcattcagaaactgagcatttcatgcgtggttgaggatgataaggtttccatcgattggctgactgaggagatcgagaaactggaagactttgtccaaagtgttgacatcgctgcgttcaacaaaatctaaggggtaacatataatttttcaattcacgatcggatttgccgcattacaaatgtgtttgggagtcgtctaaataaatattttgataaaaaccaacttaaaaaactgcatttaaactgggagtaattggtaaatagtttactttaggatattttttatgcaaacgatatgttttgaattcgctaaaaggccatattatttcaaaatttataagaaaagaagatatatattagtttaagtcatgtattcgccattctttgattaattaaattcatttacgcacgagtataaaaacaatgcaaattacctattaaataaatattccaggtcacagctaaattatgcacatattaataatgattaaactgagggactagtttcataaggctctacaaattataaatagttaatcataagttatttaaccatcctaaagcataacttcgttttcgggtctcgtcgacgtttggcgcttaaactcacagctgccaggagaatgtcgaagagtggtcatcgcggtgctggttggagcataggatttggtcacgccagcgcgggttctagtcgatgcagtgctcggatttgattgcagaccttaaagattaaataaatacaaattacatgtagtatattcaactaactgccagttaattgatgccactgaaacttaccaaacttaaacataatttcgttataaattctgcgcttaaacacaaatataatgaagacaaagattccaagtagcacattaaacgaatcgctgatggtccaaaagaacgttttcttgtgatcataaaacaaaatgctaactatttccaacagccatgtgatgcccattacgaaacacagtttcgtgttcataacgaatctggttttgtcctgaaagaatcgccttttcaaaactggcttgtcgctgttcaagctctgcattttgtatatttcattttttactttgttgcaatacttcattgtgagcacgaatagaactaagtttataatgaaaagtatgccaactggacccgaaaagaacaataagctggctgaaccaaaagaatcatctggaattaatacaaaaatatacaaatactttaatatttaa

SEQ ID NO: 26960 - DNA, 822 bp, DROSOPHILA
acgtgtttgagtaaatctgcgggcgaaagactaaaaatgaaagtagaggcattggacaaattctgggctgacaagagccgctacgatcttgccgagaagcgattctacgagggtccccagaagatcgatggcgttactctggacgatggcttaaattccgagctggccaagcgtctggcccaattggagggtgaacacaaggagttgaagacccaggtttccttgttgaacgaacttttgactgccacagtgaagcgcttggaaactcagctgaaattgacgaatggagtgtcgaaagagcccgaggtcgaagcgaaaaaaccagaagcgaacgacgacgatgacgatgtggatctatttggatcggacagcgaggaggaggatggagaggccgcccgcataagggaggaaaggctggcagcctatgctgccaagaaggccaagaaagttcaaattattgccaagtcgaacatcattctggatgttaagccgtgggacgatgagaccgatctgaaggttatggagacggaaatccgcaaaatcacccaggacggtctactgtggggagcttccaaattcgtgccagttgcctttggcattcagaaactgagcatttcatgcgtggttgaggatgataaggtttccatcgattggctgactgaggagatcgagaaactggaagactttgtccaaagtgttgacatcgctgcgttcaacaaaatctaaggggtaacatataatttttcaattcacgatcggatttgccgcattacaaatgtgtttgggagtcgtctaaataaatattttgataaaaaccaactt

SEQ ID NO: 26961 - protein, 229 aa, DROSOPHILA
MKVEALDKFWADKSRYDLAEKRFYEGPQKIDGVTLDDGLNSELAKRLAQLEGEHKELKTQVSLLNELLTATVKRLETQLKLTNGVSKEPEVEAKKPEANDDDDDVDLFGSDSEEEDGEAARIREERLAAYAAKKAKKVQIIAKSNIILDVKPWDDETDLKVMETEIRKITQDGLLWGASKFVPVAFGIQKLSISCVVEDDKVSIDWLTEEIEKLEDFVQSVDIAAFNKI

SEQ ID NO: 26962 - DNA, 3118 bp, DROSOPHILA
aactatttcgcaatcgggaatatgcagtgcaatgtgtgttatgcccgatccaattcgatatatgtacatatatatatatgtatgtacatatggatggtaccacaatggatttcgttccaaagcgagaagagcgcgccgcgtccccggttgccattcaattattattattattctttttaagtaatttttgtataaacaacacacaacgcagagatatgtgtggcgcacgttcggccgcgattaagaaatcttcgcgagaagaaaaggccaaccgactccgaccgagcgtggcggctcactaaccacactgagcacatacattctcgccagcaggaaaaacgacgaagtgccagtcagcccgaactcgagaagatattgcactgatctgaatctgaatctgaatctgggggatcgcgcacgtgcgcgatgggaaaaagctcttcccacatcgccggaatcgtggggtgccagcccactgataccatcgacccatatatgatgcactaaatcaactcgaagcgaaccagaagttataagcaattaataaatagtttgttaaactttacaataagcagagaaaaacgttttatattcataaatcaaacttagtctcgcacctgatttattttcttaatctagaatgccacattagaagaatggtttagtttgaattttgtaagagcctagaatacattttataaatctgttattcctaagattttaattttaatttgttgtgcaattataacaatatgcttaaagatctcatttctagccataactcatatcattctttggatttagattaattagggggggaatatcatgtatcactgtttcaaaaatttaatacgcatataaagccttcggatctaaaaaatcttctgtgcagatctctggttttccaaactgataagactgtctgaagtttaacttatgtaacttatcttattataactaataaactcctttaaactagctatcagcagtcagcggtagaaaccagctccataaacgacctagacggaggagaagtagtcgcagctgccgcacatgtcgtatagttgtcccgaagcgggttcgatgaaaaatcgcagggcctgagtgcactgaagttcatggctggcgatttgttgttgcagcagtatctgcagctgttccatgttcgcagagtgctcgaagcggatgccacactcgcagatgaaggcacctttgtgatggcgtaggtttttaatctgacaaactgggcataaaacctccttttgctgctcatcgggctctgcgtatagcgtttccagattcttttcgcccagggcataccactcgttgacatcggatagtagctcctccagaatcagctcctcaagctccacatccttctctagctcactgagttccaggcgcaggatttccctgagttcggactgaaaaaatgggtggtttatgatgggcttactatggagatttgtatgtcctaccaattggatttctcgttgggcatccgtgcatctattgcgcgtttctatgatgcgcttgcggtatttctacagggtatttatgtgtaagtatattggtactttaaggggtacactgatgtctttacctctcgcagcatttcgcgaagtcttggcatttggttgcccatccgctgtcttttggccacttcttgagcatgccgcttttgctccacggaggtgcgataaaccgggctttgagtggagttcatttcggtttatttgtatatgtggttattttgtttgtttttaatctttttttttaactagatatggtaggtcagtgtcgtcaataaggcaaggttccaattttatagcgctgttggtgattgatagtgatctaaaaagtatacggtattcaaaattaattaggtaaattaagtgaaatgaagtaaatgtaagatacgactcatctccacatatatataaaagattataaaataagtagtattacttaacacagcccatgaagacagctcgcacaatgaattcatgaactaagggcggcttaaatacactattaacatgtttaaccaacttacctagtaattagcaatcggaaatagttgaaaaacacaacttttttgctaaaaaaaaaaatccgcgcaatttgctgttgctctgctagtggtggcacttcttcgatagcccactccgcggccagtgtgaccgtttggccgatggcgcgcgtgtcacgtgtgcacgcatttcgcagcactgaaagcagggttgtaccgatttgacagcccgaagttggcgtatagcacgtttccggtctttctttccctttcttttaccagcgtgtgcagtgactagtaaaaggttagtgcgatattttcaataaaaataccatccaaagtgaaaggaaaccgctcaaatgccattgttttgtgccgcccacagatgcctgctccggtcgtcaagaagccagcagcgaaaaagctgcccgccgtgccggaatcgaagctgaagttcagcaagaaacaaatctccaagcgagtcgccgagtcgaaacgtcgcctgaagaaggccgccgtgattgccctgcgcaagaaggagaacctggtccgcgccgagaagtaccagaatgagtacatcaaggcggaacagcgcgagatcaagctgcgtcgcttggccaagaagcgcaaccagttctacgtgcccgccgaggccaaattggcctttgtcgtccgtatccgcgggtaagtcctctaatgctcctccatgcacaagtcacaccaattcatgcccaatcccattaaccgccaacagtatcaacaaggtggctcccaaggtccgcaaggttctgcagctgttccgtctgaggcagatcaacaacggtgtgttcatcaagctgaacaaggccaccatcaacatgctgcgcatcgccgagccctacatcacctggggctatcccaatctgaagtccgtgcgggagctgatctacaagcgtggattcgtgaagcataaccgccagcgcgtgcccatcaccgataacttcgtgatcgagcggaagctgcgtcaggcgcaccaaattcagtgcgtcgaggatcttgtccatgagatcttcaccgtggggcccaacttcaagtacgcctccaact

SEQ ID NO: 26963 - DNA, 803 bp, DROSOPHILA
cggatttttttttttagcaaaaaagttgtgtttttcaactatttccgattgctaattactagatcactatcaatcaccaacagcgctataaaattggaaccttgccttattgacgacactgacctaccatatctagttaaaaaaaaagattaaaaacaaacaaaataaccacatatacaaataaaccgaaatgaactccactcaaagcccggtttatcgcacctccgtggagcaaaagcggcatgctcaagaagtggccaaaagacagcggatgggcaaccaaatgccaagacttcgcgaaatgctgcgagagaaataccgcaagcgcatcatagaaacgcgcaatagatgcacggatgcccaacgagaaatccaattgtccgaactcagggaaatcctgcgcctggaactcagtgagctagagaaggatgtggagcttgaggagctgattctggaggagctactatccgatgtcaacgagtggtatgccctgggcgaaaagaatctggaaacgctatacgcagagcccgatgagcagcaaaaggaggttttatgcccagtttgtcagattaaaaacctacgccatcacaaaggtgccttcatctgcgagtgtggcatccgcttcgagcactctgcgaacatggaacagctgcagatactgctgcaacaacaaatcgccagccatgaacttcagtgcactcaggccctgcgatttttcatcgaacccgcttcgggacaactatacgacatgtgcggcagctgcgactacttctcctccgtctaggtcgtttatggagctggtt

SEQ ID NO: 26964 - protein, 197 aa, DROSOPHILA
MNSTQSPVYRTSVEQKRHAQEVAKRQRMGNQMPRLREMLREKYRKRIIETRNRCTDAQREIQLSELREILRLELSELEKDVELEELILEELLSDVNEWYALGEKNLETLYAEPDEQQKEVLCPVCQIKNLRHHKGAFICECGIRFEHSANMEQLQILLQQQIASHELQCTQALRFFIEPASGQLYDMCGSCDYFSSV

SEQ ID NO: 26965 - DNA, 4481 bp, DROSOPHILA
tgaactttgaatttaatattattattattataacattttattaatttccttttcaggaatgcgatttgcgacggtccagattaaggctgctattgtggaactgatatcaaagttcaatgtcaagatcaatgacaaaacccgcaaagacaatgattatgaacccggccaaattatcactggtctgcgtgggggcatttggctcgaccttgaaaagctttagagattcaattacttaataactccccaccagcgacggaaactaatgtgaaaattgagtggcgtagttccccagtctatttttacagaatatttgatatgtatacccagtggtacacttaagctcgcaattggctgactttgttattgcatatgtatatttgttgtttctatattaaatatatttcgtatataaaattgtgtgtgtgcgacataaatataaggttgacatagtaacaacgtcgtagttacttgatattggggtaattgtattatattattatttaattataaattttcttcaaatgagtttggttagttgaaaattagttaagcacagggattttaaataatttttctatctatggtttattgaccagataaaaatgttttcattttgtagaatcctaagaattggatattgttaggcttgctattataaaaagctaccactaactaatattgatttaaaatagacaaccagagatgataacgataggcaaatcgagagctatttatttcgtaaattcaatgttaaggatctgaatgcgagtagactgcacttggacccgtatcgcaatctctggggctattgttctgcctgcaattgggttcaataaacacatatgagcttaacgcgtgggtatctgtcccacatgaaagacgatagagagaggaaaataatacgtttaaatgataagcgcttaagtccgagatacttacccatggcatccatgggaagtcaattggtgatcatttgtcgagcgtaacttaaaccgaacagttgatcaaagacgtttaatcgaggatcataataggattttaaaatttaaaatgcttcttctcttcttggttttactgagcggccttcaggtgcagggctgtgtcaaacaagctcagtgagtataaacgttcgaattttgaattgtttttatttaaattttccggttctggaacttaagggtggttaaaatgcgcggtactttggtaacaatgcgtaagcaccagaactcagcaaattgcaccacaaattgtggacccctggtgggaagaaccagaactgaggtaagctatacctcaacaatcgaccatctttagccgtggtaattttccgatttttccttagacttacttgggctttacggatgtttgctgtgacggctatatacgcgatgaaaataagtaagaatatatcaacttaagaaatacctgctagttcctgcatttcttgttttcgcagcgagtgtgtgccgctgtgcaatgattgtggagcctcgggaaaatgccttttgcccaatgtgtgtttgtgtggaaagggttatgtaagtcgtaaggatcacggtcactgtgagccggagtgcagtgagtcctgcgtgaacggaaaatgtgtggcaccggatgagtgtgaatgccttgctggccatcgtttcgtgaatggctctcaaacggcatgtgagccaatttgtgtggaggactgtgccaatggtcgttgtctggagacgggaaaatgcctgtgcaacaatggctatcagcgggatgaaaagcttaagaaatgtgtgcccatctgccaggatgcctgctatcatggcgactgtgtggcgcccaacgagtgtcgctgtcatcccggtcatgagcagcgcttgggagtgccgtggatttgcgatccgatctgctcgagcggctgcgccaatggctattgccagggtgccgaggtgtgcgcctgcaagatgggctatgcccacaaggataacacccttgcctcaggctgtgagcctgtgtgcaatccaccctgcacgaatggcacttgcatctcacccggccactgcgcctgctccgaaggtcacgtatttgccgagggatcgcgtcacgagtgtgttcccagctgccgttccggttgcgagaatggatattgtagttctcctggccgctgtgagtgccacgagggattcgagaagacatcgccgcaccgctgttcacccacatgccgaccgggctgtggccagaactcccgctgcgccgctccagacacctgtgcctgcgatgtcggctacgtctttgtcaacggcagcaccaccgaatgcgagcccttctgtcccaggaactgccggaatggaatctgcagtagtccaggtgtctgcacatgcttggaaggttttcaggtgggtaataaaactatattcctagtttataatcccacgacttaaacagacgacaagatttcagaagtccctttacggtacttcatccccatttcttaatgaaatcttgatatattaattaagtgtgtattttttattaacaggcccttctctcgttctactgcataccagtttgctcgaaaacctgcattcatggcagttgtgtggcgcccaacgagtgtcgctgcttcaccggctaccgaccaaatcccagtctgggagcgaatgtctgcgagcccatctgcagccagggatgtgttcatggattttgcatcgccccagagatctgtcaatgtgatctgggctttatcaaacgatgggccactgggacctgtgagccgcactgcccacagaagtgcgtgaacagccattgcttgggatcgggagtgtgtcgctgctacgagggatacaagctgaggccgggatcaacgtccatctgtgatccggagtgccagccaggatgcaggaatggaacgtgcgtagagcccaacagctgtgcctgcttcgctggctacgaagacaccaaggtgccgtacgagtgtgtaccctcctgccgtccgagatgcgagaatgggcgatgctcctctccgggacactgtgaatgcgatcccggccatgtggttaccaactccagtgaaccgaactcatgtcgtccccagtgccaggagcagtgcattaatgccgagtgcgttgcgccggagaagtgcgcctgcctacctcgttaccgatttttgcccgacagcagcaccgaatgcgaaccgatttgctcgaaaggatgcctttctgggcaggaatgcgtggcaccagacacctgtgcgggctttgaatccctaataagtccgaccactggcaaacacctggcattccattggtccatgtttgtcctggcaattttactctgcctggctctggtaatgattcccctgttggtgctccgggaaatgcagcgacgtcgtcgtaatggcgacaagcaaagttcccggctaatcgagaatccttcctatggagttgtgcaggcaaacagcgaagatacgaacagcgagttgggcattggattgggggattaaccaaatttattttagagacacccgataaccagatagatctattttttttaaaacccctaggtcaaataggaactttcgaatggttaaggcaggaaaatgtttgtctgtggaaatattttaatttcaatttttatggcttggtttcctttacaatcttctcgttcgattaagttttacactgaaggatgcttggcatcgaaaataatacacacgtatataaatatatatatatatatatatatagttaagctaaacatttatggtttaaagttaaaaacataatctaccgtaataaattaggtaatacttaatattcattgtcggcttcagtttctcaaaatgttgttcatataccagatctagttcacttaaagtatttatctaaacaatgatcaatacaatgttatgttgatgcacaacatctgagaaatgtaacaatcatttgagaaactggagttgtgactgatcctttcaacgttgttatccctttggtttgttttgttgatttaatgggatccggatcttcggttgttcttacttaacaaattggctacttaatgctacaaatacattatattttgtatatgcctaatgtgaattttattaatttgtgtcttacttagcctaagtgccaacccaatcgaacagccctcatcaactccccagcccaccccacaatacaatctatgaacacagtcagcttttgtcctgttccccattacttttatagaaaggtctcctggttggccccacccaatcttcgccagcgccagtcccaccatcatagtggtgcatcgttgggatcgggaggaggctttgccggctgcaggaccaccgggggtggggaggtggtggcagcggtggttggagctataaggaagccactggacgccccaggaagtggcatgcctagaaaactggctactcccgtgttggccgagtcgccatcttccatgacgacagaactgtcggcagccgagggtatggtgggtaggaagcg

SEQ ID NO: 26966 - DNA, 2156 bp, DROSOPHILA
ttgatcaaagacgtttaatcgaggatcataataggattttaaaatttaaaatgcttcttctcttcttggttttactgagcggccttcaggtgcagggctgtgtcaaacaagctcaggtggttaaaatgcgcggtactttggtaacaatgcgtaagcaccagaactcagcaaattgcaccacaaattgtggacccctggtgggaagaaccagaactgagacttacttgggctttacggatgtttgctgtgacggctatatacgcgatgaaaataacgagtgtgtgccgctgtgcaatgattgtggagcctcgggaaaatgccttttgcccaatgtgtgtttgtgtggaaagggttatgtaagtcgtaaggatcacggtcactgtgagccggagtgcagtgagtcctgcgtgaacggaaaatgtgtggcaccggatgagtgtgaatgccttgctggccatcgtttcgtgaatggctctcaaacggcatgtgagccaatttgtgtggaggactgtgccaatggtcgttgtctggagacgggaaaatgcctgtgcaacaatggctatcagcgggatgaaaagcttaagaaatgtgtgcccatctgccaggatgcctgctatcatggcgactgtgtggcgcccaacgagtgtcgctgtcatcccggtcatgagcagcgcttgggagtgccgtggatttgcgatccgatctgctcgagcggctgcgccaatggctattgccagggtgccgaggtgtgcgcctgcaagatgggctatgcccacaaggataacacccttgcctcaggctgtgagcctgtgtgcaatccaccctgcacgaatggcacttgcatctcacccggccactgcgcctgctccgaaggtcacgtatttgccgagggatcgcgtcacgagtgtgttcccagctgccgttccggttgcgagaatggatattgtagttctcctggccgctgtgagtgccacgagggattcgagaagacatcgccgcaccgctgttcacccacatgccgaccgggctgtggccagaactcccgctgcgccgctccagacacctgtgcctgcgatgtcggctacgtctttgtcaacggcagcaccaccgaatgcgagcccttctgtcccaggaactgccggaatggaatctgcagtagtccaggtgtctgcacatgcttggaaggttttcaggcccttctctcgttctactgcataccagtttgctcgaaaacctgcattcatggcagttgtgtggcgcccaacgagtgtcgctgcttcaccggctaccgaccaaatcccagtctgggagcgaatgtctgcgagcccatctgcagccagggatgtgttcatggattttgcatcgccccagagatctgtcaatgtgatctgggctttatcaaacgatgggccactgggacctgtgagccgcactgcccacagaagtgcgtgaacagccattgcttgggatcgggagtgtgtcgctgctacgagggatacaagctgaggccgggatcaacgtccatctgtgatccggagtgccagccaggatgcaggaatggaacgtgcgtagagcccaacagctgtgcctgcttcgctggctacgaagacaccaaggtgccgtacgagtgtgtaccctcctgccgtccgagatgcgagaatgggcgatgctcctctccgggacactgtgaatgcgatcccggccatgtggttaccaactccagtgaaccgaactcatgtcgtccccagtgccaggagcagtgcattaatgccgagtgcgttgcgccggagaagtgcgcctgcctacctcgttaccgatttttgcccgacagcagcaccgaatgcgaaccgatttgctcgaaaggatgcctttctgggcaggaatgcgtggcaccagacacctgtgcgggctttgaatccctaataagtccgaccactggcaaacacctggcattccattggtccatgtttgtcctggcaattttactctgcctggctctggtaatgattcccctgttggtgctccgggaaatgcagcgacgtcgtcgtaatggcgacaagcaaagttcccggctaatcgagaatccttcctatggagttgtgcaggcaaacagcgaagatacgaacagcgagttgggcattggattgggggattaa

SEQ ID NO: 26967 - protein, 701 aa, DROSOPHILA
MLLLFLVLLSGLQVQGCVKQAQVVKMRGTLVTMRKHQNSANCTTNCGPLVGRTRTETYLGFTDVCCDGYIRDENNECVPLCNDCGASGKCLLPNVCLCGKGYVSRKDHGHCEPECSESCVNGKCVAPDECECLAGHRFVNGSQTACEPICVEDCANGRCLETGKCLCNNGYQRDEKLKKCVPICQDACYHGDCVAPNECRCHPGHEQRLGVPWICDPICSSGCANGYCQGAEVCACKMGYAHKDNTLASGCEPVCNPPCTNGTCISPGHCACSEGHVFAEGSRHECVPSCRSGCENGYCSSPGRCECHEGFEKTSPHRCSPTCRPGCGQNSRCAAPDTCACDVGYVFVNGSTTECEPFCPRNCRNGICSSPGVCTCLEGFQALLSFYCIPVCSKTCIHGSCVAPNECRCFTGYRPNPSLGANVCEPICSQGCVHGFCIAPEICQCDLGFIKRWATGTCEPHCPQKCVNSHCLGSGVCRCYEGYKLRPGSTSICDPECQPGCRNGTCVEPNSCACFAGYEDTKVPYECVPSCRPRCENGRCSSPGHCECDPGHVVTNSSEPNSCRPQCQEQCINAECVAPEKCACLPRYRFLPDSSTECEPICSKGCLSGQECVAPDTCAGFESLISPTTGKHLAFHWSMFVLAILLCLALVMIPLLVLREMQRRRRNGDKQSSRLIENPSYGVVQANSEDTNSELGIGLGD

SEQ ID NO: 26968 - DNA, 8164 bp, DROSOPHILA
cctaatagcacgtcgataatgggtacgatcggtaaatagcaagacagtttccgcttatgatttatcatgcaggctctggatgttacaaaatgtttcaattgaacacctctaaccattagattacaaaatcgacaaacaaatttagattgcgagtaatgttaatataaaaaagtttaaataattcaggattcaagcattacaattttgtgcatttgtattcttcgaaatgcccaattaatatgaaaaatatttaaaattaaacgtgactgaacaaaaaaaaaactttttcacaaaagataagtcatgttgttattaataattgaaagtaaagaaggtagacaatcttatttcttcccatccattcagcacccgtccaatcaatatacacgcacccactcaagcatctaactattttagctggtgttttagttgactggtctacgatctagaatttcgattctctatgttacactacaactgctagttactatctggtaaatatttacttgttgttgctcttattgatttcatttttctgtttcggttaggcacaaagtaactggttttcatttcatcatggctcacgatcgaatgttgcactattacacattttcatttattttctagttatatttagtgggtactacgaatttattgaacagttagtgtggttttcctataattctctctcgttacatttaaattttaacatattgctagtttgttcttgtcttttgtcgtgcaaaccacattgaattgctgtcatatggaaaatacaggtgtccttgtgtattctatatgtgtctaatctaaactgtatattctattacaattaaatgttcctttttgacaaaaaaaaaaaaaaaattagcgaaaaggggtggaggtaaaggatgtagaaaggatgtgtgtttacagtttacagcgaaggatgagttttattccactcggattttagtctacgcgagagaaccgaaaatatcgagcaaaataaaccaaattttaaaatcatataaaaatatatttttattaaataaagcagtttatgaactaaatgaaacttttactaaaatcagcgataatactccaagtcatagggttagtaacagcgttccaaagttcatactctcatatcattattttgtaagctttcttatagaaatgtaatgtaatgacgaagtaaatcaaatgaagtgctttatacaatgtaaaaatttgtatgtatattttcatttcctttaaatgcaagagttacaaattctaatgttttaatgttgacaactatagtgtgtgtgttttttttgtatactcattttacatgatctttaggcttataatttgaaaagcattcaaaatgcacaaaacaaattttggatctatacaaatttaagtttatgttttggtataacaaattttgaaaacatgtttcgatgatgtggtggccaaagcaacgtgtgattttttttactgtatttaatcaacagaaaaccgatttgtgaaaattgaactacgcgtgtctctttgccatatgcagttattcttagttttgctgtttgtctcgttagaatagatataatataataatatgcgcatataatacgtttatataaataattaataatagtactcataatcattaataattcatcatctgttcgtatgcataacagttattgttgctattgtggttggtgttgttgttgttattgttgttgttgttcttgttgttttctgcagtagtaattcatcagtagtggttaaataagcggtttcttcttggttgtcaatcagttgcccttggtagcctcctttgcggccatgatcaagggagtcagactggccaatggacgggccagttttaggaagggatgctgcaatggagtaagttgagtgataccccataagctggaagtcaccttggcacgtggactgaaagactcacctttagcaagtccaatgcgcttgctcgccgatccacctccacctccagacactggtcgaggaagtcctgaaatgctgaggacagcttgtctttttctttaatctctggcttgccattggtggcaatgaggtacaaggctttaagcggattctcgtttaggtacggcggttcgccctcgaccatttctatggccataatgcccaaagaccaaaggtccacctggataggaaaagcatcgttagaatgttgaaatatttaaatattcaaatgtttcgtgagagtgctcaccttgggtccgtactgtttccgggtgacgacctcgggagccatccagtagggtgtgcctaccatcgttgtgcgtttggattgctccggcgatatttgcgcacagaaaccaaagtcagtcagcttgacagagccgtcaaggcccagcagaatgttatcactcttgatgtcgcgatggataacctggttggcgtgaaggaactccagagcttgcagcacttctcggcaaacagctgcgatctggccctcgtccatgcaggtctcggtgacgacgtcggtaagagagccgccgggcaggtactccatgaccacccacagttcctcagacacgaggtagctgtcaagatagttgactacatttgggtgtttgttctcccgcatcacaaggatctcgttgatgatgagctcctttttaggctgctgtgacaggttcatctgcttgatggccacctccatgccggtcgaggattcaattgcagtatacactgtgccagaggcaccctggccaatcttctccatcttggtgtactttcgatttggatcgcccacagagacaatggtgcgcagtttctccaagatctcctcgtcggacatctttttcttcttggcgttggctgccctcgtgttgggcgttgcagccggagccacagctgcctggggcacggcgatttggtttccagccacttgagaacttgggccaccggctgacacttgggctaccgtgggttccggtgtgtacagatctggtgattcaatggaggcgggtgtgggcgatgcgggcgtaacgatgggcggtaggggaaccgcaacaggaaacgaaacagtcgagttgcgagaggaagacgtcggcgtgggacaatggatcgttggcaaggcgtggtgtgtgccatcgtcgtcgtggaacgaaggaaatgatgaaaaggaggaagcagaggaatggtgattagtcgttgttgatgtggctactgtcgctgctgcagtggtagcgtgtgctgttgctgtctcgacgagactaccacgaggtgcagctggagcaggatcagtagtaggagtggtagaacaactaggattagtagctgataaaagagttgatgttgcatcggtgccttctgtttctgctgttgtttttgtggttgttggggacgttggagctggcgtcgtcgcagttgtttaattattttttttagcagcaattagaagcggaacaaaacagaacagaacacagagaggcgatacaaataccaaaatacacattcattaaatcggcaccacaaaaggattatagtgtttgattatatagcaacatagaaaaactatcacgacacatcgcaacctttgagccccggcagcaaattagatgttagcaatatagaaaagttatcttaaactaacagtgtaatcgaaaaaaaaaactgaatatttaatcagcttcggttaattgcactacttgttaaccaacttacattatcttctgtattttgaaaacatttttaagagactacgaaattcttttttgacaacaaatttttttgcacgtgagtacagaatttttaataactggattcagaattgtacttgtcgatctagagttttgctgataatagttttcgcatgacttgctgccatggctctttgtaaggtagatgtaactagctatgatccacatatcctagagcggcactcacttgcattgtttttattcttgtccagcgtcgtcgtggcattgttgtgcatcattggcgatgccgctggtgctgatattccgcctggcgtcctatgattttgcagcggcgttgcaggcgtggttgctggcgccactggcattgggatgatggctggctgtagatcctcgattggccgcgtgtagatggatttcgtgcgctcaggcctagaggccaccggtggaggtggcggctgttgctgcgggtgctgtggtcccagcatatcgtcctcgttagcggatgaatgttgcgatgtggatgaggagaccgtgtgtccgacaaagttgtacgagtgcgattgacttatgcccatgtgatgctggttgtggttctgatgcaaaagtggctgctgctgctgaaggaggtgctgctgctgctgttggtagtggttgcccagaatttgcccagcaacggccacgttgttggcgttgggacccagagtcatactgcccaactggacgccaatcaggttacctccgctgttggagccgtgcagctccgagtctgttggcgtgctgctcggactgctgctgctgacgcggctgagcgatgaacctggcaaaggagagagcgtttcaatattacaaataagctatattcataaattttctaaatatggcggaacttaaagcaatctcaaatcaactaacaaaatatgttgtgttatgttgcaatcctagatcttaaatctgactgagtgaccaacctgaatgcgtcgtaatggcatttgtcatgtacttggaacttggcctctgtttggtagtgttgtcgaaccacttgagcacatccagcacggcctggggattcttcttctgctcctgcttgctgatgttggagttcatcaggagtcgcgcccatgcctccggcatgccctgaaaaaggcaacaggttagattgttagatggaattaaatagaacaatttactgcgatgggagaacatctagaaggcgcggggtaaaaaaatatttttggcttttaggtacatcgatgcacggccaattattgtgatcggagaatgatgaagagccagcgactagaggcctttcagctacgaattccgggcagcctgtgttggtgcaatgtcgtatggtctagtgtaggagttttgtaagagtacgaagataagaatgaaccaatagtaacaaacaaagggtaacaaaactataagtaatatcgatcgaacttgaaacaaacaccgactcgacaaaatctacagacaaaggagcacaatgagaccttattgagaaactaatgaaggcaagttccgagaagttagtcgagaagtttacttactttcattggcagcttgaataataatagaaattgatatagagcaagaatcgcgagagatagatttagacaacagaatgtatgtagaagtacagtgttttatatgtatgtatatatggtgagcgccaaaacaaattaaaaatatattaacaaatttttgggtgacctggtgagcaatatttacttgattaaatttaatatttagaaacccgaaatgcagttcagtgtttggggtctgatcgaggccgccggtttgattacaatctcggatcgaatttaaaatttggaatattaataattgctcaatttatggtccaagatcgtggcgtttataataactccacacattaaattgtaatgcaattactatcgtcacccaaaaatgtaatatgtaatctgcaaacgaaactttaagtctttggtgactgtgtttttgcatataaatttggtgtacaaaagcttatcaaatagaggacataagcagtgaaaaccgaagatttccgacttgctattcttagacagaaagccgtaggcataatggcgaggcaaacgcgactgaaggtgtccatagacgagcataatagaaaactcacggtaaactcgccggtgacagcatcgaatcccacatggaccgtgtgctcaaagttcgtgggataggagatgttcggcttggagtccgtgtgcgagggcttcgatcctttgatcttgctcttcagcgttttcttcttccgatcggagtcgtcgggttctttttgggagaagagaaaaaagcacattgttaagcggaccagaggtcttcacatgccgtgctcaactaatcgaaatgtactcacccttgggcagcggacgcatgtcgggcggtacatctcccataccgccacctcccagtcctccgccaccgacgcccactcctcctcccgatcgttcattgccgccccggttgctggtgagacgcacaggcggcgccggcggtttgtcttcctcgctggacatggattcgtctttgtgtgcttctggctcttctggttagctcctgcttcctcctcctccgcttcgtctagcgccccgttatgcacagctgttctacgcccagaaaacagctgtcgagagtgggagaaagggatcagtatgttggccataactaagtatttcgccttaactaaaatgtactaaatatgagacaactatcttaacgattttgtatcattgatatattttcaattcttatattactaagaaagactatacattttttaaataagtgctttttccaagaagaacatataattttaaatgtaatatgtgctagatgttttctaaagcaaattatttagaaactggtgatttcatcaacacagttcgaaattgggaacagtgcagaaatgatttaatgcttggagtattccaggggtgccaaccttctgttatctatcgcgaaaagtgttccgcagcttatcttagtatatatttcgttctgtattctttccccaacgtattgcaatcgcgtcatatgcttctacaaaatcacaaatttgtcatacaactacaagagatagattgtttgcatatatttttctcgaacactttggcgttgtgtgtttcacaccattctgcacaaagttattcatttttggcttttgattattattttttttttaccgatcttcatgaagatcacgtcaatactgtgtgctctagattttttggcacgcggaaagcactttgttttgctttttgaatatgttcaaaaacacaacacctacacacacacacacacacactggttggctgcagcaggagaggagacatatagccgcagttataaatttatcaatataggccgtccggcgaactaattcggactgtgggcccgctgctcagttgttccgtcagcgtgtctcccaccttcgagtgtcactgccactagagcaggctgcaaaaggcaacaaacaacatacatcgctccaagagattgtctcgagcaccccagctcgcgagagtgcctcccctacattgcttaaaagctgattgatatgggtattcgaattttgtatactctccgaagctaattttataaattagttgagactatacatttcaattcagcaattattgcgcatctatgtgaggaacttaaaatattatcctatttaagttaagtgtgcattgatcataattgtatacccacatctattcacttttagttcatttattttaaatattcattggagcacctatagagcatatggagttaaaaaatatgacccaaaatggaataatcattaaaggactatattttaatttcagtttccattagacgcaaaccactgttctcacacaacacactttaagggtatcctctctacctcagttgctccgctctcgcccacgtaaacgatcgagagccataaaaaattcgttgcgataacaagagtggcttcgattgcactcataataaaaacaaagcagctcacgcattgggaattacagcaacacaaatgaggaaattaagcagcgaggacagcaacaacataaacacactcgagtgggcggcatcgcagccaaacatatgagcgagagggcgaaaaggagtgggagcgcagagtggcgaggagagcaaggcggctttggcgcctgtctgctttgccggcgacgtcgactgcgctgcttttatgattcatttatcatcgtcaggcgtcaagagtcaatgcagctaacgggaggcggagagtctgggacgagggggtggcgaagtgtgaaaacgttggacaaacattaacatacagttccaacagctgtggtcaacttaatagcatagcggggatctaataagatatcaactccaacttttgaatcatcagaaaaaagggttcttagtgaccaatatatgtacatatatgtgtacataagtatataagagaatca

SEQ ID NO: 26969 - DNA, 3171 bp, DROSOPHILA
agtggcagtgacactcgaaggtgggagacacgctgacggaacaactgagcagcgggcccacagtccgaattagttcgccggacggcctatattgataaatttataactgcggctatatgtctcctctcctgctgcagccaaccagtgtgtgtgtgtgtgtgtctgttttctgggcgtagaacagctgtgcataacggggcgctagacgaagcggaggaggaggaagcaggagctaaccagaagagccagaagcacacaaagacgaatccatgtccagcgaggaagacaaaccgccggcgccgcctgtgcgtctcaccagcaaccggggcggcaatgaacgatcgggaggaggagtgggcgtcggtggcggaggactgggaggtggcggtatgggagatgtaccgcccgacatgcgtccgctgcccaaggaacccgacgactccgatcggaagaagaaaacgctgaagagcaagatcaaaggatcgaagccctcgcacacggactccaagccgaacatctcctatcccacgaactttgagcacacggtccatgtgggattcgatgctgtcaccggcgagtttaccggcatgccggaggcatgggcgcgactcctgatgaactccaacatcagcaagcaggagcagaagaagaatccccaggccgtgctggatgtgctcaagtggttcgacaacactaccaaacagaggccaagttccaagtacatgacaaatgccattacgacgcattcaggttcatcgctcagccgcgtcagcagcagcagtccgagcagcacgccaacagactcggagctgcacggctccaacagcggaggtaacctgattggcgtccagttgggcagtatgactctgggtcccaacgccaacaacgtggccgttgctgggcaaattctgggcaaccactaccaacagcagcagcagcacctccttcagcagcagcagccacttttgcatcagaaccacaaccagcatcacatgggcataagtcaatcgcactcgtacaactttgtcggacacacggtctcctcatccacatcgcaacattcatccgctaacgaggacgatatgctgggaccacagcacccgcagcaacagccgccacctccaccggtggcctctaggcctgagcgcacgaaatccatctacacgcggccaatcgaggatctacagccagccatcatcccaatgccagtggcgccagcaaccacgcctgcaacgccgctgcaaaatcataggacgccaggcggaatatcagcaccagcggcatcgccaatgatgcacaacaatgccacgacgacgctggacaagaataaaaacaatgcaaatctgtacacaccggaacccacggtagcccaagtgtcagccggtggcccaagttctcaagtggctggaaaccaaatcgccgtgccccaggcagctgtggctccggctgcaacgcccaacacgagggcagccaacgccaagaagaaaaagatgtccgacgaggagatcttggagaaactgcgcaccattgtctctgtgggcgatccaaatcgaaagtacaccaagatggagaagattggccagggtgcctctggcacagtgtatactgcaattgaatcctcgaccggcatggaggtggccatcaagcagatgaacctgtcacagcagcctaaaaaggagctcatcatcaacgagatccttgtgatgcgggagaacaaacacccaaatgtagtcaactatcttgacagctacctcgtgtctgaggaactgtgggtggtcatggagtacctgcccggcggctctcttaccgacgtcgtcaccgagacctgcatggacgagggccagatcgcagctgtttgccgagaagtgctgcaagctctggagttccttcacgccaaccaggttatccatcgcgacatcaagagtgataacattctgctgggccttgacggctctgtcaagctgactgactttggtttctgtgcgcaaatatcgccggagcaatccaaacgcacaacgatggtaggcacaccctactggatggctcccgaggtcgtcacccggaaacagtacggacccaaggtggacctttggtctttgggcattatggccatagaaatggtcgagggcgaaccgccgtacctaaacgagaatccgcttaaagccttgtacctcattgccaccaatggcaagccagagattaaagaaaaagacaagctgtcctcagcatttcaggacttcctcgaccagtgtctggaggtggaggtggatcggcgagcaagcgcattggacttgctaaagcatcccttcctaaaactggcccgtccattggccagtctgactcccttgatcatggccgcaaaggaggctaccaagggcaactgattgacaaccaagaagaaaccgcttatttaaccactactgatgaattactactgcagaaaacaacaagaacaacaacaacaataacaacaacaacaccaaccacaatagcaacaataactgttatgcatacgaacagatgatgaattattaatgattatgagtactattattaattatttatataaacgtattatatgcgcatattattatattatatctattctaacgagacaaacagcaaaactaagaataactgcatatggcaaagagacacgcgtagttcaattttcacaaatcggttttctgttgattaaatacagtaaaaaaaatcacacgttgctttggccaccacatcatcgaaacatgttttcaaaatttgttataccaaaacataaacttaaatttgtatagatccaaaatttgttttgtgcattttgaatgcttttcaaattataagcctaaagatcatgtaaaatgagtatacaaaaaaaacacacacactatagttgtcaacattaaaacattagaatttgtaactcttgcatttaaaggaaatgaaaatatacatacaaatttttacattgtataaagcacttcatttgatttacttcgtcattacattacatttctataagaaagcttacaaaataatgatatgagagtatgaactttggaacgctgttactaaccctatgacttggagtattatcgctgattttagtaaaagtttcatttagttcataaactgctttatttaataaaaatatatttttatatgattttaaaa

SEQ ID NO: 26970 - protein, 704 aa, DROSOPHILA; identical to SEQ ID NO: 21759

SEQ ID NO: 26971 - DNA, 5690 bp, DROSOPHILA
ctccgtctccccaaatgattttctcacacacgcaaacagtctctcataacgatgtccaaattaaagccggcttttttgtacacattttatttatttatttgtttattcgtttggccgatgtcgttgtcgttgatgttgttgttgttgcttttgctcttgcttctgcttctgtccattaaatgaatttctatctctgcggctgcgtgcctctgtgttggtgagagccccaagtctggttttggggtctcgctccctctctgcgggaaagaaagagaggggtcgacatatgcaaacacagttgaattgatttaagcgtcgattaacgcacacactcaaaacgcacggtgggaattcgagctttttaaaactaaatttagaaacttcagaacgcgtggtgacgtggtgatatattgatatgatcgcacttcagaatacctaaccaactatgttagaatataaaacttccaaaacagaaatgttaataagatttagaggggaaattcattatttattcgtttattaaaaagtatttttttgtaataatattattttcatatccatgtcaaaaagcttacataaagcattatggaacattattaaacagcttttatttgttttcatagaaagagagtaatatttattaacgtagaattttctgaaatcagaccactgtgcggtggcgcagagagagcaggagaggtgccaagaaacaacatacgataccgcgactgaaaaatttcgagtcgtgtgttttttcattaatcagttgcattaaaatggtgcgcaagtccggtagagttaagatttctagtcgcgatcgcgttgccgttggcaacattctgctgcgtggcaaagtgggcggtgggcgggtggcagttgcagcggcagaggaggcagaggcggggcgacgtcgacgcaggcgcgacagcagcgccagccgaactgcatccagtgacggtcagttgttgcttttatttttaatattgttgttatttgtgcagtttctgtttgttgctattgcgcgatttttcgctggttttcacacaatcccaactctatgaccactgtgtatcgtacgttatacagctgcgatcgaaataaaagaaaaactaacaaaaataccagtaaataatttttattggtacatatatacctttttatgaaaaaatagtagtcttaaaggaacacatacacattatttagtatcgacttcatattatatatgataaagaaaattatttctctattagactctgtgcagaaatttcggactgtgtatgtttttaattgctctttgattgcaaagattgtccgtggatttaaaatggcatatccagttgctgcaaaaccttagcgaggaatttgcgtaggcatgatcaaattctaaaactgtgcgtgcgcccagcacccgcagcttcaaaactgtggatctcaccatgacggaacactttttacaacaaagcgatttacatttgaagattagaatattttccattttaaagaagtagaactagttcgactgggctggtggggttatgactttaagaagtatttcaacagtttatattgctcacttatttactgtacatatattaaagtttaaggccgccctcgtaacatttaagactgtgtcaggaatatatgtacgtttttctaatgaagattttgttcatacaactcatcttatgaataacacttttacctgcttttcgttgcagaatcggagagccacataatgcacgcggatgccctggcctctgcctatccggctgcctcgcagccccacagtccgatcggcctcgccctcagccccaatggcggtgggctgggactgagcaacagtagcaaccagagcagcgagaactttgcgctctgcaacggaaacggaaatgcgggcagcgcaggaggcggaagtgccagcagtggcagcaacaacaacaacagcatgttctcacccaacaacaacttgagcggaagcggaagtgggactaacagcagtcagcagcaattgcagcagcaacaacaacagcaatcaccgacggtctgcgccatttgtggagatcgggcgacgggcaaacattatggagcctccagctgcgacggctgcaaaggattcttcaggaggagtgtcaggaaaaatcatcagtacacttgcaggtacacatatgtccttatacgggactagtagggagattaagattttcccaatgccaaatttccagtcagaaataatttgtataattcataacgataaccctggtgggacgtgtcgggacctggcggaaaattctaagtttacgactatctatacgcattcgttactcaacttaaacttctcttggcagatttgcgcgaaactgcgttgtggacaaggacaaacggaatcagtgccgctactgccggctgaggaagtgcttcaaggcgggcatgaagaaggaggcggtgcaaaacgagcgggatcgcattagctgccgccgcacctccaatgacgacccggatccgggcaatgggctgtctgtgatttccttggttaaggcggagaatgagtcgcgtcagtcgaaggcaggcgctgccatggagccaaacattaacgaggacctctccaacaagcagttcgcgagcatcaacgatgtctgcgagtcgatgaagcagcagctgctgaccctggtggaatgggctaagcagattccggcctttaacgagctgcagctggatgaccaggtggcactgctacgcgcccatgctggcgagcatttgctcctcggcctgtctcgtcgttcgatgcacttgaaggatgttctcctgctgagcaacaattgtgtgatcacaaggcactgtccaggtaatgtttttgatactatcaaaacctataagtgaaattggtataacctttgcaatcattctttttccagatccccttgtgtcgccgaatttggacatctcccggatcggcgcccgtatcatcgatgaactggtgacggtcatgaaggatgtgggtatcgatgacactgaattcgcttgcatcaaggccctagtcttcttcgatcccagtgagttatttaacttatttacaaaagtgaccgtttaataattggttcttcaaataactttagatgccaagggtcttaatgaaccgcatcgcatcaaatcgctacggcatcagatactcaataatctcgaggactacatatcagatcggcaatacgagtcgcgcggtcgctttggcgagattctgctcatcctgccggttctgcagtctattacctggcagatgatcgagcagatccagtttgccaagatctttggagtggcccacattgattcattactgcaggaaatgttgttgggaggtcagtatttaaatgttgcaaatatacgtttggaacaatttattaatttaatttttgtgtgtgtgttaataggagagttggccgacaatcctctgccgctatcgccgcccaatcagtcaaatgactaccagagtcccacccacacaggcaacatggagggcggtaatcaagttaactcctctctggactcgctggccacgtccggtggtcctggctcgcatagtctggacctggaggtgcagcacattcaggctcttatcgaggcgaacagtgcggatgattccttccgggcctacgcggccagcactgcagcggcagccgctgcagccgtctcgtcctcctcctctgcacccgcatccgttgctccagcctcgatctctcctccgctcaacagccccaagtcacaacatcaacatcagcaacatgcgacgcatcagcaacaacaggagagctcctacttggacatgcccgtcaagcactacaatggcagtcggtccggaccgctgccaacacagcacagtccccagaggatgcatccctaccaaagagcagtcgcctcgccggtcgaagtgtccagcgggggcggcggattgggtctgcgcaatcctgccgatattacgctcaacgagtacaaccggagcgagggtagcagtgccgaggagctgctgcgacgaactccactgaagatccgggctcccgagatgctaaccgcacccgctggttatggaacgggtgcgtagtagattgattcgaagcaagaagacatttcaataatatattttatatactatttcagaaccctgtcgcatgacacttaaacaggagccagagactggttactagaagaataacgaacggtgcaatatgcagtttgcaataggacaccccttaagcacacaacccatacacatacaggccctctcttgctgtactccccaccaagtgctatatagagatgaaattgaaatgaagaacttacttaattgttatgccttgaaccattttgatactttttattagtcctaagtaggtattttggaaattgttgcttaatttttaatgtttaacgcagttgcaatatatttttggagtcatattttgctcaagaagtttattatatacaattatactatatatatacaccatttagcatgtactgagtttgttggttatttggttatcttatacttgtgcgtggatcacaaaacattcatataaggccatgcaatatattgttttaggttagggtgttgtctagattatgctgaaagtgtaatatatatttaattttaaacaaagaactatttttatatgaatatgtataatatacaaactatttctaagatggctgaatgaataaacaaaatcaaaataaacactggagaatatgaatgtaaatcgtttactgcggcatttttactagtaataaatattactataatttataatttatgccatctctttcagcaacaactttaaatatccaaactgataaagcgatatatgttcctatgctcccacttagaacgtaaccctgatcctgcatagaaaaaattcaataacgtattacaaagactaactaacgtttatttatcgatattgctaatgcccgtcttctcgacctgggcgaggagctcttggagcttgttgtcgaagagctcgcatcgaatgggcatctccagggagtagaaggggttcttgagcacgtagtctgagtacagctcgtaaacctttcgcagcagcagatcaatgccattgagacccgtttccgagattataatgaacttgattccggtcagcgtttggaagcagtgcagcgtgaaagtgtccgcctctaggatctcgatgccggaactcttgggctccggactcagttggctggcgatggcgaacagcgggtagaacatgctggccagaaagattttctcgttggtggtcatctttggccggctgaacttcaggttaatgggatagttctccggtgcatccagtgtcgtcctcacatcgcgtccatcatccagggtgactccattgacgggcataccgttgaccgccaccaggacatggcccactgttcgtaagcatatattaaggtggttatgtttctaaaattcacagacacacccaccatttattccatcctttctgttgaacgagaccgataccttcttggaatcgtagtccagcaccaagtccagagggtatgtaaaggtcttctcgtgctcaatgcgtggcacattgttgtccaggttgaatataaggccacccgatttactaactatatagacgccatatataatcatttcttactattactaattctaagtttcctaggaatgt

SEQ ID NO: 26972 - DNA, 2656 bp, DROSOPHILA
gtttctgtttgttgctattgcgcgatttttcgctggttttcacacaatcccaactctatgaccactgtgtatcgtacgttatacagctgcgatcgaaataaaagaaaaactaacaaaaataccagtaaataatttttattgaatcggagagccacataatgcacgcggatgccctggcctctgcctatccggctgcctcgcagccccacagtccgatcggcctcgccctcagccccaatggcggtgggctgggactgagcaacagtagcaaccagagcagcgagaactttgcgctctgcaacggaaacggaaatgcgggcagcgcaggaggcggaagtgccagcagtggcagcaacaacaacaacagcatgttctcacccaacaacaacttgagcggaagcggaagtgggactaacagcagtcagcagcaattgcagcagcaacaacaacagcaatcaccgacggtctgcgccatttgtggagatcgggcgacgggcaaacattatggagcctccagctgcgacggctgcaaaggattcttcaggaggagtgtcaggaaaaatcatcagtacacttgcagatttgcgcgaaactgcgttgtggacaaggacaaacggaatcagtgccgctactgccggctgaggaagtgcttcaaggcgggcatgaagaaggaggcggtgcaaaacgagcgggatcgcattagctgccgccgcacctccaatgacgacccggatccgggcaatgggctgtctgtgatttccttggttaaggcggagaatgagtcgcgtcagtcgaaggcaggcgctgccatggagccaaacattaacgaggacctctccaacaagcagttcgcgagcatcaacgatgtctgcgagtcgatgaagcagcagctgctgaccctggtggaatgggctaagcagattccggcctttaacgagctgcagctggatgaccaggtggcactgctacgcgcccatgctggcgagcatttgctcctcggcctgtctcgtcgttcgatgcacttgaaggatgttctcctgctgagcaacaattgtgtgatcacaaggcactgtccagatccccttgtgtcgccgaatttggacatctcccggatcggcgcccgtatcatcgatgaactggtgacggtcatgaaggatgtgggtatcgatgacactgaattcgcttgcatcaaggccctagtcttcttcgatcccaatgccaagggtcttaatgaaccgcatcgcatcaaatcgctacggcatcagatactcaataatctcgaggactacatatcagatcggcaatacgagtcgcgcggtcgctttggcgagattctgctcatcctgccggttctgcagtctattacctggcagatgatcgagcagatccagtttgccaagatctttggagtggcccacattgattcattactgcaggaaatgttgttgggaggagagttggccgacaatcctctgccgctatcgccgcccaatcagtcaaatgactaccagagtcccacccacacaggcaacatggagggcggtaatcaagttaactcctctctggactcgctggccacgtccggtggtcctggctcgcatagtctggacctggaggtgcagcacattcaggctcttatcgaggcgaacagtgcggatgattccttccgggcctacgcggccagcactgcagcggcagccgctgcagccgtctcgtcctcctcctctgcacccgcatccgttgctccagcctcgatctctcctccgctcaacagccccaagtcacaacatcaacatcagcaacatgcgacgcatcagcaacaacaggagagctcctacttggacatgcccgtcaagcactacaatggcagtcggtccggaccgctgccaacacagcacagtccccagaggatgcatccctaccaaagagcagtcgcctcgccggtcgaagtgtccagcgggggcggcggattgggtctgcgcaatcctgccgatattacgctcaacgagtacaaccggagcgagggtagcagtgccgaggagctgctgcgacgaactccactgaagatccgggctcccgagatgctaaccgcacccgctggttatggaacggaaccctgtcgcatgacacttaaacaggagccagagactggttactagaagaataacgaacggtgcaatatgcagtttgcaataggacaccccttaagcacacaacccatacacatacaggccctctcttgctgtactccccaccaagtgctatatagagatgaaattgaaatgaagaacttacttaattgttatgccttgaaccattttgatactttttattagtcctaagtaggtattttggaaattgttgcttaatttttaatgtttaacgcagttgcaatatatttttggagtcatattttgctcaagaagtttattatatacaattatactatatatatacaccatttagcatgtactgagtttgttggttatttggttatcttatacttgtgcgtggatcacaaaacattcatataaggccatgcaatatattgttttaggttagggtgttgtctagattatgctgaaagtgtaatatatatttaattttaaacaaagaactatttttatatgaatatgtataatatacaaactatttc

SEQ ID NO: 26973 - protein, 666 aa, DROSOPHILA
MHADALASAYPAASQPHSPIGLALSPNGGGLGLSNSSNQSSENFALCNGNGNAGSAGGGSASSGSNNNNSMFSPNNNLSGSGSGTNSSQQQLQQQQQQQSPTVCAICGDRATGKHYGASSCDGCKGFFRRSVRKNHQYTCRFARNCVVDKDKRNQCRYCRLRKCFKAGMKKEAVQNERDRISCRRTSNDDPDPGNGLSVISLVKAENESRQSKAGAAMEPNINEDLSNKQFASINDVCESMKQQLLTLVEWAKQIPAFNELQLDDQVALLRAHAGEHLLLGLSRRSMHLKDVLLLSNNCVITRHCPDPLVSPNLDISRIGARIIDELVTVMKDVGIDDTEFACIKALVFFDPNAKGLNEPHRIKSLRHQILNNLEDYISDRQYESRGRFGEILLILPVLQSITWQMIEQIQFAKIFGVAHIDSLLQEMLLGGELADNPLPLSPPNQSNDYQSPTHTGNMEGGNQVNSSLDSLATSGGPGSHSLDLEVQHIQALIEANSADDSFRAYAASTAAAAAAAVSSSSSAPASVAPASISPPLNSPKSQHQHQQHATHQQQQESSYLDMPVKHYNGSRSGPLPTQHSPQRMHPYQRAVASPVEVSSGGGGLGLRNPADITLNEYNRSEGSSAEELLRRTPLKIRAPEMLTAPAGYGTEPCRMTLKQEPETGY

SEQ ID NO: 26974 - DNA, 26032 bp, DROSOPHILA
aactgtttggaattcataaccatagccaaaagatggttcacacattattcaattgcagcttcatgtactgctttcgctcctggtcgagtggtgaatgattgtgcgttttgatgtgcactatttttccgtttagcacatggagccgaccatggcacttggtctttgtggtgtactgtgtgcagcgccagtaggtttttccatttatgcacttctctcggatgaaggggaacttcttgtgcaacagcagcacgtggcccttctggctgacaacgtactcgaattgtttttctaaaaagagtggaaatgtaaaaggttagtatgggttacctaatgtagacacaagcaatggcaaatggcaaatggcaaatggcaaagaagctaataaaaaagttttgccaatcaatgtattttctttttatttataatgattgaatgctccactgtcgctcgtctctaaagtacaccttattccaactacagtatccctaaacgtcgtgagtaagttcattgagctcctcctcgtgcagatcgaagctgacgccgccagctccctccatctcgcagtccaatttggtggccatttggtgcggatcccttagcgtttgcgccttgctggagctgtacttgttccgcttgagctcggcgtgcaggtgttccgccttgttgatgatgaacttgggcggcgtctcctttaacatggtgatgcgtgcaggacacttgagcttcttggtggccatcgagctgcatcgccacaggatcttctttttgttctcgctcatgatcagaaagcgaatgccattggccatgatggcggggcgaccgcgcagcgattgcgtaaaaaaaaccagcacatcttccggattgggcacctcgtcgttggccagaacaactgcaataaagaaagatggtattagatgtggtcgaaagtgttgggtaatacaagtatacattcaataaattggacaattatttaggtgtctcatatttttctttttgttttattaacatgtttctgcgaaagactcttaaattacatatcgaacatgtgcgccatgctctgaggaagactcctcacgttggacaccacaggagtccttattttgggaccgtctcccgtgccagagttttctttgcgcttcggtcgaatgtggcagtgatcgtggatctgccggaagtcgttgctatttgtcttgctcatgcaaattagcactgggcacttggtatgccgataataccaatggcagcgccagtacaaattcgtgcggtttatgttgttgcggaagaacttcatcccatcgagccacaggagctgcccgccacgtttggacacggagaactgaatctgcggattgttaccgcgatactgtccatgtccgtaatcgaattctgaaagaaacccgaatacagaagaatgaatttagtaacttgttctaatttcttaagctaaggcaattgaattggttgagatagatacttaaaggtattaaaaaacatttgacattgcttcgctttaatacaaatattctacatgcttatggactaggtgcttagcagtatcttattgcagctagaagtcctggtttctaagtttcgattttatttcaaggagtggcggcggctccattatgagaggaggtacacgggcaggctcatgattcgtatccggatcggtttcattatccaactcagcctcgggttccgcttgtgcctcatcctctgcggattccgctaactttgtttctgagccgggcagaggcttgatctcaatgtcgttgctttccgtgtgctggtgctggtgacaaagtcgcaggatgagagtggactcgtcgtggatggcgatggcagggcaacgctccttgtaataatttcggcatttccagtactgcagatgaccgcgcttcttgtttcggaagaagcggaagccattgatcaccagcaacttgccgccgttcttcttggagtccgcgaagtcaatgtgaaatgctgtgaatgaaatagaaagtctggattagtttgggaattcgtgaacaagtgctacgtcaaaagcgtaggtctattcttatggaaacagatgtagttcgtcgtaaatttcgtttaaaattaaaagcagtcatttatttaaaagtggattgttagatgtcttatggttttgacaatgtgcacttaaatgtaagcctatgacgcatccagagatagggccttctccctttttatgagcacaggcaggtttacgttattgctagggaatttccggctgtgatcatgctcgtaggtgcatttgatgattcgctcctgtgagtttttgtccaccgcggtcacgacacgagccctgcagaccgtcacatcctgttggtgggacaaaggaatacgtcgttactttagtttataacaaggagtctctgtgcttcttgaaattctcttttttagaaatctattaattataaactcttgtttctttaactatgcatattaaacgtatacatatatttaattaaaaaatcaaggaatatactataatattcttagcacaacacgaaaaatgatgagcagactttatcttaatgatttctcttatacaaaacctgaattctatgattttcagcaaaatcttgtagtttaacttacctttttcgagcatatccaataagtacgagaggcggaacatcggttcttaacgaacttctcgttttggaagagcagcacggttcttccccgctgtccagtgccgaagacagccagttctaaaaggattaagcagataattagaataaccataaacttgggagtgtcttatcacttgtgtataactactaaactaggttttaaacgaagaattgtaagtttattggtaatacagcaatgtatacacgtctacaaatggttgtgcacgcctgaaatggctacatatgtgggtttgtttttgtgggtaatcatgtagacgttgcagcttagtcgctttttggcacacccccaatatatgatatcgttgtagttggctcgtcgatcataacgatatccgtcgtagaccagaacatcgccgctcctggtccgatcataccggatgcgatcccagtcgtccagggtgcggacgcacttctgatcgggcgccagtccacagcgaacattctgtggccgtttacccttggttttgggcaagaagctctcgttaccaaagtcagccaggttgctaggattgagttcacctaaatctgaaaaataaaacaaattagtgtgaatgcaaaatgttatacatatttaaaaaaattaaaagaaaaacaacaccgcattgcggaataaagatttataaaaaaaatatatatttaggtacagtaaaataaaacaagaggttggtctattcataaacataagtaaagttttaaacaagtcaattgcaacacactcaccttaccttaataaatactatcttctgcaaaataatcctaagcctgtttatatatcaagcttaagatctgacaaattaaaaggtgttattgcgcaaaactagaaatggatttcggttcaatttcgtttactacatcattctgtacaaaaagctgcctaatctatacagctatgtatgtgtcccgattcagacttctgaatgctctttgatctatggatgattatgcacgccactgactgcgtagcgggattggccattcggcaagatgtgagtgatgacgcgggagcggcattgcttgcgccacttgctgcacttccagtagaccttgtccttataggcggcattccgcaggtaacgatgctccccacagtgcagaacgacattcccggccggagtgcgaacgtagtgcacgccctccatggatttggacaaacgaacgcgcttcatcagctggtgttgatcgggttttacgatgggatccgttaacacatcaaatgtcactaaaacatagaaaaacaggcagaattagttaaaggcaacgcaatcattcacacacatgcacatacagttagtttctttaaatcatataggacatttctgcttaaataaacaagacaaagagtttattttagattcacatataaatagtctacttctagttcgcaagctatggctagattttgagtctcgattcattgcaggttgttaaggtcctcgatgcttaagttgagcgtccttagctccagtgttaaatcctcgtcaccctcctcctttatgaagcccgtggatacagacttttccgacttgcttcgcgctttccccacaacgtttgttactgaaagccgcttttttcgctccgtgttcaggcaggtgtgatggcacgattccagtactattttgtgcacaccttcaactacattggtgaccacccgagcattgcatttcgtgcttccctggaagaaagataggaactagctaatttctgtctgaaactgtcacaagagtcataatttcataggtcgcttagttttctttggggttaattaaattttatctcacctttttggagcatatccagtaggtcttcaggttactgcgacggtttcgcacgtagttgtggccattaaaggccagcagtttgcagccgcgctgtccccgaataaaagtgagtaggctgtgcttgatggcgcccttcatgtcatccagatcatcgcatactgtaagaaacaaattagctttgagttagcttaagtgtaaagtctactactgcaaaaactgttaaagtgtaaattttacaaaatacggtttttcgattttcaagatttgtattctacaataaataagctataaattgattctatacaatgatccaaagtcggccggttttaatatgattctttagtagggcggatggttatgttgtccgcatttgatagtcacatcgtggtcttgcgcggtgactacacgggccttgcatttgtgaacacccgctcgagcgcaagaccaataagttttcaatcccgaggtcttgtttcgagtgaaggagaactctccgatcttaagttttcggctccctcgaaaaccggtgatgtacgagtagtacgcaacagaacctgtgaatagaaaatatacacacttggttagtacaaactggtggaggagtgcgacgcagatctaaagctagaggtcaaagagacgcatgaagagcgagaaacttagctaacttgatttttattaagtcagacgagtgttgaggtgatgcaatattttacacttggacttaagactagtgcgctatgtcgttgttgccggcgctgaagtggcggccgtttccaatgggtcctgacgacgctccgcccgggctgccgcctcggcttccgcccgctgtcgcttcagggagccgtactttcgcgccttagtgataacttcatggttgtgctcgctgttcaggatggtgagtgtatccaatttggtcttgagccgcgcacgacatcgcaacactgcgaactaaaagtagaaccacaataaatacatttttggtgtagatttggcttaaactgtgaaaggaatgcaattaactttacgaaataactaacaattaattacagctgtcttcaactcagaaaagtaggctctacttatcttgctctcgactaagattaagtagtaactagattagttatattttctcaatattttaaggagaatttaaaacaaaaacgttttttcgaatgtatagttttatccaattacctggctgcagcgccaataggtgacgtcgtcccggcagatgtgacgattgaaggtgtgttgcttgagcatgatctgcttggtgccgtacttgctgacgatgaagaagggagagttgctgttgaccactccggcggacgaggcgttggccagctgcatagtggcctcgcccacatccacgctgatctggtagtcgaatttggctacaataagaagagttttcctcgttagttgtgcgtgatgattggattagggggaattattagttcagaaaaggaaataaaacacttgggattgctttaatggtaaaatggtattcggtatattgtacattgcggattcggcctatgactacatacacatcctacatcctaatagcactgcagacagtgctgggcgtgctcatgatgcctggtgagtcgaggtcgtcggctcagctccacgaggacgtagtaggtcgggcagttcctggtcaagcaatggaagtaggtgcggtactgcatggcgcgggtttttttgtaagacttcccgttgaccaccaggaactcgccctgagcggtgcgcttcaagaggacgcccttgttctggtcttttgctgaagaggatgaagacgaagatgaagatggtatgatgatgaaatgactgctgccacatgagtttaatgagcttatggtaggtaatgcatgcaactgggtataatcttttggacaaatgacattctttcgggtttatgtaatctcatttaatattgcggataaaaagcatccttgggcattagtttagcgggcaccttgccacccaaaaagcgcggcggatgattgtgggcattcttccccagcttgatccctccgtcgaacttggtgatggccctcgcggagcacttgttctcgttcaaacgcttgccatttccgtcggaacagatccaattgaccgtggcccggaaactggcctccttcttgtacatgtatccattgaataccaggttaaaaccctgcttctggtttttcaggaagaagtactcatgcttatcaatccactggccacgcggaatatccccgatgaactgacctgtaatggaggatccaaggaaactgactttattacccgggtggtttgaaaataaaaaggtatagcccagagaaaaacacatggaagtttgaggtgctgagtaaactatttattgcaggcaattcccgatacactcttactatttatagccgcttatttttatcatttgtagaaggctgtagctagtttgcctttaactggctacaagtcgattgatagtctaatattctagtgtttggctagacatcccttttgtggtcaagaagggttgattggtagcaaggtggactcacctggggcataaagcactttccacattaattcaacaactaccagagcagaaaaatcactaaatatcactaaaaacactagttcacattaaattcaaatagaacatcatcctttttggtacttttttggagggattcctttttgagacaccaacaacaacaaagatgacaatcggtgcacacacacagacgcacatacatacgcgcagggccacacgcacttactcgctgcattttcgcaggataattcacatattgtaaacttcggacattaatatgcatgctgcagttagccacatttaagccacaacaccttttgttaactatagacttgcaatttgtttgacaaaaaacaaaaactcagcgaacacaacacggcgaaaaaataacaactacaacaaaaatggcgtgccaacagcagcacaagcagtgctgttagcgaagctatcggttatcggctgttaactgtgtttgaatcgtaacgtattttatttttacatatctatattttactgatattcttgctatattttttttattttcagaattcgcattgtcttatatctgaaaaattccataaatgtaagctcatagctcaacaatcgatggtgtatcaaggcaagaagaagcactattactatgagaacatgtattctaatattacagaagcgatcccttacacattttttcctgctaatcccttcgactgataaataaatataaatgattttgcaaaataacatatttagccaaatagaaaagcactaatcgataatgttaggtgccaaacatcgataacatagtgagtgccagctctaaagtacagtgctcttcttctttaaaccgtgtttttcgtgcattaaatattttattttatatatttgtacattactccctgcttgtaaaccaataaaatacacaagaaccagcaaaagaccttccacagttgttttattttaattttttcgcccgaaaggcccaatcttacccagatgttctaacctgttgcgtttgattctccaattgacagccgccacatccgcatctgcaactaagattccaccacgtaaacgcggcagaccgaaaacaaaggttgaggatcagacgcccaagccgaagctcctggaaaaactacaggcggctaccctgaacgaggaggccagcgagcctgcggtgtacgcctccaccacgaagggtgagtccgaatcctggctagaagccaaaatcctgatccatgataaccaagctaattcacgctccattcgcaggcggtgtcaagctaatcttcaatggtcacctgttcaagttctcgttccgcaaggcggactattccgtgtttcagtgctgctaccgtgagcacggcgaggagtgcaaggtgcgggtggtatgcgaccagaaaagagtctttccttacgagggcgagcacgtgcacttcatgcaggccagcgacaaaagctgcctaccctctcaattcatgcctggcgaatcgggagtcatatcctcgctgtcgcccagcaaggagctgctgatgaagaataccaccaagctcgaggaagccgacgacaaggaggatgaagatttcgaggagtttgagattcaggagatcgacgagattgaattggacgaaccggagaagacgcccgccaaggaggaagaagtggaccccaatgatttccgtgaaaaaatcaagcgacgactgcaaaaagcactgcagaacaagaagaagtgacacggaatatgccttagatcttcaaactacaccttttactatataaacttaactaagatcgagaaggctcaagaaggcccaacagtacaagatctgagctgcctaagggcttcacattatactttctatatccatttgggtcttaaatagccctaataattctaaataattaagtttttcgtaataaaacgatgtcaataaatcggaccttaaaccatttcactagctagtaagatctaacttaatacgtagctgtactcaaaaccccatttaaatgataaataacataagccctttcatgtctttcagtgacccaacacgtccgcaactgtggtcctcagatgttcctgatcagccgcaagggcggcactctgttgaccatcaacaactttgtgtaccgctccaatcttaagttcttcggcaagagcaataatatcctgtactgggagtgcgtccaaaaccgatcggttaagtgccgcagtcgcttaaagaccatcggcgatgatctctatgtaaccaatggttcgtaaagcgaagtaagcaaatgcaaaggccatttaatggcttctttccatcttcagatgtgcacaatcacatgggcgacaacaagcgtattgaggcggccaaggcggctgggatgctgatccacaagaagttgagttccctcacagccgccgacaaaatccagggttcctggaaaatggacaccgagggcaacccagaccatctgcccaagatgtagccgcttcctatacattcccaacccaaacgttcgtgttctgttagggctaagctaatgtattctactattgttcttgagcgtatatcattgatttagactgagtgtcccgagcctagttaggatgggtaagtagcctgttcatctgggatctcaaagtaccatttttgtaattcttaaagtcccgggtcatattatttattctgttctcattgcttagacgcttttggccacggcactgacttaaacaatggcttgtgttacgtacaaaatatgaactcttaataaaatcagatgaacatctaaacgaattggaattatatgtatgatctcatcataatatagaagagattctttcatgcgttctaaatagtgtttattttgtgcactaaacgtatttgcgttaagagatcttatcccgttttttgaaagttttatgaattaatcaattctcgtgggtccatataaatttaagtttagagtttagctatgcatgagtattttgatatttcacgttgcgttattatgtttcagaaactatctgactttttcaagatatccatataaactatatgctaattttggtgtacttctaaataatcaataatattcttgttctctatatatctcgttcgctggtaaatatctacgaacaattagaagaagctgtgtctattacctatgcagtgcaggggttggaatgtacttgacgatgagaacaggaccctttttggccctagtcggtaaagacccaaggcatctttaggctttgttgctgactcctgacatttttgtggttgtgcgatgagcacgtgctgcggtatttcacctcggagtccaccatgaacgtagtggctcgggccttgcagcccttgtgatgatacatgcaacgccaggatccgataaggttgtccttgcccaaaatacggtggacgataaagtgcttgttggcaatgattagcctcggacgtctatgagcagcaagactgaactccgcaggcccgtcgaagttcagaaacttttttgagtagcgtttgcgatctgaaagaaacaaaaagcatcaagtcagtaaattgtcttggtaatgtccacaaaactattgtgtaactagcgtatttgacttaaacaggatggcagagtagatgtttccattatctttatttcggtttgtaaattgcttaagctaatcaggacctatacaattttgcacttagcttaggtttaggtggctcgatttgcagcatgcaatctttggaatatttcaagtactttgcagtagcttccaattccaccgtgatgttatttatacaaacatgatatatgcctgtccttaaaattctgcaaagactccgctgcccgctaaaaatcgctcaccttaggtacactctacatcgacattagttcaacagataataaaaaccacagattttggtgagcccacaaccgacggggctagtaatctttgctaatgaagacggcaccgtgcgcctggtgctgctgcatcagcgccatcatttgcggtgtttgaacgtgtggcagggagatgggcatcgccaaagacatggagacgggcacaggtaccgtcaccggcatgccgaggtgggtgggccctgtggcgtacgccgcggtcggaggcatctgcgcaacttgggtcatcatttccatcgcaggagtgggagtcgccgaggtgagcacatggttcgggttgggtggtgaacttttaaccgctggcacagtgccgttggccttggcctggcagtaaagttgacacaggggcagcagctccttgtgccgcctcttgatatggctgagaaagttccccgtggacttggtggtgccggagatcagtccgtggcatgttgtgcaggtggcctggatagcacctggcgtcttctggttcggctggatgttcttgtagaacttaccgtccagtagcttgggcagggtaaagggtttccggaacgattcctcgtcgcttaagtaggtgacggcaagggcggccacagcagcatccgatgagtgcccaggcgtcggcgaaggctccattttgatcttgactgcaaaatgaaaagattaacagattagttgggatttaagaatgcttaacaactatatagtaggtacagaacgagaacactgattacgtattatgtgcacatttaatttaatttatttatgttaaggtagagctgaaatcgatgagtatattatattaactgctggtcctccggagcttactgcagctccggaaattcgtccagcaggtcagtcgtgagatccatcgagctgacctccggagcgtgggtgtgcggagtgccagcgatgcgcagggtgacctcctgcactttggaggtcaccaaagtggcccggcagctgtgtttcacgtagcgtgagcaccgccagaagacgttcttcaggctctgacgattcacgacataccgataaccctcgtagaccagcatcaccctgcctcgttgcgtcgtggtgtactggatactggcaccggtggttttgccctcgaagagcgccttcagcgactggatgacacctggaaagggaggtagatgtgttttgacagacattagttgaggttattttgggagatccaggtgagaccactaactagtgcacaataggtttaaagggaagttctagtacaggcatttatttcggtttacgaatgcaacaatcaatttaaactatttcccctcctttataggcataagtttaagagtagacagcttgtggtcaatgaactcctgtactgcggacggggtcagctggttgccgcgcagggcaaacactttacacacatgggctgaaaagatggaagacacacaggttagaacgactaatcgtgcaacgggcgcagcctcccttatgtacttatgatgtcctggatcaggtccttgtccgtggtctcctcgtgctgggcgatgcgcaccagcttgtctttaccaatcaccagatccatcacacggcacgtatatatcatcggcatggggatatacgccttggccagagccaccttggacacaaagacccggctgccatcgaacaaggggatagcgtcagcatctctaggggacttctgcacgctatcagttactggtttccttggatgctccgcgggcttcgggatggcagtgtccttgcttgggccatctggaacggcacacgatggcaaaaacgattaaaacactttagcttaggaggtcaacggaaaacataaacaaaataaaacacggttattgcggttttcttttttacaaagtctttatttcatttcgattaggaagctttcgcctacacttttagcgcaattctggcgtcaaaacagttttcccattatttttcacactcgttgcccaatttgacatattagaacacaaattatttattgaagtaagtccacgcgagtcacagtagacaaggaaatggcagcaacaatgccagggctgcactcgatgcacagcgagtcctcggtaaaagggcgagcaaaatgctacgttgtttgatctaaagtttttttaattatgaaaatgacataccttctttaatattactatactcaagtaaacatattactaaattatagcaaaatatgcatattggtattggtactaataaatacgtcatgcaaacagctcgttccgtgttagaaaacgatttaccggttttaagatggtctataatttttcagtagttttgcgcatacctatagctactgtactcccgaacattgcagccctgggtgcaagcgcttgatctggcaactctgttaaaatgtcgcccacagttgtgaaaaaatgaagtgatttccgaaaattgttgctaaattactaaacaaaaggtgaaattaagatttgtaatggccccgaaaagtgaatagtgttggtggagtcctagttgtgcatgaaagaaccgccttccaaagaagggagcccaatggcgagtaatgaagatgaataaatgccaacgacgcctggaatttcaatcaaatgtgtacaaatgttaaaacgaaattgcaaagcgacgccatgcgcgcaatgttaataaagtacagaaactagagtgaagcagggatatattacttggcggatcctcttgggcaatcaatcagtcagagcgttctaatcaataccccttcctcccacttcaatttgtgtcttgcagaacaggaggatgacttcaagttgcacctgcctctcctcgtgacaagaagaaagaagacgcccggtggctcccgcaagcagagttttgaccacctggaggtgagcttcaccagaagcaataggggtaacaacttgctgaccatcgatgggaagcccttcaccctcaatcgtcggatcaaggatgtgtgctactgggagtgcgtcaagctgcgctgcaagtacatcaagtgctccgcccgtgtggtgaccaaatccaatcggatctcggcactgagcgggctccacaaccatccctaagttacgaactacctgtgccatctcattagtctaataaaggtgtttacgttgaatcagtttatatcttccgcctctcctatcgttgttgattctatagtgtccttgcgcaactcaggacgccctctgactaatctctttcaattcttgcagcatgctaccaactggtgcccaatcgccgcggtgggaagaacctcatcttccaggggcacatgtactccgtggagcgcaagtaccgaaacagcatcaactgggtatgttccaagaacagcaacagcgtgcttcgctgcccggcgaggtgcgtcacaaatccggagagtggcaatggcatcaagctgagccaccgacgccacaatcatccggcggatgcctttaagccccacaagcgctgtcgaaagcgtcccggcgatcgaaagtaacaagtaaccatgtttcaggatgcaaagcatgcaggcttcggcaattgttagtcacactaaatataaatgtttctcatcgttgtcgaattgtaacattttggtgtaatggaatcactgttcatttggttttgggctttcacatatccgaattactttactaatactcactcatcagcacgtttcccataaactaattatagttttaagctgtagttaattccaaacgacttatgacttactatgaaaatctcctaacagattttcgccacagttgtgtttgccgacggaacggagttacgataatcgatggctaccgcttcgtgatcggtactacaaatctgcgtcgcacctatctgaagtgcgccaactttcgcagcaactgccgggcccgggccattcttaatacggatacgaacaaagtgcggatgaggcacgaccgccataatcactcccgtacggatgctgtgagcggacgtatctctaagaagtagcaggtaccgagctgtctagaggaataaacatgctgtttccgtttaaaaatgtttaactgcttttcactaccaacgaaaaaccataataaccttacatcctcacccataatttgaaagacctgtcctaatctaactaaattcgccaatctcttgcagataactcgaaaatagcgcagtatgtgcgctccaaccgaggaaccgatctcgtttaccacgagggaaacacctacacacccaatgaaaagctgagggagggacaaaagagtcgagactggaagtgctcaatgtaccataaggccaagtgccgggcccgcctggttactcgcattaccggtggaggggatattatacacgtgaccagcaacctgcacacacatcccacaatgtacaccacgcagaaaacggacattagcgtggttgaccagaaactgtgcctcgaaaggaatccactctgcgttaacactcgatcgattaaaatgtagatcaagtaaagaccaccgactgattactcgttacgattagcatgatcttcagtataaataacgttttagatttaaaaagtattaaaaaatgctcatatacattcaataatttttaagtaatttcatttatttataataagcatattttcttaagttctttcacatttgatttgtttactacgacgaattccatttttaattcaaaaccgttttatttacaggacatctttcgacattgcgccatctcccagttgaggccatatttgatgcggacggcaaacagatggacttcatacccaacattcgcgtcatccgaagtcagcggaagaccataaagctgatgtttaaaaaatatgcctactcgaagaccaacgagcacgataccacaacctactggcactgccgaagtcgtcgcaatggaaggcctgcgtgcaaggcccggttttccaccaagaagctcaagaacggtagctacaaagtatatctgacccagccggagcacaatcatcccccaaagaagcgtcgcctataatcagaataactatattttaagaagaatgatatattaaagagccatgtcttggcaaaatgacttgcaccgactctgaatctctactctactactctactctcaaatagcccagcaaatgaccatttactaattacaatgtgttcctttctccttccacagaaagcagcgtggcgatctactcggcaacctcccggggacgaatgcaactgatttacggcggacagccattcatcttcgagaagacgctgaaactgtcttcgggagaggagaagcgcttctggcgctgcaaccaatggtggaaccaaaagtgtcgctcgcgcgtcttcaccatcaacgacgttgtctgtccgcttaaccgattccacacgcacgaggagatcgtgcggcgaaagaagcgagtgcgccgcgtgccgccggtggagacgattgccaaggtggttgccacaacacccaggcatccgcagcatcaacagacaacccagcagcaacaagagattcagctgaccagcgatgcaattgctggagcaatactggatgatgaatccccagctacaatcgatgtcagcgagctggggatgcacctgaaatacgaagaaatcgtagcggatgtcacgggcattgtgggcggcacgcgagtggtcagtcgccgaaagtgaagattgctttttattttctgacgtaagatcgcagattcagattccttctttgtaaaaactcatgctttgagttttcatttttgaacttgccacgtcgaaaaccaagagccgaacagttttgatgaatttaaaaaggctaagcacaaccactagccaataaatacaatttttattattattttaaggacatatttttaaaactctttttattaagcgtaatattccaaggtttcctcccccatttgtaaaatttgataaataccccatgatttcctttgacattttggagttgtttagaataaaatctgttccttctgttatgcctttgttcaaacaaaattgacctagcctactcccataattattaatacaaaactgcgtttaagaaggcggacaagctagctattatgatacagcttataaacaatttattatgtgtacatttaataaacgtaagacccaaacagtgcaattgaatcgttgtagaacctccgaactttctccacaacccacttgagatccttccttcaagcgaatatcaccgacttactaacgcaccgggtcacatatctattctcttttaaggtgacgccacccagttcttcttcaccaagggtcagcgcgaatcggtcaaactcaactactgcggtcatagctacgtcaagttcatggagaatggacgcggcaccaagtggatttgtgccacgcgctccaccaccaagtgccgtgctcgcatccgtaccaccaaaaacaactacctggaggtactgtatgcgtcccacaatcacggttttccgccgcagaagaaggatcggggtcgagccagccaaaggatgtgatccaaaatgtaactgagagtgtgactgtgactaaagccaacttcccctacaatacaatttcaatagtttacaaaacacttgaagcctcctctaaaacagcttgactttgaaactatatattgaaaaaaaggctgagacagcgccaatcaatttcccagccaacccaatcctagtggtcaatctgtctaatggatgtagccatatttccttccattaaccaagctcaaagtttgccagatgcttagattggctaacactattttcgttttcaatacaaaagaacgcctatatgatcttcctaactcgaaatctgcgagcgagaaatatacttacatgaacagactttaaaaaaaaacgagttcaccataatgagggcccaaaaagtgtgctaaagaaacattttattcttcatggttaaattctcttacatacttaaagtgaatattgttaaataggaaatgaaattaaatttttcgagaggttacgacacaccacgaagtgcagaaatcaaaataatatagatcttttctaacttgtgtctttgaatttgaacttataccttgattaagtcgaccactttttttttgggtaatatcatcctttcctcatccactcaagagtggagttcctcgaagcagggctcgcacatccagttgcttccaggacatgtgttgcacagcgtattgatcctcctcaggcccgtcctgttcttttttaggcagttcacgcactttcccttcatgcgaggcaatcccacatacacaaagttgtgctcgttggatgaggtgcggatgatgttgtccgggttctttaggttcagccttccagcgggctccagttttatgattgtggctaaaaatttgtcatcccgcacctgccgcactttttgaatcggtgctatatgtcgtgcagccttaaaaatcaaacctgtaagtttaagaggaggaaagatatattatatggtaatgattttcttatgaatttaaagggtattagaataaaaatataccattaaatagtttaactaaactatcgtttgcttgtttcatttaataaattattactcttcgcttatttgtacactgttttgttcattaatgcattaaactttaatattcaagccgtatgttttcccaattgagcgtcagtcttgcaaacggtgtacaaatgtcacatttaaatttaaatataaaagatttagattagaggaaagtatcaaactaattttatagattataatggttcttaaaatttaataatcctctttatgaggacgaggtgggcaatcgagcactctgggaacaaatgtctttagtcgttccggcggcttgtgattgtgaaatcctcggattgattttattgactttatgtgagtggtcagcgccgaagtgcagtgcatctttttgtacatggagcagcgccagaaggccagacatttcccgggattcctggagtaacagctaaacgtgaatccctcgtggactaattttcctctatcgtcgtaggtgagaactgaaagagaagtattcaattagtcaatggagacaggaactaggcctactcttcgatacctcgcctcctaattgatcagaacgaagctcggttactttcatgagttcagatctttatttcacatgatcacatagccgtcaagggaatggaacaattggatttgcaaagcatatgcgaacttaaaaaaaccttcattggttaatcgaactcaggggtcttacagctatattcacaatcttattcattaaacttcaaattaaactcgattcgacacttcaaaatgcatattcgggtaactaggatgaaaatatcgaaaataagtgtacatagtccatttcctagatatgtacttttaatagctgttacttagtaactacattgcactgccaagaccagttggatagccaatctattcgtgcatgagcatcatggaggcgtgcatcagttcttgatctgtcaactgcaatgtggccgcatcgctagtcaactggtgttcatcgatgaactcttgcttctgctcctgaagctgcagctgtgtgaagctgtgcgtcctggagagctttcttcctgtgccgatcgctgccattttgttacgctgaatgatcttgtctatcttctccgtgtgcggctggtggttatgtagtccgcctgtcacactcttaaggcgtccgttctccaggacgcagcgagatcgacagcgcatttcatgcgcctttttggagtagttgtggcagcgccaatactgtttattgctcttgcgactgtggcagttgtacatgtagccatttaacactaggcacggcgtcgaccaggggctctctataaaaaccagctcgtcctctgaaaagaagaagtttttatcgttagttcagttgtctacacttaagatatttggttaataacaattgggttacccagtccacaatgagctccatcttttgttttggtcttaatttattaggagctaagtatgaaatacgtttacagaactcagacaagtcgcttaaaatctactttcgagtggtcgggtcgatttctttgggcaaaatggtcttgagccttgtggaattgtgaatttttgcatgacttactaacatataaagatgtattactattaaaataaatatgtattaattattacagagctggaaagttttaggttttaaaaataagccaaaataataccagctatggctttcttatctttataaagactttccaactgattgactgtagattggttaaaaactcccaagtgaaatcgactccttccgtggttcgagataaataattagcttaggtgttagctgataactcctaggggtgctcgctcttcagcagggatcgatgcttggcctcttctgtccgccacctgcccacccgttgccgatcccggatccgctcctctgcatgccgctcctcctcatctaactcctcctcagcggcgtccacaagggcctgcatctcgatctcggtagcctcggcagcgggcaggaacaacttgcagtccttgccgtccttggcagtcacaatgatgttgctactgcccagatactgtgatatctttgggttcgacgtgcagatctcgatgtactcctccagttcctgctccaccttatacagttgtcgctggccaatcctcgaggcgtgggactcgtgattgtgctgacgtcgtgcgtcgatgaagtgtccgtcgcgggtgatgaccaccgccttgcagcgcagcttgagcacatccgcacagcgccaggtcgtctgtccattggcctgggtgagcttcttgttgtagatgtagttgcggaacaccagctgggcgttcttcttctggctgcgaatgaaactgatctccgtatctgcgagagtcgaggaaaaccgaaagcatggggtttagtgggcataatataattgacagatgatctagttgctattctagtgaatgtacatatatggcttaagcgttaagttaggatcggcgaaataaaacaacgtttagtttagactttggctttaagcagtttattcgcaatcagtgaaccggaggacccttgggtttggtggtagaaaacttaccaaaatgcggcgggatggcattttacaacttacggtagcatttgcatcgcttggttttcaaataagcactatcacagattatcaaaagggtggaaatagggaggcgttgccccccttaccagccccatcactttaaatattaaataaacaccacaccaaacacaccgtcacaagctggaaataattaattgtgaacaaataggccgtgtaattcggatgcaataaaataacaaaacaaattggcttgcatttttttaatgaatttgcacggcgttgccacacagccgaagcaccagggctgcacattcaattagggtttccggaagtggcaacaccgtcctcaatttccacaaaatggcaactccgcattaattcaaattttaattctttattttttcatactacaaatatatatataatatattctgtggatactttctaaatatccggaccaggcgcgcaaaatataaattacacgattcaaacgttaatataaattttctcaaatacgcttaacaataaaaaaacgaaaattactactacaaataaaggaaatataagtcggaaatgcttcaaggcggtccaaccttttgttccaaggtatataaactatcgcctatatgaattaaaacggtttatgattatctcttaccaattaggtaagaggtctagtatattctgttttttttgtttaaggttaccgcgacatccgtaaatatcgtgaaattcttcagacaccctttaattcggaaccatataaaaaaaacacgcaaaatgttccatacaaaaaatttggaatgaaaaaacaaaatcagcacgcaaaaagtaaaacagaatcgacgctgcatgaagaaataaatttcctctccactgataacgttaaaagagtctccctatacgtattattaaaatctttccttttttttttacgtgaccactaaaacgattagaaatgaacctttactataacacagcgttataaatacaattttttttttaagactcggcaatcaatgccgttgctggatttgcatcagcaagcttttacgttgcttaaacaaatccagacaacatctttaagtacgagtttgaaaacataaataacaacaaacctcagtagccttagcatcaccagaggatcattattaaacagaaatgcgcatgcccaaataataaccccctgatcatgtaagattgaaaactccaattactcgctttgctcagtcaaataaacaattacaaatgcctgcaaattttggaaaaatatatggataggtgtggttttaagagtgccggtattaccttgagtagttgcagctcttcacgggttcggcttcacgttgacatcagatatccatcgtagcagcttcttaaaatttcatcactctacttaccttttaactgaataagtgtaaaaccgcgcgatctccgtccagcatttaacaaatatgcatcggacagcagatctgcctagtgctctttgtcgattcgaaatagaacacaggcccgtaaactacttattaactaatggccagcgaagtatagcttaagtttgttcaaaacaaaattaaacgcactttgccgaactctaaaaggacatgatccgcttgcgacgctaatagatttggaaagtgttcaagtttggaatacatatgtgatcttttttttaacgtgtttgcatttcgcaagcggacttaatgtcctttaaatattgcttatatctattggcctctggccatgtatgctttgcaattcaaccaaccttgagcctctgtgttgccctgatccccgctggtgtcgacaaacgatgattcactgtagttctgggactgttgcttgaccacagccttggaagtggtcgccgtcactccgccaccgctcgtatttgccgcagtctggttgccagcatcctcgttttcagtgaagtagctgtcgtcgtagcgcatgtctccgtaagtatcgtcctccacataggtgccctcggcatcgccggcggcgtcgccatggtcctcagagtagtcaggttcagatttcgtgggcaattccatggggagatcaatgtactcggcttcctcctgtcgaacctgctgcggcgattgctggtggagctttgcttctgccgcagagaccacagaggtttgcacggtgatctgttgcggcacaagttgggcggttgtcgtggctccagtttcagtggtcgagtcgagagggtccataacatttgcggaggtgcttgtcttggagcgctttacgccggcgctcgaggaggcgggggtcagggaggagcgctgggcagagcgtttgtttgtcgacaccagcgtcgccgtcgtcgtggttcccgtctgcagctgctgcgattggatctgctgcgccgcctgctgcggttgctgctgttgtacaatggtggcttggggtgcggccgtggtctggatgacgatctgggtggtgctctgtttctcgtcgcccaggccgtcgtccacggtctcgatcttgtagcgggcggaggcgcgaggctgctggcgctgcacccgctgagccggtatttgctgttgttgtacatgaggtgctgctggcggcgggctggattcctgcggcggctgaggcgcaggatcgttctgaaaaaaaaatattggttttttaattattaacatatattttaggaataagtgaaaagatattttgtatgttctagcacctctttaaaaatgaaccacgatcaaaacttaataaactttaaaagtatctgcatttaataaaatggacgatttcaaaactatatgttgaaaagaattattccgttagaatggaatttgcaaagaaataagaaatctggccattaattagtaaagtacgccttccttgaattgggaaacaataatacattttctagttccgatgcctgtttctttaggtacagctgcactaaatttaattttgcaaatacgttaattttagtcgaaaacattaagagatatttcccaatttaaacattagtttaaaagcaaaaaatgtttatgctttggcatcgaattcgctgcgagacaaaaacaaccactccaatttgccgctgccgtgcgagccagagcgagacaaacgcttcgcgtatagcccctgcagttgtctctctctggcacgcgtgccttttggcatttggtttgcgagaaatttctcggtacagtcaaaccatgctcttatacagacgccagccatcgcgtctgtatgtattgggcgcgaaaggttgcgttgtagttgctcgattcgatataccagtatatcacgcacacaaatgtatacatatactcacatccgttagccccttgatttgcagcgattccgcggtgctaataaacgcgggcagggcgtcctgcttcacgttgacctcgccgcagtacatgaattggatgaggtccttcagcgccgagtggctgacgttgttcaggaatactgcaagataggcgaagagagtataaggtaaaaaatcacgtagagctacagatctgagctgaggggcacaaactcaccgatagcgtgggtgttcgacggcatctgagtgaacatcttgcggaagaagggcgagcagacggataacaccaatcggtgggccttcactatttggccctcggcggccagcgagacgtccaccaggtcgccgcggcatagcgactcgtggaagccggccgacaaattcgtgttgaagttgttccagcacaagctgaattgctcgtcgtccgccatcttggacgaaaatcaatacttttctgtatctatgcgtttgttggctgcaggcgaaaaagtgcaatgcgcgtttaaaactcaatgcagcgagtgctgaaaaatggcaaaggcacacacaaaatagaatgcactgcagccaaaaaaaactgggaaattttcacgcgtctgtctgtgtgtgcgtgtgtgtaaattacatttatctcgcttaatgaccgcaacctactgtgtatattcacttggggcgccattactcacctcttgactaaatatttttccaataaaataactaactaaagccagagttttttgctagcgcggccgacacgcagaacgcgtccgagttctttgacgtgaaaattagaagtgttaccaggcgacgagattgctggcgatggcaaaacaaaaagtgacaatatatcgatagcttaaaatatttatatcgaaatacttttatgaatattgatagttgatgtgctttgatattttttttttaaatgttagtacgaaaatcacataattaagttcataactttttgaaaacttttacatactttagtttacatatgctgtaggattttagtttgcgggtgtgttaaaaaaggttgtaggactaagaaaatatcggcctaagtatacgatgtatttatgttatgacgaaatttcttatttcacaacagttttgttgtctagcttaatgtttaatttattttaaatgaaataaaacaaaatacaaattaacgagtttaaagactagcagtcaaactagcacaactagaataaaattcataagataaacagaaaaattttaacttttttaaattctcctattttttaaactgggccttcgattttttacgaatggaggattattttctagcggaattcattataactctgacaaactcttatggagcgcatcgtcactacgtaaaccctacactctgaatgcacaagggcactatatttttaaaaaaaaagtgacttaataggattataagaaaggcaaatattcgctaaaagttcttaaacataccaaacaaaatatgtatgtacataatatgtatatctgtgtactgtatgtacatatgcactacatatgcaattatatacatatgtgaacacgtttttggtgcaatgccaagattcgaaatgaaggtattcatcccataaaggcgaaatattattaaaaatgttgctctatttagacaacttcacatatccatgttattcatctctattaaatcataacagtttcaagtgaaataaacaataatatatgagagcgtaacgtttaaaccaaacatattccccacgatttatttatttgttagcttagtacactcttaaa

SEQ ID NO: 26975 - DNA, 1779 bp, DROSOPHILA
caaagaactcggacgcgttctgcgtgtcggccgcgctagcaaaaaactctggctttagttagttattttattggaaaaatatttagtcaagagcactcgctgcattgagttttaaacgcgcattgcactttttcgcctgcagccaacaaacgcatagatacagaaaagtattgattttcgtccaagatggcggacgacgagcaattcagcttgtgctggaacaacttcaacacgaatttgtcggccggcttccacgagtcgctatgccgcggcgacctggtggacgtctcgctggccgccgagggccaaatagtgaaggcccaccgattggtgttatccgtctgctcgcccttcttccgcaagatgttcactcagatgccgtcgaacacccacgctatcgtattcctgaacaacgtcagccactcggcgctgaaggacctcatccaattcatgtactgcggcgaggtcaacgtgaagcaggacgccctgcccgcgtttattagcaccgcggaatcgctgcaaatcaaggggctaacggataacgatcctgcgcctcagccgccgcaggaatccagcccgccgccagcagcacctcatgtacaacaacagcaaataccggctcagcgggtgcagcgccagcagcctcgcgcctccgcccgctacaagatcgagaccgtggacgacggcctgggcgacgagaaacagagcaccacccagatcgtcatccagaccacggccgcaccccaagccaccattgtacaacagcagcaaccgcagcaggcggcgcagcagatccaatcgcagcagctgcagacgggaaccacgacgacggcgacgctggtgtcgacaaacaaacgctctgcccagcgctcctccctgacccccgcctcctcgagcgccggcgtaaagcgctccaagacaagcacctccgcaaatgttatggaccctctcgactcgaccactgaaactggagccacgacaaccgcccaacttgtgccgcaacagatcaccgtgcaaacctctgtggtctctgcggcagaagcaaagctccaccagcaatcgccgcagcaggttcgacaggaggaagccgagtacattgatctccccatggaattgcccacgaaatctgaacctgactactctgaggaccatggcgacgccgccggcgatgccgagggcacctatgtggaggacgatacttacggagacatgcgctacgacgacagctacttcactgaaaacgaggatgctggcaaccagactgcggcaaatacgagcggtggcggagtgacggcgaccacttccaaggctgtggtcaagcaacagtcccagaactacagtgaatcatcgtttgtcgacaccagcggggatcagggcaacacagaggctcaagaattcgattacggacatggacagtatcgcggtaacaatccgcagattcagttctccgtgtccaaacgtggcgggcagctcctgtggctcgatgggatgaagttcttccgcaacaacataaaccgcacgaatttgtactggcgctgccattggtattatcggcataccaagtgcccagtgctaatttgcatgagcaagacaaatagcaacgacttccggcagatccacgatcactgccacattcgaccgaagcgcaaagaaaactctggcacgggagacggtcccaaaataaggactcctgtggtgtccaacgtgaggagtcttcctcagagcatggcgcacatgttcgatatgtaatttaagagtctttcgcagaaacatgttaat

SEQ ID NO: 26976 - protein, 520 aa, DROSOPHILA
MADDEQFSLCWNNFNTNLSAGFHESLCRGDLVDVSLAAEGQIVKAHRLVLSVCSPFFRKMFTQMPSNTHAIVFLNNVSHSALKDLIQFMYCGEVNVKQDALPAFISTAESLQIKGLTDNDPAPQPPQESSPPPAAPHVQQQQIPAQRVQRQQPRASARYKIETVDDGLGDEKQSTTQIVIQTTAAPQATIVQQQQPQQAAQQIQSQQLQTGTTTTATLVSTNKRSAQRSSLTPASSSAGVKRSKTSTSANVMDPLDSTTETGATTTAQLVPQQITVQTSVVSAAEAKLHQQSPQQVRQEEAEYIDLPMELPTKSEPDYSEDHGDAAGDAEGTYVEDDTYGDMRYDDSYFTENEDAGNQTAANTSGGGVTATTSKAVVKQQSQNYSESSFVDTSGDQGNTEAQEFDYGHGQYRGNNPQIQFSVSKRGGQLLWLDGMKFFRNNINRTNLYWRCHWYYRHTKCPVLICMSKTNSNDFRQIHDHCHIRPKRKENSGTGDGPKIRTPVVSNVRSLPQSMAHMFDM

SEQ ID NO: 26977 - DNA, 24161 bp, DROSOPHILA
catttccagtactgcagatgaccgcgcttcttgtttcggaagaagcggaagccattgatcaccagcaacttgccgccgttcttcttggagtccgcgaagtcaatgtgaaatgctgtgaatgaaatagaaagtctggattagtttgggaattcgtgaacaagtgctacgtcaaaagcgtaggtctattcttatggaaacagatgtagttcgtcgtaaatttcgtttaaaattaaaagcagtcatttatttaaaagtggattgttagatgtcttatggttttgacaatgtgcacttaaatgtaagcctatgacgcatccagagatagggccttctccctttttatgagcacaggcaggtttacgttattgctagggaatttccggctgtgatcatgctcgtaggtgcatttgatgattcgctcctgtgagtttttgtccaccgcggtcacgacacgagccctgcagaccgtcacatcctgttggtgggacaaaggaatacgtcgttactttagtttataacaaggagtctctgtgcttcttgaaattctcttttttagaaatctattaattataaactcttgtttctttaactatgcatattaaacgtatacatatatttaattaaaaaatcaaggaatatactataatattcttagcacaacacgaaaaatgatgagcagactttatcttaatgatttctcttatacaaaacctgaattctatgattttcagcaaaatcttgtagtttaacttacctttttcgagcatatccaataagtacgagaggcggaacatcggttcttaacgaacttctcgttttggaagagcagcacggttcttccccgctgtccagtgccgaagacagccagttctaaaaggattaagcagataattagaataaccataaacttgggagtgtcttatcacttgtgtataactactaaactaggttttaaacgaagaattgtaagtttattggtaatacagcaatgtatacacgtctacaaatggttgtgcacgcctgaaatggctacatatgtgggtttgtttttgtgggtaatcatgtagacgttgcagcttagtcgctttttggcacacccccaatatatgatatcgttgtagttggctcgtcgatcataacgatatccgtcgtagaccagaacatcgccgctcctggtccgatcataccggatgcgatcccagtcgtccagggtgcggacgcacttctgatcgggcgccagtccacagcgaacattctgtggccgtttacccttggttttgggcaagaagctctcgttaccaaagtcagccaggttgctaggattgagttcacctaaatctgaaaaataaaacaaattagtgtgaatgcaaaatgttatacatatttaaaaaaattaaaagaaaaacaacaccgcattgcggaataaagatttataaaaaaaatatatatttaggtacagtaaaataaaacaagaggttggtctattcataaacataagtaaagttttaaacaagtcaattgcaacacactcaccttaccttaataaatactatcttctgcaaaataatcctaagcctgtttatatatcaagcttaagatctgacaaattaaaaggtgttattgcgcaaaactagaaatggatttcggttcaatttcgtttactacatcattctgtacaaaaagctgcctaatctatacagctatgtatgtgtcccgattcagacttctgaatgctctttgatctatggatgattatgcacgccactgactgcgtagcgggattggccattcggcaagatgtgagtgatgacgcgggagcggcattgcttgcgccacttgctgcacttccagtagaccttgtccttataggcggcattccgcaggtaacgatgctccccacagtgcagaacgacattcccggccggagtgcgaacgtagtgcacgccctccatggatttggacaaacgaacgcgcttcatcagctggtgttgatcgggttttacgatgggatccgttaacacatcaaatgtcactaaaacatagaaaaacaggcagaattagttaaaggcaacgcaatcattcacacacatgcacatacagttagtttctttaaatcatataggacatttctgcttaaataaacaagacaaagagtttattttagattcacatataaatagtctacttctagttcgcaagctatggctagattttgagtctcgattcattgcaggttgttaaggtcctcgatgcttaagttgagcgtccttagctccagtgttaaatcctcgtcaccctcctcctttatgaagcccgtggatacagacttttccgacttgcttcgcgctttccccacaacgtttgttactgaaagccgcttttttcgctccgtgttcaggcaggtgtgatggcacgattccagtactattttgtgcacaccttcaactacattggtgaccacccgagcattgcatttcgtgcttccctggaagaaagataggaactagctaatttctgtctgaaactgtcacaagagtcataatttcataggtcgcttagttttctttggggttaattaaattttatctcacctttttggagcatatccagtaggtcttcaggttactgcgacggtttcgcacgtagttgtggccattaaaggccagcagtttgcagccgcgctgtccccgaataaaagtgagtaggctgtgcttgatggcgcccttcatgtcatccagatcatcgcatactgtaagaaacaaattagctttgagttagcttaagtgtaaagtctactactgcaaaaactgttaaagtgtaaattttacaaaatacggtttttcgattttcaagatttgtattctacaataaataagctataaattgattctatacaatgatccaaagtcggccggttttaatatgattctttagtagggcggatggttatgttgtccgcatttgatagtcacatcgtggtcttgcgcggtgactacacgggccttgcatttgtgaacacccgctcgagcgcaagaccaataagttttcaatcccgaggtcttgtttcgagtgaaggagaactctccgatcttaagttttcggctccctcgaaaaccggtgatgtacgagtagtacgcaacagaacctgtgaatagaaaatatacacacttggttagtacaaactggtggaggagtgcgacgcagatctaaagctagaggtcaaagagacgcatgaagagcgagaaacttagctaacttgatttttattaagtcagacgagtgttgaggtgatgcaatattttacacttggacttaagactagtgcgctatgtcgttgttgccggcgctgaagtggcggccgtttccaatgggtcctgacgacgctccgcccgggctgccgcctcggcttccgcccgctgtcgcttcagggagccgtactttcgcgccttagtgataacttcatggttgtgctcgctgttcaggatggtgagtgtatccaatttggtcttgagccgcgcacgacatcgcaacactgcgaactaaaagtagaaccacaataaatacatttttggtgtagatttggcttaaactgtgaaaggaatgcaattaactttacgaaataactaacaattaattacagctgtcttcaactcagaaaagtaggctctacttatcttgctctcgactaagattaagtagtaactagattagttatattttctcaatattttaaggagaatttaaaacaaaaacgttttttcgaatgtatagttttatccaattacctggctgcagcgccaataggtgacgtcgtcccggcagatgtgacgattgaaggtgtgttgcttgagcatgatctgcttggtgccgtacttgctgacgatgaagaagggagagttgctgttgaccactccggcggacgaggcgttggccagctgcatagtggcctcgcccacatccacgctgatctggtagtcgaatttggctacaataagaagagttttcctcgttagttgtgcgtgatgattggattagggggaattattagttcagaaaaggaaataaaacacttgggattgctttaatggtaaaatggtattcggtatattgtacattgcggattcggcctatgactacatacacatcctacatcctaatagcactgcagacagtgctgggcgtgctcatgatgcctggtgagtcgaggtcgtcggctcagctccacgaggacgtagtaggtcgggcagttcctggtcaagcaatggaagtaggtgcggtactgcatggcgcgggtttttttgtaagacttcccgttgaccaccaggaactcgccctgagcggtgcgcttcaagaggacgcccttgttctggtcttttgctgaagaggatgaagacgaagatgaagatggtatgatgatgaaatgactgctgccacatgagtttaatgagcttatggtaggtaatgcatgcaactgggtataatcttttggacaaatgacattctttcgggtttatgtaatctcatttaatattgcggataaaaagcatccttgggcattagtttagcgggcaccttgccacccaaaaagcgcggcggatgattgtgggcattcttccccagcttgatccctccgtcgaacttggtgatggccctcgcggagcacttgttctcgttcaaacgcttgccatttccgtcggaacagatccaattgaccgtggcccggaaactggcctccttcttgtacatgtatccattgaataccaggttaaaaccctgcttctggtttttcaggaagaagtactcatgcttatcaatccactggccacgcggaatatccccgatgaactgacctgtaatggaggatccaaggaaactgactttattacccgggtggtttgaaaataaaaaggtatagcccagagaaaaacacatggaagtttgaggtgctgagtaaactatttattgcaggcaattcccgatacactcttactatttatagccgcttatttttatcatttgtagaaggctgtagctagtttgcctttaactggctacaagtcgattgatagtctaatattctagtgtttggctagacatcccttttgtggtcaagaagggttgattggtagcaaggtggactcacctggggcataaagcactttccacattaattcaacaactaccagagcagaaaaatcactaaatatcactaaaaacactagttcacattaaattcaaatagaacatcatcctttttggtacttttttggagggattcctttttgagacaccaacaacaacaaagatgacaatcggtgcacacacacagacgcacatacatacgcgcagggccacacgcacttactcgctgcattttcgcaggataattcacatattgtaaacttcggacattaatatgcatgctgcagttagccacatttaagccacaacaccttttgttaactatagacttgcaatttgtttgacaaaaaacaaaaactcagcgaacacaacacggcgaaaaaataacaactacaacaaaaatggcgtgccaacagcagcacaagcagtgctgttagcgaagctatcggttatcggctgttaactgtgtttgaatcgtaacgtattttatttttacatatctatattttactgatattcttgctatattttttttattttcagaattcgcattgtcttatatctgaaaaattccataaatgtaagctcatagctcaacaatcgatggtgtatcaaggcaagaagaagcactattactatgagaacatgtattctaatattacagaagcgatcccttacacattttttcctgctaatcccttcgactgataaataaatataaatgattttgcaaaataacatatttagccaaatagaaaagcactaatcgataatgttaggtgccaaacatcgataacatagtgagtgccagctctaaagtacagtgctcttcttctttaaaccgtgtttttcgtgcattaaatattttattttatatatttgtacattactccctgcttgtaaaccaataaaatacacaagaaccagcaaaagaccttccacagttgttttattttaattttttcgcccgaaaggcccaatcttacccagatgttctaacctgttgcgtttgattctccaattgacagccgccacatccgcatctgcaactaagattccaccacgtaaacgcggcagaccgaaaacaaaggttgaggatcagacgcccaagccgaagctcctggaaaaactacaggcggctaccctgaacgaggaggccagcgagcctgcggtgtacgcctccaccacgaagggtgagtccgaatcctggctagaagccaaaatcctgatccatgataaccaagctaattcacgctccattcgcaggcggtgtcaagctaatcttcaatggtcacctgttcaagttctcgttccgcaaggcggactattccgtgtttcagtgctgctaccgtgagcacggcgaggagtgcaaggtgcgggtggtatgcgaccagaaaagagtctttccttacgagggcgagcacgtgcacttcatgcaggccagcgacaaaagctgcctaccctctcaattcatgcctggcgaatcgggagtcatatcctcgctgtcgcccagcaaggagctgctgatgaagaataccaccaagctcgaggaagccgacgacaaggaggatgaagatttcgaggagtttgagattcaggagatcgacgagattgaattggacgaaccggagaagacgcccgccaaggaggaagaagtggaccccaatgatttccgtgaaaaaatcaagcgacgactgcaaaaagcactgcagaacaagaagaagtgacacggaatatgccttagatcttcaaactacaccttttactatataaacttaactaagatcgagaaggctcaagaaggcccaacagtacaagatctgagctgcctaagggcttcacattatactttctatatccatttgggtcttaaatagccctaataattctaaataattaagtttttcgtaataaaacgatgtcaataaatcggaccttaaaccatttcactagctagtaagatctaacttaatacgtagctgtactcaaaaccccatttaaatgataaataacataagccctttcatgtctttcagtgacccaacacgtccgcaactgtggtcctcagatgttcctgatcagccgcaagggcggcactctgttgaccatcaacaactttgtgtaccgctccaatcttaagttcttcggcaagagcaataatatcctgtactgggagtgcgtccaaaaccgatcggttaagtgccgcagtcgcttaaagaccatcggcgatgatctctatgtaaccaatggttcgtaaagcgaagtaagcaaatgcaaaggccatttaatggcttctttccatcttcagatgtgcacaatcacatgggcgacaacaagcgtattgaggcggccaaggcggctgggatgctgatccacaagaagttgagttccctcacagccgccgacaaaatccagggttcctggaaaatggacaccgagggcaacccagaccatctgcccaagatgtagccgcttcctatacattcccaacccaaacgttcgtgttctgttagggctaagctaatgtattctactattgttcttgagcgtatatcattgatttagactgagtgtcccgagcctagttaggatgggtaagtagcctgttcatctgggatctcaaagtaccatttttgtaattcttaaagtcccgggtcatattatttattctgttctcattgcttagacgcttttggccacggcactgacttaaacaatggcttgtgttacgtacaaaatatgaactcttaataaaatcagatgaacatctaaacgaattggaattatatgtatgatctcatcataatatagaagagattctttcatgcgttctaaatagtgtttattttgtgcactaaacgtatttgcgttaagagatcttatcccgttttttgaaagttttatgaattaatcaattctcgtgggtccatataaatttaagtttagagtttagctatgcatgagtattttgatatttcacgttgcgttattatgtttcagaaactatctgactttttcaagatatccatataaactatatgctaattttggtgtacttctaaataatcaataatattcttgttctctatatatctcgttcgctggtaaatatctacgaacaattagaagaagctgtgtctattacctatgcagtgcaggggttggaatgtacttgacgatgagaacaggaccctttttggccctagtcggtaaagacccaaggcatctttaggctttgttgctgactcctgacatttttgtggttgtgcgatgagcacgtgctgcggtatttcacctcggagtccaccatgaacgtagtggctcgggccttgcagcccttgtgatgatacatgcaacgccaggatccgataaggttgtccttgcccaaaatacggtggacgataaagtgcttgttggcaatgattagcctcggacgtctatgagcagcaagactgaactccgcaggcccgtcgaagttcagaaacttttttgagtagcgtttgcgatctgaaagaaacaaaaagcatcaagtcagtaaattgtcttggtaatgtccacaaaactattgtgtaactagcgtatttgacttaaacaggatggcagagtagatgtttccattatctttatttcggtttgtaaattgcttaagctaatcaggacctatacaattttgcacttagcttaggtttaggtggctcgatttgcagcatgcaatctttggaatatttcaagtactttgcagtagcttccaattccaccgtgatgttatttatacaaacatgatatatgcctgtccttaaaattctgcaaagactccgctgcccgctaaaaatcgctcaccttaggtacactctacatcgacattagttcaacagataataaaaaccacagattttggtgagcccacaaccgacggggctagtaatctttgctaatgaagacggcaccgtgcgcctggtgctgctgcatcagcgccatcatttgcggtgtttgaacgtgtggcagggagatgggcatcgccaaagacatggagacgggcacaggtaccgtcaccggcatgccgaggtgggtgggccctgtggcgtacgccgcggtcggaggcatctgcgcaacttgggtcatcatttccatcgcaggagtgggagtcgccgaggtgagcacatggttcgggttgggtggtgaacttttaaccgctggcacagtgccgttggccttggcctggcagtaaagttgacacaggggcagcagctccttgtgccgcctcttgatatggctgagaaagttccccgtggacttggtggtgccggagatcagtccgtggcatgttgtgcaggtggcctggatagcacctggcgtcttctggttcggctggatgttcttgtagaacttaccgtccagtagcttgggcagggtaaagggtttccggaacgattcctcgtcgcttaagtaggtgacggcaagggcggccacagcagcatccgatgagtgcccaggcgtcggcgaaggctccattttgatcttgactgcaaaatgaaaagattaacagattagttgggatttaagaatgcttaacaactatatagtaggtacagaacgagaacactgattacgtattatgtgcacatttaatttaatttatttatgttaaggtagagctgaaatcgatgagtatattatattaactgctggtcctccggagcttactgcagctccggaaattcgtccagcaggtcagtcgtgagatccatcgagctgacctccggagcgtgggtgtgcggagtgccagcgatgcgcagggtgacctcctgcactttggaggtcaccaaagtggcccggcagctgtgtttcacgtagcgtgagcaccgccagaagacgttcttcaggctctgacgattcacgacataccgataaccctcgtagaccagcatcaccctgcctcgttgcgtcgtggtgtactggatactggcaccggtggttttgccctcgaagagcgccttcagcgactggatgacacctggaaagggaggtagatgtgttttgacagacattagttgaggttattttgggagatccaggtgagaccactaactagtgcacaataggtttaaagggaagttctagtacaggcatttatttcggtttacgaatgcaacaatcaatttaaactatttcccctcctttataggcataagtttaagagtagacagcttgtggtcaatgaactcctgtactgcggacggggtcagctggttgccgcgcagggcaaacactttacacacatgggctgaaaagatggaagacacacaggttagaacgactaatcgtgcaacgggcgcagcctcccttatgtacttatgatgtcctggatcaggtccttgtccgtggtctcctcgtgctgggcgatgcgcaccagcttgtctttaccaatcaccagatccatcacacggcacgtatatatcatcggcatggggatatacgccttggccagagccaccttggacacaaagacccggctgccatcgaacaaggggatagcgtcagcatctctaggggacttctgcacgctatcagttactggtttccttggatgctccgcgggcttcgggatggcagtgtccttgcttgggccatctggaacggcacacgatggcaaaaacgattaaaacactttagcttaggaggtcaacggaaaacataaacaaaataaaacacggttattgcggttttcttttttacaaagtctttatttcatttcgattaggaagctttcgcctacacttttagcgcaattctggcgtcaaaacagttttcccattatttttcacactcgttgcccaatttgacatattagaacacaaattatttattgaagtaagtccacgcgagtcacagtagacaaggaaatggcagcaacaatgccagggctgcactcgatgcacagcgagtcctcggtaaaagggcgagcaaaatgctacgttgtttgatctaaagtttttttaattatgaaaatgacataccttctttaatattactatactcaagtaaacatattactaaattatagcaaaatatgcatattggtattggtactaataaatacgtcatgcaaacagctcgttccgtgttagaaaacgatttaccggttttaagatggtctataatttttcagtagttttgcgcatacctatagctactgtactcccgaacattgcagccctgggtgcaagcgcttgatctggcaactctgttaaaatgtcgcccacagttgtgaaaaaatgaagtgatttccgaaaattgttgctaaattactaaacaaaaggtgaaattaagatttgtaatggccccgaaaagtgaatagtgttggtggagtcctagttgtgcatgaaagaaccgccttccaaagaagggagcccaatggcgagtaatgaagatgaataaatgccaacgacgcctggaatttcaatcaaatgtgtacaaatgttaaaacgaaattgcaaagcgacgccatgcgcgcaatgttaataaagtacagaaactagagtgaagcagggatatattacttggcggatcctcttgggcaatcaatcagtcagagcgttctaatcaataccccttcctcccacttcaatttgtgtcttgcagaacaggaggatgacttcaagttgcacctgcctctcctcgtgacaagaagaaagaagacgcccggtggctcccgcaagcagagttttgaccacctggaggtgagcttcaccagaagcaataggggtaacaacttgctgaccatcgatgggaagcccttcaccctcaatcgtcggatcaaggatgtgtgctactgggagtgcgtcaagctgcgctgcaagtacatcaagtgctccgcccgtgtggtgaccaaatccaatcggatctcggcactgagcgggctccacaaccatccctaagttacgaactacctgtgccatctcattagtctaataaaggtgtttacgttgaatcagtttatatcttccgcctctcctatcgttgttgattctatagtgtccttgcgcaactcaggacgccctctgactaatctctttcaattcttgcagcatgctaccaactggtgcccaatcgccgcggtgggaagaacctcatcttccaggggcacatgtactccgtggagcgcaagtaccgaaacagcatcaactgggtatgttccaagaacagcaacagcgtgcttcgctgcccggcgaggtgcgtcacaaatccggagagtggcaatggcatcaagctgagccaccgacgccacaatcatccggcggatgcctttaagccccacaagcgctgtcgaaagcgtcccggcgatcgaaagtaacaagtaaccatgtttcaggatgcaaagcatgcaggcttcggcaattgttagtcacactaaatataaatgtttctcatcgttgtcgaattgtaacattttggtgtaatggaatcactgttcatttggttttgggctttcacatatccgaattactttactaatactcactcatcagcacgtttcccataaactaattatagttttaagctgtagttaattccaaacgacttatgacttactatgaaaatctcctaacagattttcgccacagttgtgtttgccgacggaacggagttacgataatcgatggctaccgcttcgtgatcggtactacaaatctgcgtcgcacctatctgaagtgcgccaactttcgcagcaactgccgggcccgggccattcttaatacggatacgaacaaagtgcggatgaggcacgaccgccataatcactcccgtacggatgctgtgagcggacgtatctctaagaagtagcaggtaccgagctgtctagaggaataaacatgctgtttccgtttaaaaatgtttaactgcttttcactaccaacgaaaaaccataataaccttacatcctcacccataatttgaaagacctgtcctaatctaactaaattcgccaatctcttgcagataactcgaaaatagcgcagtatgtgcgctccaaccgaggaaccgatctcgtttaccacgagggaaacacctacacacccaatgaaaagctgagggagggacaaaagagtcgagactggaagtgctcaatgtaccataaggccaagtgccgggcccgcctggttactcgcattaccggtggaggggatattatacacgtgaccagcaacctgcacacacatcccacaatgtacaccacgcagaaaacggacattagcgtggttgaccagaaactgtgcctcgaaaggaatccactctgcgttaacactcgatcgattaaaatgtagatcaagtaaagaccaccgactgattactcgttacgattagcatgatcttcagtataaataacgttttagatttaaaaagtattaaaaaatgctcatatacattcaataatttttaagtaatttcatttatttataataagcatattttcttaagttctttcacatttgatttgtttactacgacgaattccatttttaattcaaaaccgttttatttacaggacatctttcgacattgcgccatctcccagttgaggccatatttgatgcggacggcaaacagatggacttcatacccaacattcgcgtcatccgaagtcagcggaagaccataaagctgatgtttaaaaaatatgcctactcgaagaccaacgagcacgataccacaacctactggcactgccgaagtcgtcgcaatggaaggcctgcgtgcaaggcccggttttccaccaagaagctcaagaacggtagctacaaagtatatctgacccagccggagcacaatcatcccccaaagaagcgtcgcctataatcagaataactatattttaagaagaatgatatattaaagagccatgtcttggcaaaatgacttgcaccgactctgaatctctactctactactctactctcaaatagcccagcaaatgaccatttactaattacaatgtgttcctttctccttccacagaaagcagcgtggcgatctactcggcaacctcccggggacgaatgcaactgatttacggcggacagccattcatcttcgagaagacgctgaaactgtcttcgggagaggagaagcgcttctggcgctgcaaccaatggtggaaccaaaagtgtcgctcgcgcgtcttcaccatcaacgacgttgtctgtccgcttaaccgattccacacgcacgaggagatcgtgcggcgaaagaagcgagtgcgccgcgtgccgccggtggagacgattgccaaggtggttgccacaacacccaggcatccgcagcatcaacagacaacccagcagcaacaagagattcagctgaccagcgatgcaattgctggagcaatactggatgatgaatccccagctacaatcgatgtcagcgagctggggatgcacctgaaatacgaagaaatcgtagcggatgtcacgggcattgtgggcggcacgcgagtggtcagtcgccgaaagtgaagattgctttttattttctgacgtaagatcgcagattcagattccttctttgtaaaaactcatgctttgagttttcatttttgaacttgccacgtcgaaaaccaagagccgaacagttttgatgaatttaaaaaggctaagcacaaccactagccaataaatacaatttttattattattttaaggacatatttttaaaactctttttattaagcgtaatattccaaggtttcctcccccatttgtaaaatttgataaataccccatgatttcctttgacattttggagttgtttagaataaaatctgttccttctgttatgcctttgttcaaacaaaattgacctagcctactcccataattattaatacaaaactgcgtttaagaaggcggacaagctagctattatgatacagcttataaacaatttattatgtgtacatttaataaacgtaagacccaaacagtgcaattgaatcgttgtagaacctccgaactttctccacaacccacttgagatccttccttcaagcgaatatcaccgacttactaacgcaccgggtcacatatctattctcttttaaggtgacgccacccagttcttcttcaccaagggtcagcgcgaatcggtcaaactcaactactgcggtcatagctacgtcaagttcatggagaatggacgcggcaccaagtggatttgtgccacgcgctccaccaccaagtgccgtgctcgcatccgtaccaccaaaaacaactacctggaggtactgtatgcgtcccacaatcacggttttccgccgcagaagaaggatcggggtcgagccagccaaaggatgtgatccaaaatgtaactgagagtgtgactgtgactaaagccaacttcccctacaatacaatttcaatagtttacaaaacacttgaagcctcctctaaaacagcttgactttgaaactatatattgaaaaaaaggctgagacagcgccaatcaatttcccagccaacccaatcctagtggtcaatctgtctaatggatgtagccatatttccttccattaaccaagctcaaagtttgccagatgcttagattggctaacactattttcgttttcaatacaaaagaacgcctatatgatcttcctaactcgaaatctgcgagcgagaaatatacttacatgaacagactttaaaaaaaaacgagttcaccataatgagggcccaaaaagtgtgctaaagaaacattttattcttcatggttaaattctcttacatacttaaagtgaatattgttaaataggaaatgaaattaaatttttcgagaggttacgacacaccacgaagtgcagaaatcaaaataatatagatcttttctaacttgtgtctttgaatttgaacttataccttgattaagtcgaccactttttttttgggtaatatcatcctttcctcatccactcaagagtggagttcctcgaagcagggctcgcacatccagttgcttccaggacatgtgttgcacagcgtattgatcctcctcaggcccgtcctgttcttttttaggcagttcacgcactttcccttcatgcgaggcaatcccacatacacaaagttgtgctcgttggatgaggtgcggatgatgttgtccgggttctttaggttcagccttccagcgggctccagttttatgattgtggctaaaaatttgtcatcccgcacctgccgcactttttgaatcggtgctatatgtcgtgcagccttaaaaatcaaacctgtaagtttaagaggaggaaagatatattatatggtaatgattttcttatgaatttaaagggtattagaataaaaatataccattaaatagtttaactaaactatcgtttgcttgtttcatttaataaattattactcttcgcttatttgtacactgttttgttcattaatgcattaaactttaatattcaagccgtatgttttcccaattgagcgtcagtcttgcaaacggtgtacaaatgtcacatttaaatttaaatataaaagatttagattagaggaaagtatcaaactaattttatagattataatggttcttaaaatttaataatcctctttatgaggacgaggtgggcaatcgagcactctgggaacaaatgtctttagtcgttccggcggcttgtgattgtgaaatcctcggattgattttattgactttatgtgagtggtcagcgccgaagtgcagtgcatctttttgtacatggagcagcgccagaaggccagacatttcccgggattcctggagtaacagctaaacgtgaatccctcgtggactaattttcctctatcgtcgtaggtgagaactgaaagagaagtattcaattagtcaatggagacaggaactaggcctactcttcgatacctcgcctcctaattgatcagaacgaagctcggttactttcatgagttcagatctttatttcacatgatcacatagccgtcaagggaatggaacaattggatttgcaaagcatatgcgaacttaaaaaaaccttcattggttaatcgaactcaggggtcttacagctatattcacaatcttattcattaaacttcaaattaaactcgattcgacacttcaaaatgcatattcgggtaactaggatgaaaatatcgaaaataagtgtacatagtccatttcctagatatgtacttttaatagctgttacttagtaactacattgcactgccaagaccagttggatagccaatctattcgtgcatgagcatcatggaggcgtgcatcagttcttgatctgtcaactgcaatgtggccgcatcgctagtcaactggtgttcatcgatgaactcttgcttctgctcctgaagctgcagctgtgtgaagctgtgcgtcctggagagctttcttcctgtgccgatcgctgccattttgttacgctgaatgatcttgtctatcttctccgtgtgcggctggtggttatgtagtccgcctgtcacactcttaaggcgtccgttctccaggacgcagcgagatcgacagcgcatttcatgcgcctttttggagtagttgtggcagcgccaatactgtttattgctcttgcgactgtggcagttgtacatgtagccatttaacactaggcacggcgtcgaccaggggctctctataaaaaccagctcgtcctctgaaaagaagaagtttttatcgttagttcagttgtctacacttaagatatttggttaataacaattgggttacccagtccacaatgagctccatcttttgttttggtcttaatttattaggagctaagtatgaaatacgtttacagaactcagacaagtcgcttaaaatctactttcgagtggtcgggtcgatttctttgggcaaaatggtcttgagccttgtggaattgtgaatttttgcatgacttactaacatataaagatgtattactattaaaataaatatgtattaattattacagagctggaaagttttaggttttaaaaataagccaaaataataccagctatggctttcttatctttataaagactttccaactgattgactgtagattggttaaaaactcccaagtgaaatcgactccttccgtggttcgagataaataattagcttaggtgttagctgataactcctaggggtgctcgctcttcagcagggatcgatgcttggcctcttctgtccgccacctgcccacccgttgccgatcccggatccgctcctctgcatgccgctcctcctcatctaactcctcctcagcggcgtccacaagggcctgcatctcgatctcggtagcctcggcagcgggcaggaacaacttgcagtccttgccgtccttggcagtcacaatgatgttgctactgcccagatactgtgatatctttgggttcgacgtgcagatctcgatgtactcctccagttcctgctccaccttatacagttgtcgctggccaatcctcgaggcgtgggactcgtgattgtgctgacgtcgtgcgtcgatgaagtgtccgtcgcgggtgatgaccaccgccttgcagcgcagcttgagcacatccgcacagcgccaggtcgtctgtccattggcctgggtgagcttcttgttgtagatgtagttgcggaacaccagctgggcgttcttcttctggctgcgaatgaaactgatctccgtatctgcgagagtcgaggaaaaccgaaagcatggggtttagtgggcataatataattgacagatgatctagttgctattctagtgaatgtacatatatggcttaagcgttaagttaggatcggcgaaataaaacaacgtttagtttagactttggctttaagcagtttattcgcaatcagtgaaccggaggacccttgggtttggtggtagaaaacttaccaaaatgcggcgggatggcattttacaacttacggtagcatttgcatcgcttggttttcaaataagcactatcacagattatcaaaagggtggaaatagggaggcgttgccccccttaccagccccatcactttaaatattaaataaacaccacaccaaacacaccgtcacaagctggaaataattaattgtgaacaaataggccgtgtaattcggatgcaataaaataacaaaacaaattggcttgcatttttttaatgaatttgcacggcgttgccacacagccgaagcaccagggctgcacattcaattagggtttccggaagtggcaacaccgtcctcaatttccacaaaatggcaactccgcattaattcaaattttaattctttattttttcatactacaaatatatatataatatattctgtggatactttctaaatatccggaccaggcgcgcaaaatataaattacacgattcaaacgttaatataaattttctcaaatacgcttaacaataaaaaaacgaaaattactactacaaataaaggaaatataagtcggaaatgcttcaaggcggtccaaccttttgttccaaggtatataaactatcgcctatatgaattaaaacggtttatgattatctcttaccaattaggtaagaggtctagtatattctgttttttttgtttaaggttaccgcgacatccgtaaatatcgtgaaattcttcagacaccctttaattcggaaccatataaaaaaaacacgcaaaatgttccatacaaaaaatttggaatgaaaaaacaaaatcagcacgcaaaaagtaaaacagaatcgacgctgcatgaagaaataaatttcctctccactgataacgttaaaagagtctccctatacgtattattaaaatctttccttttttttttacgtgaccactaaaacgattagaaatgaacctttactataacacagcgttataaatacaattttttttttaagactcggcaatcaatgccgttgctggatttgcatcagcaagcttttacgttgcttaaacaaatccagacaacatctttaagtacgagtttgaaaacataaataacaacaaacctcagtagccttagcatcaccagaggatcattattaaacagaaatgcgcatgcccaaataataaccccctgatcatgtaagattgaaaactccaattactcgctttgctcagtcaaataaacaattacaaatgcctgcaaattttggaaaaatatatggataggtgtggttttaagagtgccggtattaccttgagtagttgcagctcttcacgggttcggcttcacgttgacatcagatatccatcgtagcagcttcttaaaatttcatcactctacttaccttttaactgaataagtgtaaaaccgcgcgatctccgtccagcatttaacaaatatgcatcggacagcagatctgcctagtgctctttgtcgattcgaaatagaacacaggcccgtaaactacttattaactaatggccagcgaagtatagcttaagtttgttcaaaacaaaattaaacgcactttgccgaactctaaaaggacatgatccgcttgcgacgctaatagatttggaaagtgttcaagtttggaatacatatgtgatcttttttttaacgtgtttgcatttcgcaagcggacttaatgtcctttaaatattgcttatatctattggcctctggccatgtatgctttgcaattcaaccaaccttgagcctctgtgttgccctgatccccgctggtgtcgacaaacgatgattcactgtagttctgggactgttgcttgaccacagccttggaagtggtcgccgtcactccgccaccgctcgtatttgccgcagtctggttgccagcatcctcgttttcagtgaagtagctgtcgtcgtagcgcatgtctccgtaagtatcgtcctccacataggtgccctcggcatcgccggcggcgtcgccatggtcctcagagtagtcaggttcagatttcgtgggcaattccatggggagatcaatgtactcggcttcctcctgtcgaacctgctgcggcgattgctggtggagctttgcttctgccgcagagaccacagaggtttgcacggtgatctgttgcggcacaagttgggcggttgtcgtggctccagtttcagtggtcgagtcgagagggtccataacatttgcggaggtgcttgtcttggagcgctttacgccggcgctcgaggaggcgggggtcagggaggagcgctgggcagagcgtttgtttgtcgacaccagcgtcgccgtcgtcgtggttcccgtctgcagctgctgcgattggatctgctgcgccgcctgctgcggttgctgctgttgtacaatggtggcttggggtgcggccgtggtctggatgacgatctgggtggtgctctgtttctcgtcgcccaggccgtcgtccacggtctcgatcttgtagcgggcggaggcgcgaggctgctggcgctgcacccgctgagccggtatttgctgttgttgtacatgaggtgctgctggcggcgggctggattcctgcggcggctgaggcgcaggatcgttctgaaaaaaaaatattggttttttaattattaacatatattttaggaataagtgaaaagatattttgtatgttctagcacctctttaaaaatgaaccacgatcaaaacttaataaactttaaaagtatctgcatttaataaaatggacgatttcaaaactatatgttgaaaagaattattccgttagaatggaatttgcaaagaaataagaaatctggccattaattagtaaagtacgccttccttgaattgggaaacaataatacattttctagttccgatgcctgtttctttaggtacagctgcactaaatttaattttgcaaatacgttaattttagtcgaaaacattaagagatatttcccaatttaaacattagtttaaaagcaaaaaatgtttatgctttggcatcgaattcgctgcgagacaaaaacaaccactccaatttgccgctgccgtgcgagccagagcgagacaaacgcttcgcgtatagcccctgcagttgtctctctctggcacgcgtgccttttggcatttggtttgcgagaaatttctcggtacagtcaaaccatgctcttatacagacgccagccatcgcgtctgtatgtattgggcgcgaaaggttgcgttgtagttgctcgattcgatataccagtatatcacgcacacaaatgtatacatatactcacatccgttagccccttgatttgcagcgattccgcggtgctaataaacgcgggcagggcgtcctgcttcacgttgacctcgccgcagtacatgaattggatgaggtccttcagcgccgagtggctgacgttgttcaggaatactgcaagataggcgaagagagtataaggtaaaaaatcacgtagagctacagatctgagctgaggggcacaaactcaccgatagcgtgggtgttcgacggcatctgagtgaacatcttgcggaagaagggcgagcagacggataacaccaatcggtgggccttcactatttggccctcggcggccagcgagacgtccaccaggtcgccgcggcatagcgactcgtggaagccggccgacaaattcgtgttgaagttgttccagcacaagctgaattgctcgtcgtccgccatcttggacgaaaatcaatacttttctgtatctatgcgtttgttggctgcaggcgaaaaagtgcaatgcgcgtttaaaactcaatgcagcgagtgctgaaaaatggcaaaggcacacacaaaatagaatgcactgcagccaaaaaaaactgggaaattttcacgcgtctgtctgtgtgtgcgtgtgtgtaaattacatttatctcgcttaatgaccgcaacctactgtgtatattcacttggggcgccattactcacctcttgactaaatatttttccaataaaataactaactaaagccagagttttttgctagcgcggccgacacgcagaacgcgtccgagttctttgacgtgaaaattagaagtgttaccaggcgacgagattgctggcgatggcaaaacaaaaagtgacaatatatcgatagcttaaaatatttatatcgaaatacttttatgaatattgatagttgatgtgctttgatattttttttttaaatgttagtacgaaaatcacataattaagttcataactttttgaaaacttttacatactttagtttacatatgctgtaggattttagtttgcgggtgtgttaaaaaaggttgtaggactaagaaaatatcggcctaagtatacgatgtatttatgttatgacgaaatttcttatttcacaacagttttgttgtctagcttaatgtttaatttattttaaatgaaataaaacaaaatacaaattaacgagtttaaagactagcagtcaaactagcacaactagaataaaattcataagataaacagaaaaattttaacttttttaaattctcctattttttaaactgggccttcgattttttacgaatggaggattattttctagcggaattcattataactctgacaaactcttatggagcgcatcgtcactacgtaaaccctacactctgaatgcacaagggcactatatttttaaaaaaaaagtgacttaataggattataagaaaggcaaatattcgctaaaagttcttaaacataccaaacaaaatatgtatgtacataatatgtatatctgtgtactgtatgtacatatgcactacatatgcaattatatacatatgtgaacacgtttttggtgcaatgccaagattcgaaatgaaggtattcatcccataaaggcgaaatattattaaaaatgttgctctatttagacaacttcacatatccatgttattcatctctattaaatcataacagtttcaagtgaaataaacaataatatatgagagcgtaacgtttaaaccaaacatattccccacgatttatttatttgttagcttagtacactcttaaa

SEQ ID NO: 26978 - DNA, 1682 bp, DROSOPHILA
caaagaactcggacgcgttctgcgtgtcggccgcgctagcaaaaaactctggctttagttagttattttattggaaaaatatttagtcaagagccaacaaacgcatagatacagaaaagtattgattttcgtccaagatggcggacgacgagcaattcagcttgtgctggaacaacttcaacacgaatttgtcggccggcttccacgagtcgctatgccgcggcgacctggtggacgtctcgctggccgccgagggccaaatagtgaaggcccaccgattggtgttatccgtctgctcgcccttcttccgcaagatgttcactcagatgccgtcgaacacccacgctatcgtattcctgaacaacgtcagccactcggcgctgaaggacctcatccaattcatgtactgcggcgaggtcaacgtgaagcaggacgccctgcccgcgtttattagcaccgcggaatcgctgcaaatcaaggggctaacggataacgatcctgcgcctcagccgccgcaggaatccagcccgccgccagcagcacctcatgtacaacaacagcaaataccggctcagcgggtgcagcgccagcagcctcgcgcctccgcccgctacaagatcgagaccgtggacgacggcctgggcgacgagaaacagagcaccacccagatcgtcatccagaccacggccgcaccccaagccaccattgtacaacagcagcaaccgcagcaggcggcgcagcagatccaatcgcagcagctgcagacgggaaccacgacgacggcgacgctggtgtcgacaaacaaacgctctgcccagcgctcctccctgacccccgcctcctcgagcgccggcgtaaagcgctccaagacaagcacctccgcaaatgttatggaccctctcgactcgaccactgaaactggagccacgacaaccgcccaacttgtgccgcaacagatcaccgtgcaaacctctgtggtctctgcggcagaagcaaagctccaccagcaatcgccgcagcaggttcgacaggaggaagccgagtacattgatctccccatggaattgcccacgaaatctgaacctgactactctgaggaccatggcgacgccgccggcgatgccgagggcacctatgtggaggacgatacttacggagacatgcgctacgacgacagctacttcactgaaaacgaggatgctggcaaccagactgcggcaaatacgagcggtggcggagtgacggcgaccacttccaaggctgtggtcaagcaacagtcccagaactacagtgaatcatcgtttgtcgacaccagcggggatcagggcaacacagaggctcaagatttaggtgaactcaatcctagcaacctggctgactttggtaacgagagcttcttgcccaaaaccaagggtaaacggccacagaatgttcgctgtggactggcgcccgatcagaagtgcgtccgcaccctggacgactgggatcgcatccggtatgatcggaccaggagcggcgatgttctggtctacgacggatatcgttatgatcgacgagccaactacaacgatatcatatattgggggtgtgccaaaaagcgactaagctgcaacgtctacatgattacccacaaaaacaaacccacatatgtagccatttcaggcgtgcacaaccatttgtag

SEQ ID NO: 26979 - protein, 514 aa, DROSOPHILA
MADDEQFSLCWNNFNTNLSAGFHESLCRGDLVDVSLAAEGQIVKAHRLVLSVCSPFFRKMFTQMPSNTHAIVFLNNVSHSALKDLIQFMYCGEVNVKQDALPAFISTAESLQIKGLTDNDPAPQPPQESSPPPAAPHVQQQQIPAQRVQRQQPRASARYKIETVDDGLGDEKQSTTQIVIQTTAAPQATIVQQQQPQQAAQQIQSQQLQTGTTTTATLVSTNKRSAQRSSLTPASSSAGVKRSKTSTSANVMDPLDSTTETGATTTAQLVPQQITVQTSVVSAAEAKLHQQSPQQVRQEEAEYIDLPMELPTKSEPDYSEDHGDAAGDAEGTYVEDDTYGDMRYDDSYFTENEDAGNQTAANTSGGGVTATTSKAVVKQQSQNYSESSFVDTSGDQGNTEAQDLGELNPSNLADFGNESFLPKTKGKRPQNVRCGLAPDQKCVRTLDDWDRIRYDRTRSGDVLVYDGYRYDRRANYNDIIYWGCAKKRLSCNVYMITHKNKPTYVAISGVHNHL

SEQ ID NO: 26980 - DNA, 2622 bp, DROSOPHILA
tcaaatgaatgttaggtaaagatttacaactttaggggtatttaatagtctacatatcttacacgcacttttatttctatttggtttttgcaactttactatgatattaaaaatccaattaatggaatacattcacagccctaaaataccactaaagttaagctccattgaaattttgttcagcacctgctaagctttaacttgattaataatgatttattgtataaaaatgctttaagatttattcaacaggtatttgtatgttttcttaggtcacaggtgcgagtgcttcgcatatttcagtcggtacacctccagtccattcttctgcacgtgggtggtggccctgaccttgcagttcgaacttcgatacctggcacaccgccagttgatgctgctcttcagcttccgatccatgacaaactcatgtctgtcgattaccagcttacgctttttcttccgggtgcaactaaaagtggccaaatgtgaggtacctgcaaaggaaagcataagtgttaatgatatatacacacaaagttaagtgagtattaaaaatataggattaggcttgaatggattatgttttacataagtttataattacatgataaaagttacaatacaattattacgcacactttcaggttgttttttagggttttaattgagaaaatcaaacgtactaaaaactttcgttcaacgttacagcaactcagttttaaattattttcgtagttgtatgcttataataactaagtctatgaaaatgaataaatatgtccatttatccattttcttatgtacataaacgagttgatcaaaattaattaataaatgttttcctttcacttaactacaattatggaaagcagagcactagcacagctctaaggtataggttttatttagggtttatcaaaactataagatatctcccttcagcattacaaaatcaaaactgtttggaattcataaccatagccaaaagatggttcacacattattcaattgcagcttcatgtactgctttcgctcctggtcgagtggtgaatgattgtgcgttttgatgtgcactatttttccgtttagcacatggagccgaccatggcacttggtctttgtggtgtactgtgtgcagcgccagtaggtttttccatttatgcacttctctcggatgaaggggaacttcttgtgcaacagcagcacgtggcccttctggctgacaacgtactcgaattgtttttctaaaaagagtggaaatgtaaaaggttagtatgggttacctaatgtagacacaagcaatggcaaatggcaaatggcaaatggcaaagaagctaataaaaaagttttgccaatcaatgtattttctttttatttataatgattgaatgctccactgtcgctcgtctctaaagtacaccttattccaactacagtatccctaaacgtcgtgagtaagttcattgagctcctcctcgtgcagatcgaagctgacgccgccagctccctccatctcgcagtccaatttggtggccatttggtgcggatcccttagcgtttgcgccttgctggagctgtacttgttccgcttgagctcggcgtgcaggtgttccgccttgttgatgatgaacttgggcggcgtctcctttaacatggtgatgcgtgcaggacacttgagcttcttggtggccatcgagctgcatcgccacaggatcttctttttgttctcgctcatgatcagaaagcgaatgccattggccatgatggcggggcgaccgcgcagcgattgcgtaaaaaaaaccagcacatcttccggattgggcacctcgtcgttggccagaacaactgcaataaagaaagatggtattagatgtggtcgaaagtgttgggtaatacaagtatacattcaataaattggacaattatttaggtgtctcatatttttctttttgttttattaacatgtttctgcgaaagactcttaaattacatatcgaacatgtgcgccatgctctgaggaagactcctcacgttggacaccacaggagtccttattttgggaccgtctcccgtgccagagttttctttgcgcttcggtcgaatgtggcagtgatcgtggatctgccggaagtcgttgctatttgtcttgctcatgcaaattagcactgggcacttggtatgccgataataccaatggcagcgccagtacaaattcgtgcggtttatgttgttgcggaagaacttcatcccatcgagccacaggagctgcccgccacgtttggacacggagaactgaatctgcggattgttaccgcgatactgtccatgtccgtaatcgaattctgaaagaaacccgaatacagaagaatgaatttagtaacttgttctaatttcttaagctaaggcaattgaattggttgagatagatacttaaaggtattaaaaaacatttgacattgcttcgctttaatacaaatattctacatgcttatggactaggtgcttagcagtatcttattgcagctagaagtcctggtttctaagtttcgattttatttcaaggagtggcggcggctccattatgagaggaggtacacgggcaggctcatgattcgtatccgg

SEQ ID NO: 26981 - DNA, 447 bp, DROSOPHILA
caacaaggcggaacacctgcacgccgagctcaagcggaacaagtacagctccagcaaggcgcaaacgctaagggatccgcaccaaatggccaccaaattggactgcgagatggagggagctggcggcgtcagcttcgatctgcacgaggaggagctcaatgaacttactcacgacgtttagggatactgtagttggaataaggaaaaacaattcgagtacgttgtcagccagaagggccacgtgctgctgttgcacaagaagttccccttcatccgagagaagtgcataaatggaaaaacctactggcgctgcacacagtacaccacaaagaccaagtgccatggtcggctccatgtgctaaacggaaaaatagtgcacatcaaaacgcacaatcattcaccactcgaccaggagcgaaagcagtacatgaagctgcaattgaataa

SEQ ID NO: 26982 - protein, 43 aa, DROSOPHILA
MNLLTTFRDTVVGIRKNNSSTLSARRATCCCCTRSSPSSERSA

SEQ ID NO: 26983 - DNA, 5912 bp, DROSOPHILA
tgtttagatgatagccagcagagttaagagcttcgcgaagctggaatccggataccctgcccgtattctcaacatcatagaccttaaatatggccttccatttggcaatttccgagagcaaagtctcgaactcctcgaatcccagctttccagacttatcagcatccaacatggcaaccatggagcggcaaacatccttggaaaagccatgagtctcatccacaattgctgtaaaaatttctttgtattctagtcttttttaaaagcgtatatatatcatcttaccatttgctgttacaggacctccatccgccggattgtcccctatcagcctcttgttcgactgatcattcattcccaactgctcctcgaatggcgtacccttcaaaaacggtccacaaatcaaggataaaagtccacaagcgccagctccatcgtcaccagggccagcagcctgggtctcaaaggccatgttattggagaaacggttgaaaaccactggtttgggtaaatctgaaaggaaatcgttgtttgaaaagccatttgagtagtttttaatctcgagccttaccgtccctcatcgaatggtccaaaatgcgtttcaattccatccaatccacctccatgtccttgccggcaatgctgtcgaagaggcgtcgcaagccctccttctgaggatcgatgggcttgggtgttgggaatcctggcgtaatctttaaagcgaaatttctgaataagcgatcccgatcccattgaccacagttaacttaccgtatcggctttgccgccataacccacatgatcatcattctctctagatgggagtgaaaagcgaaatgattgatattgaaatgaatggaaaacaattcgtttatagagaaacaaatggaatacaatacaatttacagtacaaggatttcgaatggcctaatgagtattgagaagcagattttcaagatgagcttaatttgttggggtccatttttaaaagtatattgttgtggaagtttcctttattattactttaataaatatctcgttacatgacaaaaatacaatttaaacaagggttaaaaataaaccgaaaaatttaactttgttaatagatttcactatgttgctgccgccaccctttttataactgataaattaagaaaattgaacttcatattgatcagaattattcttaacatgtaacagacagaccgacattacatttgaatttatctagaagaaatatatttcgagtttctggaatactgcaggcgttaatctcaggtaaaaatatatataagaggagtgattaaaaaatggcataaccaacttatctgtcaggaatgtgtagagggtaaagaaacaaatctagtcaaacatttactagcactagagattaaagaatactatagtcacaacataccacatattgcacgtaagaagcttttagttatagaaacccctcattatttctaatatacaaactcattgtcattgtctacttgtacgcactccatgttattttgagtttctgagaacactcgaatgatgaactctccctcctcgtttggatcgaaagttgaaggcacaatcaggtagtgaccaggaggcaatttgaagcgagcacacacctaaataagaaacgcatatgttaagtgattgcagccatatcctggatatatccgtatacgtacttcgcgggtgttgataaagtgcggcgatcttcccacagaagacttgtatctgaaaaagttcagaccctggggacggttttccagttcgcgatcattaaggctatagatagcgaaaccaatggtcagacactccattcccatattgcgcttcgatctgcgattcttttgcattaaggccacgatgacggtgcactgtccctcttcgtcttcctcatcaggatcgactagggtgataatatactgggggttgtgccagaaggtatccaggaaattgcggcaaccaccagctgtaacaccgggtgtccattctccctcatacatggacatctcccactttcgcttgccactgttttgttggtcctcggtcagtgagtccggcgacaaattgcaaatctgaacaaaatcatggcgaatgaatcatgaaatatttcaccaagaaatattaatagtcctacctccacgcgatcgaagtggttaagaaaatcttggaaggacatccagaactctccgtctctgtcgaatgttagtccaatctccgccttctgttcctcgggtatatagcgccattctggtgagctatcactccatggtccattccactcggcttcattgccccaaggatttcgcattcttatcatagggatctttccctgacgatttggcgttactatgtcaataaggcaaacctgttgacataagattaattaataaaatgttcttatcatagcaattttccgaacaaaccttggttatggagtaagcgtgaccacggattaagccctgaggagtttctgcctccgtgacatttggatcaggctcaatcgagcatcccatcatggaattgcgttcagctgctttttgcagaatggtgaatagattgccgggtgcttcttttaaatcgtaccactcggatacgccgccagtaaagtcctccatggcctcgcaagtgctgcctccctttagtgcctcgtaggatccatgaagtctagaaagcatatatacatcagttgaccataaagtatgtgaataatgtagtcctacttggcataagccttctccagcagggcgctccagaactcgttcttctccgtggagtgcatgtacatcagctctccattataagtgggcaaacggtcatcaatgattacatcaacccatttaccttaaaattttaaactaaaattgtaagaagcgcatgaataatttttttaataaataatttaccatactgccaaaagcggaaatggaagataccagcatagttctcctcgaaactctgttccgctggaattacccgaaagaaaaggttggattcctgagttaaattggctgtggcagccaagagccaactgtaaatgtaagcatttatttaaaactattaattattctggctgcggaaatagagattttgttcttaccagtcaccaagctcgccttgctgaacatcaaaacgcgaataaccctccacaaaaaactggggattctcggcaatttcctttataattaaagcatttatacctttagttacgggtaatatggtagtatctaaaacttacatgaggtctcagccattcgatgtgacgatctggacgccgggaaaactgaagagactcgttcgaagccggaaaaagtggatcttcgaaaagggaaccactggccaggcagctgttcaatattgtctcatagtcctgcacctcggaatagggtcccaggctcgagctcttctctcccagctaaaaaatacatgctattagtgatatgaatctaacaaaattgatgaacttgattaagagtattatgtatgtacacgataaagttgtgtaatggagttgtataaacgatgatgcgttttacactttacatgcgaaagaaaaagaacacaaggacaacacagtacgacactttggcagcgcattatccttggaatggaattatgtcaatgccattacgatgacgggagtaggtacttacgttcccatagtacaacgtactattactttgagattgcaatggttgctaatgagtggaatgtatatgtatttgttaacatgcatatgtagatttcaatggattgttttctatgtttgtttagtatagtatagcgccctataaataactgttgataaccgtgtgggtcaacttacaactctcatattcttgatgctgggcagaaccctcttggtgtcggcctccttcttgatgaagatctcgttgatcaccgatccgaccacatccttggccgctcccattgcagcctcaccagctgcattgaggaactcctgtcccgcttgcctcaagaatcccctcaagtcgtccatcgtgcagatatctgaaaatatatgtacatatatagtttaatatcagttagcagtgtaaggtgccgcctcagattaaaaacccattaataaatatttattgttcaaacatttgatgactagttagcaacatccaatattttttatatcgcccatatttacttataagcctcgcggtggaattaaaagcacacccagagacataaatatggtttaacgagcattacagaatcgttagtattcccagtgtgactggaagtcgggctaaatgaaattactttaattcacgcaaactgaaattatactttggagacaagaatgtctcggttcgcacccaaatataattcaaatgtttctacatatacaatgctgtatttatacatatgtagccgctatatatatatgctatattgtgtgacatcattcggaagcatgagattctctagtgactcaaagggtgtgcgccattcgggagattaagcttcgttttttatccatattaagccgggatattgacattgacccatggaactactacatatgtacgacacatatagggtatatatttctgtgacaatagtaaattggcctttaattggggcgaaatatgctagattggctgacccatctgttattgtatttgcgaacattggtaattctacggcgaaacccaaacaggtttggtaattaatgcattcttctggcctggctcattcccgtgaccaccatattttcgtaaagaatagtatattcgtcataggcacttgatatttctaatactatatatatttgcccattttccaacggaccttgattggtcgagagaacgatttccgaatcgaatcacgcactttcactccccaaaatcacagcacaacaataaagtaacggaaccacgcaccttcaccgcacggagatatttactcactacaaatatttatatctgtagctcaacacctgactgctatcgaatgttttggtatttatttttatcgaagtattttgccgaaatttgtgatttgccagccctatttcaatgtaaatatatcgataatcgcccgattttactgaaaaatatttcgataagagcatcgatatttcaaacaaatatcgacccattgacatgcgtcaggtttgtccatccctaacaaaatcgtagtacgaaatatcgaaaacgaaacacatcacgcgggcgaaatttcgtgaagttcagcatttacaaattgtaagcagtggttttatcgaacccattgaccaattagtgggcttctaaaattagtgatagactttattaaatgaaacgagaaaatagaggcgaatacacccgtacagcaaattgaccatcgattttttcacggcattgccggtgacgagaatgcgacgccgttcatacacacacacgcacggacacgaatgtgtgtatatggcgcggcgcttgtgtgtgaaagtgtattcgtataaataatatgacataatcgacgtgtgcggcttaattgacatagtttttgtgcgaagaatacctaaaagtgcgaagagagcgccaaaaaaggcgttttttgtttgtggtcaaggtggcaaaaaggacttgcaccgctattttcccctgcgctttgctccaaatattcgttcctccccatacactctctcgcacacacacaagcgtgtatatttgggcgttgcaggatgaagaactctctttctctctcccactttccttcgctctcttctcgtattctcttgaacacttttgcgcaatttgagtgatttgcaaggcaaactaatgcttttcgattgtttaccgaatttagttaaccccgtttggaagccagtttgtctggaagttacttcagtttagttgttttcaacatctccacttgacgttgcctaacactgcccgccctctctctct

SEQ ID NO: 26984 - DNA, 2275 bp, DROSOPHILA
cggtgaaggtgcgtggttccgttactttattgttgtgctgtgattttggggagtgaaagtgcgtgattcgattcggaaatcgttctctcgaccaatcaagatatctgcacgatggacgacttgaggggattcttgaggcaagcgggacaggagttcctcaatgcagctggtgaggctgcaatgggagcggccaaggatgtggtcggatcggtgatcaacgagatcttcatcaagaaggaggccgacaccaagagggttctgcccagcatcaagaatatgagagttctgggagagaagagctcgagcctgggaccctattccgaggtgcaggactatgagacaatattgaacagctgcctggccagtggttcccttttcgaagatccactttttccggcttcgaacgagtctcttcagttttcccggcgtccagatcgtcacatcgaatggctgagacctcatgaaattgccgagaatccccagttttttgtggagggttattcgcgttttgatgttcagcaaggcgagcttggtgactgttggctcttggctgccacagccaatttaactcaggaatccaaccttttctttcgggtaattccagcggaacagagtttcgaggagaactatgctggtatcttccatttccgcttttggcagtatggtaaatgggttgatgtaatcattgatgaccgtttgcccacttataatggagagctgatgtacatgcactccacggagaagaacgagttctggagcgccctgctggagaaggcttatgccaaacttcatggatcctacgaggcactaaagggaggcagcacttgcgaggccatggaggactttactggcggcgtatccgagtggtacgatttaaaagaagcacccggcaatctattcaccattctgcaaaaagcagctgaacgcaattccatgatgggatgctcgattgagcctgatccaaatgtcacggaggcagaaactcctcagggcttaatccgtggtcacgcttactccataaccaaggtttgccttattgacatagtaacgccaaatcgtcagggaaagatccctatgataagaatgcgaaatccttggggcaatgaagccgagtggaatggaccatggagtgatagctcaccagaatggcgctatatacccgaggaacagaaggcggagattggactaacattcgacagagacggagagttctggatgtccttccaagattttcttaaccacttcgatcgcgtggagatttgcaatttgtcgccggactcactgaccgaggaccaacaaaacagtggcaagcgaaagtgggagatgtccatgtatgagggagaatggacacccggtgttacagctggtggttgccgcaatttcctggataccttctggcacaacccccagtatattatcaccctagtcgatcctgatgaggaagacgaagagggacagtgcaccgtcatcgtggccttaatgcaaaagaatcgcagatcgaagcgcaatatgggaatggagtgtctgaccattggtttcgctatctatagccttaatgatcgcgaactggaaaaccgtccccagggtctgaactttttcagatacaagtcttctgtgggaagatcgccgcactttatcaacacccgcgaagtgtgtgctcgcttcaaattgcctcctggtcactacctgattgtgccttcaactttcgatccaaacgaggagggagagttcatcattcgagtgttctcagaaactcaaaataacatggagtgcgtacaagtagacaatgacaatgagtttgtatattagaaataatgaggggtttctataactaaaagcttcttacgtgcaatatgtggtatgttgtgactatagtattctttaatctctagtgctagtaaatgtttgactagatttgtttctttaccctctacacattcctgacagataagttggttatgccattttttaatcactcctcttatatatatttttacctgagattaacgcctgcagtattccagaaactcgaaatatatttcttctagataaattcaaatgtaatgtcggtctgtctgttacatgttaagaataattctgatcaatatgaagttcaattttcttaatttatcagttataaaaagggtggcggcagcaacatagtgaaatctattaacaaagttaaatttttcggtttatttttaacccttgtttaaattgtatttttgtcatgtaacgagatatttattaaagtaataataaaggaaacttccac

SEQ ID NO: 26985 - protein, 565 aa, DROSOPHILA
MDDLRGFLRQAGQEFLNAAGEAAMGAAKDVVGSVINEIFIKKEADTKRVLPSIKNMRVLGEKSSSLGPYSEVQDYETILNSCLASGSLFEDPLFPASNESLQFSRRPDRHIEWLRPHEIAENPQFFVEGYSRFDVQQGELGDCWLLAATANLTQESNLFFRVIPAEQSFEENYAGIFHFRFWQYGKWVDVIIDDRLPTYNGELMYMHSTEKNEFWSALLEKAYAKLHGSYEALKGGSTCEAMEDFTGGVSEWYDLKEAPGNLFTILQKAAERNSMMGCSIEPDPNVTEAETPQGLIRGHAYSITKVCLIDIVTPNRQGKIPMIRMRNPWGNEAEWNGPWSDSSPEWRYIPEEQKAEIGLTFDRDGEFWMSFQDFLNHFDRVEICNLSPDSLTEDQQNSGKRKWEMSMYEGEWTPGVTAGGCRNFLDTFWHNPQYIITLVDPDEEDEEGQCTVIVALMQKNRRSKRNMGMECLTIGFAIYSLNDRELENRPQGLNFFRYKSSVGRSPHFINTREVCARFKLPPGHYLIVPSTFDPNEEGEFIIRVFSETQNNMECVQVDNDNEFVY

SEQ ID NO: 26986 - DNA, 2597 bp, DROSOPHILA
ggtggataaataggaaatgtgtgcaatcggttagccaattgcggagttggagcctgggaagatgaagggttaggagttggagtgggtgttgtgttaactggtgaatctggtttgggaggtaagagaccaccataaagattggattcattatacaaaggataccctggattagggctatgccttgggggaacttttgatccgtgaagcccattgtcaggatccaaaggtttttgctggtctgggtaaccactggcgtcagggctggactcaactggttgctgtctaccaattggctttgagccactgggtaactgatctggataaaagcgtggtggcgatcccggatacggcggtagtccgttgtgaagatactgaggtattggttcctcatcatagtccaagttaatgggtttctgtccgggcaaactatcttgggattggggttccttggcaccaggagaatggggagaataatctagatttaatggttgctgtccgcccaatggatccagtggtggcataggtttccatccattgccaggcgagccataatcaattctgcgactatagttctgacgcgacggcacattttgtttgtcttcaacgggctggccgtagtagacacctcctgtattggtcggtgccatgggggccaatggagtcttattggtaggataattacggttcggctgtagcgatccctccacatatagagtactttgtgtaggtccacgctgaacgtaggatgtctcctggccagaccaacccgggttgtatccatgatgatgatgatgcggattttgttccacacctacacctgaaggtcgctgcatgttcatatccgtccaacggtctccgatcacccgcgttgtcgtggtagttctggttgtatatcggttgccgaactgatccctgccagatgtctcatatgacttggattgacggttgtctgtaagcagagaagggaattttaaaaaggggggcaagatttatgccaagggttagtaaccattagagggatccatccaaccggaattaaccccccgaaccaaatagtcagtgcgatcataactagagagtttatcatccagcacgcacactctgcgagaaacgctgaaaatctgttggctcggacagtcgtacatctccgcctggcctggtccacaccgcaggtacttggtgggcaccctaggatgtggtagggttccagttattccttcagggcaggctgtgactgcgcctactatcatcattttctgtgtccactcgaaaatgatgtgcagttcattgatcgtatatagacgatcctcacgttgcacctgatcaacgggcttacagaatccatgagagatactatagtgttgttcacccgggcaatttaacaatttcattccgctcggtccacagctcaggtactttgagcaatcgaatggatacacaacgaagccaagaaaatctctaggacagtccaaagctgcaaggaaatgtttaagggtaaaaaaaacatcgagttcggagtttttcactcacaattatcctgataagtttgagtcctttcaaaggggacgcgatccgttttatttacgtgctgttcgggcaagcagtagccttgggaaacactgaacacatcgaggggctgacattgcctaggtaacgtatgaccatcgatgcaggtcagatagcctgtagcgtcgaaaggatttggaaagaggccgctaatcttttctggacacaacagaggagttggaatagcatagggcgcatcttgcccaggataatggcctgaaccagttgattggaaaggtggctgatatccaccagttgatggctgtggtggctgatatccactattttgttgagaaagtggtcggtaacctaaattcccttctaaaggaggctggtagcctccgtttaactgagaaggtgccgggtaggctccatttaactcattgggaggctgatagcctccgtttaactcattaggcggctggtatcctcgattgccatccacacgtggttggtaccctccatttatctgagaaggtacctggtgccctttgttggtttccaaaggtggctgataacctccatttgattcgaaggaagtctggtatcctctgttcacttgagaaggtggctgataacctccattcgcttgaaaagatgatgattgatttggttgattgtaacctccattaagttgattgtggggctggtagcctcctttaactgaatagggtggctggaaacctccaacagtttgcgaaggattgtgaaaatcttcatatgttcgattaggttgttggaaacctccataagtttgagaaggtggttggtaacctccatgaggtggtaagggtggctggtatccaccatttgtttgatacgatgattgattgggttggtggtaaccctcaaaagggttttggtatgttggtgtgtaacctccattgccttggtaggatggttggtaacctccattattttgaaaaggtgcctgataaccaccattattttgagaaggtgtctgataaccaccattattttgagaaggcgttgggtatcctccatttgaatagtaaggtgcctgatacttt

SEQ ID NO: 26987 - DNA, 541 bp, DROSOPHILA
cccgaacagcacgtaaataaaacggatcgcgtcccctttgaaaggactcaaacttatcaggataattctttggactgtcctagagattttcttggcttcgttgtgtatccattcgattgctcaaagtacctgagctgtggaccgagcggaatgaaattgttaaattgcccgggtgaacaacactatagtatctctcatggattctgtaagcccgttgatcaggtgcaacgtgaggatcgtctatatacgatcaatgaactgcacatcattttcgagtggacacagaaaatgatgatagtaggcgcagtcacagcctgccctgaaggaataactggaaccctaccacatcctagggtgcccaccaagtacctgcggtgtggaccaggccaggcggagatgtacgactgtccgagccaacagattttcagcgtttctcgcagagtgtgcgtgctggatgataaactctctagttatgatcgcactgactatttggttcggggggttaattccggttggatggatccctctaatggttactaac

SEQ ID NO: 26988 - protein, 129 aa, DROSOPHILA
MKLLNCPGEQHYSISHGFCKPVDQVQREDRLYTINELHIIFEWTQKMMIVGAVTACPEGITGTLPHPRVPTKYLRCGPGQAEMYDCPSQQIFSVSRRVCVLDDKLSSYDRTDYLVRGVNSGWMDPSNGY

SEQ ID NO: 26989 - DNA, 9642 bp, DROSOPHILA
cgtaagagcgaaccggcttttctaccatttgttattattactttcacaggatctgttaatatttcggaaccgaagagaaacccagtcccgatacatgtctattttaatctaaacctatcagattcttttgattcctgtgtaaccctcagtagcattacacttgttcccagaaaaatggaatctggtatcttaaaaagaaaactgaaagtaatttattctgaacccaatacccttctagattttggtgatcaaacataataaattgttagattagggactcgttctacgaaaatctgcttatcgatttaatcatagctaatgttggaatttatttttaatacaattgctcgataccttagctagaataattcaaaaacgttctgaattgtttatccttcatttttaaactgtaaaatttgagcttattcagagtggagtagtataagaaaatgttgaatattttgataccggatccgatagttatagaaccggaacctacggatcccgttgacctttttcttatcgcactctgatattccaaccggtcggacacatgtgtttttcatccgtgaagtcggcccagaatatttccatcattcaatatttaccaccttttatagttttgtttactatcttgccgacttttttgtcttgccgtcttgctctcctctccatcctaaaaatactcttcctgcgctccatctggcaatgccgctcgacaactgtacttcaaagagcgttgccaggcaggtcacttctctcatagatacacagatacaggcgcgcacgcacaccagcacgcaaaataaccaccaccagcagtacagaaattacacattttctccccgagtagagaactgaaaaactggccgcgctggcagcgccggagcagcgaaattcgatcgaaaccatttactcagtctcagttcgagttatccaacgttggcgagcggacaaacaagcaggagaaaaaagcgtacgggcaagagaaagagaaggcacaaaatcacccacagccactgaaattttcttttgcgctccggtgagaagataatttcacaaaccaaaaccgaaccaacaaacaaaaaaagtgcgctccgtgagcgggaaaacaataacaaaatcaagagacatgcgattataaaacgaacaaaataactgagtgacaaaaaaaaattaaatgcgtgtctcatggcttgactgtactgtgtattaaaaaatgtgattgtgtcggctgtccgtctgtctgagtttgtgcgcgtgtgtgtgctgttggcgtttttaaatgtggcgcgctatttttgtgtgatttttgtgggcagcaacgaattttgaaacatcaattgtatactagttgtcagtccccttgtgaaaaagtcttctccaacaacaaaattcctgtgagcagcctacacacatgcgttgtctcgctctcgcgcgctctggcccccaaagagtgcgagagcgggagagtgagaccgagaaagagagagagagagagagagctaataactaacgtctgtactctttttcttttccatttttcatttcagtttcgagaaagcagcgcgccaagcagcaagaagaggaagagcaaagggagttggaaaagcagtggcgtcgtggaggaggagtagaaaggggatttttgcgaaaaatcccaacttgaagagaattttccccgtaaccgttaaacattaaatcgtcgtgttggagacaaatagcagcgaatacgctagcaacgctggggaggaacaacaattgttggatttggacgcgaccgctttgatgtcgctgccaatgaattcgctgtattcgctcacctggggcgattacggcaccagcctcgtatcggcaatccaattgttgcgctgccatggcgacctcgtcgattgcacgttggccgccggcgggcggagttttcccgcccacaagatagtcctgtgcgccgcctccccctttctgctggacttgctaaaggtaagtgctcggttcggaaacactgcctaaaacacctttcaataagagagcttgtacataacctcaaacgtttcgtacagtttgtaaacagagaaatccaatcgcagaaataggttaatgtttggagcgcagagaaactgacactcgcacgcaaatgcatacatatgtataaataacgcagatttacgctccgctccaaaagttgtctagagatttttgtacaagttttccactgtcaattgagttgaatgagtggctccgccccccgcattcccgccgtctatcttgcttatcagctttttcttgttgcaaagttcaccggagaacgagagagtgagacgtagagacagagcgcagacagagagggagagagcgagagaaccagttggttcggtcgacagaaaagtggttttgggcccggtggtgtaacagagaggggagagccgaaagctggtgcgccaacttttaaatcgcatgtgttagagcgagcgcaaacgagagcgccaaaagcagcgcggcaactgttgtagttgttggatggttggagctttcgtcttgccttttggttcttgctgttgttgggtgcacacgagcgcgacctctttcttcacagacagaactgtacagttggctctggctagggggaacttgaaatattggggggaatatggatacatatacaaagataattaaaattaaatttgtattgattggtttgatttccttaacccatttcctaagctaagtcttttgtattttgtatgtcaccattttagattgctagattgattgtctaacagcaaacttcgctcaattaaaagttcctggactttaatagacttatctacttcaaatctttatttaaacttataacatagtgaccaagtccagattgtaccaaagataagcaagcctgtctggtgcgcttccctcgtatcgaatccaacccgtatttctataaactaaagcatttcatattaggaaggcgcacttttaaatggagcttgcaagttttttcatgagctgtattgcgatactgtactttttaacaactcatttgcactttaactttgacgcttttccgccactctgtcgattgttcaaagtgtgcgcttaagtatgaaagttggaccgtcttcaatgcgtggccctatcgtaatggaaatactgaccaaaacagagcgcggccagcgaaatgaaaacacctgatgcgacgccgacagcggctactctgcgcttcgctcccccttattctcagcgctcctcatctctcctctccttttctgggccgtgaaaaagtaaacagagcgaaatttttgaaaacgccgctcagagccgtcgtggggaaatgtcaaagaaaaaaaaaaaaaaacaaaaagaacgggaccaatgcggctgtgaactctgcaagagtccgaaaagtacaagatgtactgatctcgttacactcacacacgcacgcaaaaacacatggcggtcgctctttgttgctcttgctccctctcccttgctcctacggcaaatggaatgcaactctgaaaaatcgatgagcgagactttggttggaggcagagttcaaagagcgcaaatgggagtgcggtgagatgtgtcatttcaagagattggcattggatgaagggagggtgttggttggtgagtccgtaaatggagaggggttgttttctgagcaatgctatataattaaatgtttggagcgggagcgggagcgggagaggacacagaagaagaacagctaagcgctctttctttaagcgctgctctgttttctttttcagcatctgaaatctcaaaatcctgctgcagaatgtgcagagcgcgcaaaagtaaaagccggttgtcttttgtctgtgtcactgtgtgcgtgagcggaggagagtgtgagcgacgcgtcgcaccgcgagtttccattatttccatctccgtccgactgtttttgttattgtttttatttggattggcggacggacgaacgggcctctcaattcacgccaaaaatgtgagacgatttcaaaacaaacacaactctctacgatgaagttcgagccaagagaaatgttggatgaagagcctacgaactttgcaaagtgtcaagaagtttttcttatagaacatttttagatttcaattagaaaatttctataacttactagaaaccggttttggttatcgtacataccttaaacaatagagaaatatttatatatcatttaaaatcaatttatcttgccctattcttaataactccttttaatctcattagttttacttatataaatacaaacttatcagctctaaataaattagattatatatgtcttctcgatatttacagaatacaccatgcaagcatccagtggttatgttggctggcgtcaatgcgaacgatctggaggcgctgctggagtttgtgtaccgcggagaggtgagcgtggatcacgcccagctgccgtcgctactgcaggctgcccagtgcctgaacatccagggactggcaccgcagacggttaccaaggacgactacaccacgcactcgatacaactgcagcacatgattccacaacatcacgaccaagaccaactgattgccacgatcgccacggctccacagcaaacggttcatgcccaggtggtggaggacatccatcatcagggccagattctccaggcaacgacccagaccaacgcagcaggacaacagcagaccattgtgacaaccgacgcggctaaacatgaccaggcagtgattcaggcttttcttccggcacgcaaacgcaaaccacgcgtaaagaaaatgtcacgtaagttaaaaacttatttttgtaaacagttgattcagaaaatttgtccaataaactctgaacgtattgggtaagaattagaaacaaaaaataataacatgcatttctacttgtgcagctacggcaccgaaaataagcaaagttgaaggaatggatacgattatgggcacaccgacctcttcacacggctctggatccgtgcagcaggtgcttggcgaaaatggagccgagggccaactgctatcatccacaccgatcatcaagagcgaaggacaaaaggtagagactattgtgaccatggaccccaacaacatgataccggtaacgtcggctaatgcggcaactggcgagataacaccagcacaaggagccactggctcatctggcggcaatacaagcggcgtcctatccacgccaaaggcaaaacgcgctaaacatccgcccggaacagagagtgagttttaatttcggtgtattcacttgccggcttaaagttattactaattataagtatatatttgagaataatgcattttgttagagccagtgaatacccaatataccatcccacaacgtgttccaagaactaaagaacgctattttccgtttttagaaccacgttcacgatcacaatctgaacaacctgctacttgccccatttgctatgctgtcattcgtcaatcccggaacctgcggcgccatctcgagctgcggcattttgccaaacccggcgtgaagaaggagaagaaaagtaagtccggtaacgatacaaccctagactccagcatggagatgaacaccacggcagagggcgacaacacagtgggcagtgatggagcaggcggagcaggatcagcaggaggacaatcatctggtacgacgccaacgagagtgatatcgaatgcaccgcaggccgcgggggcgccggccatcctggcccaaggtgtgctgccccagcagcagcaacagcagcaactgcagcagcaacaccagcagcacttgacagcaacattagcgggtggtggacaggcatacatcaaacatgagggcggcggcgggggcggcactgggcagcagcagcaacagcaagcggcacaacagcagggcatgcagaacgtcatacacattgtgggcgatcaggtcttcataccgcagcagcaacagccgcagccgcagtagccacctccagccgagccttcaatcattccaacgcaccaacgacaccatcatccacatttccaaaaaaacattaaaaaaaaaaacataacactcacaaaaacgatttgtaaataacaatcagcaaacaaacaaattccccgtgatctgatcgaatgatttgtgttcatttcctgtatcatttttaatttttccataattaattgctgcgtaagtttatattttgcataacttttcaaaattgcgctttttaacatataacattttcttatgcagtattttcttgcatattgtagcacagagaaaaggacaaaaagagagaattccgtatgtctccacctaaatgaatactcgattaacttacttaaataatctaattagtagtgtcgcaaataattgttgtaaaaattaattgtacaattacaatcgaggatcgcaatcggtttaagtttctctattttagatattatattacaaattgtttaattaataaaatattatatatttttttatataacaaaaacaaaaccaaaattaatctctgcctgtggcacggactttaatttactgcaattggctgtttataattattgtttctcttagttgcaagaaaatactgttggtcgatttccaaacctactaacttcgtactgatctttgtaatgtttcgcaattcctctggagcaaatcttgcgcatttagaattgacaatctggctgataatcgtatttaaaagtcttgaattaacgttgaatattgttacgttgtttttgtatcttttttaattataactacacgtttgttttattttttaacagtttttcactagattttttttatttctattattagttttgttatttgttgttcatattgatttaaacctatattaatatttgttttgtcttgcgtttttaagttttttgtttgtaacacctttcatctacacaatcaacacatcttcatgtcctgtttccggctgtagtccttaaaggccgcgttgtttctcttttgggccagagatgttgctgtagtgtcgtcctctcgctctgtattactcctactatccaacagtctaccttggctaactccagcggcagtcttctcaccagcaactcattccttccttgcagcaaccagtggcaagaagtctagtagcggatccagcggttcaggcagtggggcactgagctccagtggcagtgtgccgcaggtccagacggttcaatccctgcacactttacagggtgtgcaagtcaagaaggatccggatgcccagcaacagcagcagcagcagcagcagcaacaacaacaacaacagcagcaagcaatgacagtgagcggtgcgacgggcggacaagtgcaacaacaggtgcagcaagtgcagcagcaggtccagcagcaacagcagcagcagcaacaacaacaacaacagctgcaacatcaccaaatcatagactcgtcgggcaacattacaacagcaacaacgagtgctcaagcggcagctgccgcacagcaacaggcggctggccagcagcagcaactggtggcacaatccgatggcagcgagagtggagctccgctttcaattgcccaggtgcagacgctgcagggccatcagatcataggcaatttaaatcaggtgaatataactgactttcaacaacaacaaccgcagcagcaacaacagcagcagcaacaacagcagcaacaacaacaacagcaacagcaaacacaacagacgctctgatcggaccgaagtcttagatccatcttgtactattctatacaattattaatttgggtttttgctaaacgctttaaatattctctttgcggaatgcgtagacaaattctaaattagttttagaaagccagaaaggcatatttagttgtttaccgttttgttgtacaatcttatgactttaaatgttgatttacccctcctacaacttattttgttgctagacaaacgcttaagtgctctatggttattggaaattacgtgcatattttacatactttataaatattatcattttgtatggttttacaaatgtcccaatgctagaggacctctagtcattttgaagtcctgcagatcagtaaacaccttaatccaacaaggatcccttgctcacgtccagattttggccatgaacgaatgcaccttgatttaaaaaatattaacaaatacattaagtttaaaaatccttgagttacaaagatttacttaagcagctcaaaagtaattgatctgatcaaaagagagttcgctcaacaaggtttctaaaaacccacccaccaacaatcacttaagtaatcaatcaaccaatcaataaatcaactcgatatctctgctttcgtttttgtttaagaactaggcgttctatgtttaaattgaaccaattttatatgtatattacttaattttaatagttgcaaatttttcctaaaatttagaccccgttgtactagttttggatgatgaaatatacatattcctggaaactatgatttaattatataaatttgaacgaaagggtatatttcatctacctaaactggacgaattattgttagtcttcttacacacttaaataaaatctaattttatttaaaaccaattacaaaaaataagtttaataaaacaaaactttttcaaacaaaattattattagtattttcttttgtttttcgcttttcggtgatggaactttttgatttaatttttcaattaatttactcatagtccctttagcaaccaaccttacctattaattaagtatttctgtaatttacagcatgaattaacgttttaaatattttttgtatattagttttttgcttttcctgatttgcagtacggctgacctaaaaaatgaagacaaacttaattgaaaaatcaaatagtgactaatgacacttcacacaccagcaacgaaaactcaccaacaccacatgcattctgcactgcagtttacaccattttgcaacacatgagcaatcattaacaaatcgtttttatcttgtcttcttctctttctcgctgccacgttaataacaactaaacgtcatctaaccaatcaaattcaatacatctgtgtgtaaaaactaaacattcatgcatccgacaacaaatcaaaatcattcaaaaaaaaaaaaaaacagggcaacaacaagaacattttggtaaagaaggttttcattttgaaaggcggtaataatacgtaatgatgatccaacgatatgtccagcggccctggaggaggaggaggaggaggagaaggtggaggcggcggcagcgggcaacagcagcataacaccagcagctcgagccacaacaacagcagcaacaactgcggcacggcagcagcaactcaattgagcagcagcagcaacagcagaagcatcacaccagcaacatcgacatcatcgactggaactggaacaggaaccacatccacgctgcagcgtcgtatactgcgcggtcatgcggcgcaaacgaccagcggcgagcgtgtcctgctcatcaactatgtgccacaaacaggagcatcagccaccgcatccactcaaagtacttctcaattgcccacccgtaagatactccaggccagagcctcagcggcagcagcagcggcggcagcatcatcgtcatcatctg

SEQ ID NO: 26990 - DNA, 3936 bp, DROSOPHILA
acaaaatcacccacagccactgaaattttcttttgcgctccggtgagaagataatttcacaaaccaaaaccgaaccaacaaacaaaaaaagtgcgctccgtgagcgggaaaacaataacaaaatcaagagacatgcgattataaaacgaacaaaataactgagtgacaaaaaaaaattaaatgcgtgtctcatggcttgactgtactgtgtattaaaaaatgtgattgtgtcggctgtccgtctgtctgagtttgtgcgcgtgtgtgtgctgttggcgtttttaaatgtggcgcgctatttttgtgtgatttttgtgggcagcaacgaattttgaaacatcaattgtatactagttgtcagtccccttgtgaaaaagtcttctccaacaacaaaattccttttcgagaaagcagcgcgccaagcagcaagaagaggaagagcaaagggagttggaaaagcagtggcgtcgtggaggaggagtagaaaggggatttttgcgaaaaatcccaacttgaagagaattttccccgtaaccgttaaacattaaatcgtcgtgttggagacaaatagcagcgaatacgctagcaacgctggggaggaacaacaattgttggatttggacgcgaccgctttgatgtcgctgccaatgaattcgctgtattcgctcacctggggcgattacggcaccagcctcgtatcggcaatccaattgttgcgctgccatggcgacctcgtcgattgcacgttggccgccggcgggcggagttttcccgcccacaagatagtcctgtgcgccgcctccccctttctgctggacttgctaaagaatacaccatgcaagcatccagtggttatgttggctggcgtcaatgcgaacgatctggaggcgctgctggagtttgtgtaccgcggagaggtgagcgtggatcacgcccagctgccgtcgctactgcaggctgcccagtgcctgaacatccagggactggcaccgcagacggttaccaaggacgactacaccacgcactcgatacaactgcagcacatgattccacaacatcacgaccaagaccaactgattgccacgatcgccacggctccacagcaaacggttcatgcccaggtggtggaggacatccatcatcagggccagattctccaggcaacgacccagaccaacgcagcaggacaacagcagaccattgtgacaaccgacgcggctaaacatgaccaggcagtgattcaggcttttcttccggcacgcaaacgcaaaccacgcgtaaagaaaatgtcacctacggcaccgaaaataagcaaagttgaaggaatggatacgattatgggcacaccgacctcttcacacggctctggatccgtgcagcaggtgcttggcgaaaatggagccgagggccaactgctatcatccacaccgatcatcaagagcgaaggacaaaaggtagagactattgtgaccatggaccccaacaacatgataccggtaacgtcggctaatgcggcaactggcgagataacaccagcacaaggagccactggctcatctggcggcaatacaagcggcgtcctatccacgccaaaggcaaaacgcgctaaacatccgcccggaacagagaaaccacgttcacgatcacaatctgaacaacctgctacttgccccatttgctatgctgtcattcgtcaatcccggaacctgcggcgccatctcgagctgcggcattttgccaaacccggcgtgaagaaggagaagaaaagtaagtccggtaacgatacaaccctagactccagcatggagatgaacaccacggcagagggcgacaacacagtgggcagtgatggagcaggcggagcaggatcagcaggaggacaatcatctggtacgacgccaacgagagtgatatcgaatgcaccgcaggccgcgggggcgccggccatcctggcccaaggtgtgctgccccagcagcagcaacagcagcaactgcagcagcaacaccagcagcacttgacagcaacattagcgggtggtggacaggcatacatcaaacatgagggcggcggcgggggcggcactgggcagcagcagcaacagcaagcggcacaacagcagggcatgcagaacgtcatacacattgtgggcgatcaggtcttcataccgcagcagcaacagccgcagccgcagtagccacctccagccgagccttcaatcattccaacgcaccaacgacaccatcatccacatttccaaaaaaacattaaaaaaaaaaacataacactcacaaaaacgatttgtaaataacaatcagcaaacaaacaaattccccgtgatctgatcgaatgatttgtgttcatttcctgtatcatttttaatttttccataattaattgctgccaaccagtggcaagaagtctagtagcggatccagcggttcaggcagtggggcactgagctccagtggcagtgtgccgcaggtccagacggttcaatccctgcacactttacagggtgtgcaagtcaagaaggatccggatgcccagcaacagcagcagcagcagcagcagcaacaacaacaacaacagcagcaagcaatgacagtgagcggtgcgacgggcggacaagtgcaacaacaggtgcagcaagtgcagcagcaggtccagcagcaacagcagcagcagcaacaacaacaacaacagctgcaacatcaccaaatcatagactcgtcgggcaacattacaacagcaacaacgagtgctcaagcggcagctgccgcacagcaacaggcggctggccagcagcagcaactggtggcacaatccgatggcagcgagagtggagctccgctttcaattgcccaggtgcagacgctgcagggccatcagatcataggcaatttaaatcaggtgaatataactgactttcaacaacaacaaccgcagcagcaacaacagcagcagcaacaacagcagcaacaacaacaacagcaacagcaaacacaacagacgctctgatcggaccgaagtcttagatccatcttgtactattctatacaattattaatttgggtttttgctaaacgctttaaatattctctttgcggaatgcgtagacaaattctaaattagttttagaaagccagaaaggcatatttagttgtttaccgttttgttgtacaatcttatgactttaaatgttgatttacccctcctacaacttattttgttgctagacaaacgcttaagtgctctatggttattggaaattacgtgcatattttacatactttataaatattatcattttgtatggttttacaaatgtcccaatgctagaggacctctagtcattttgaagtcctgcagatcagtaaacaccttaatccaacaaggatcccttgctcacgtccagattttggccatgaacgaatgcaccttgatttaaaaaatattaacaaatacattaagtttaaaaatccttgagttacaaagatttacttaagcagctcaaaagtaattgatctgatcaaaagagagttcgctcaacaaggtttctaaaaacccacccaccaacaatcacttaagtaatcaatcaaccaatcaataaatcaactcgatatctctgctttcgtttttgtttaagaactaggcgttctatgtttaaattgaaccaattttatatgtatattacttaattttaatagttgcaaatttttcctaaaatttagaccccgttgtactagttttggatgatgaaatatacatattcctggaaactatgatttaattatataaatttgaacgaaagggtatatttcatctacctaaactggacgaattattgttagtcttcttacacacttaaataaaatctaattttatttaaaaccaattacaaaaaataagtttaataaaacaaaactttttcaaac

SEQ ID NO: 26991 - protein, 519 aa, DROSOPHILA
MSLPMNSLYSLTWGDYGTSLVSAIQLLRCHGDLVDCTLAAGGRSFPAHKIVLCAASPFLLDLLKNTPCKHPVVMLAGVNANDLEALLEFVYRGEVSVDHAQLPSLLQAAQCLNIQGLAPQTVTKDDYTTHSIQLQHMIPQHHDQDQLIATIATAPQQTVHAQVVEDIHHQGQILQATTQTNAAGQQQTIVTTDAAKHDQAVIQAFLPARKRKPRVKKMSPTAPKISKVEGMDTIMGTPTSSHGSGSVQQVLGENGAEGQLLSSTPIIKSEGQKVETIVTMDPNNMIPVTSANAATGEITPAQGATGSSGGNTSGVLSTPKAKRAKHPPGTEKPRSRSQSEQPATCPICYAVIRQSRNLRRHLELRHFAKPGVKKEKKSKSGNDTTLDSSMEMNTTAEGDNTVGSDGAGGAGSAGGQSSGTTPTRVISNAPQAAGAPAILAQGVLPQQQQQQQLQQQHQQHLTATLAGGGQAYIKHEGGGGGGTGQQQQQQAAQQQGMQNVIHIVGDQVFIPQQQQPQPQ

SEQ ID NO: 26992 - DNA, 9579 bp, DROSOPHILA; identical to SEQ ID NO: 22870

SEQ ID NO: 26993 - DNA, 5538 bp, DROSOPHILA
atggtgtgaaacggcgacggagaacgcggcgtgcaactgttggaagccactgcttggtcctcgttttggtcccgggttctggtcctcctattgatctccatctccgcccggccaccagctcgaaagcgcacctacacatcatagtttccatagacagtcccagttccacatccactcccccgccagccagccaacaacaacaaaaacaacaacagcaagagaaacaactcagaagtcgaaaggaatctgggaactcctgcgactcccccgcgcaatgggcaccatctcatccgtgctgcagtggtcgtgcaccaaatgtaacactatcaatcccacggagtcgctcaagtgcttcaattgcggcaccgtccgcaaggtgttcccccaacaacagcagcagcagcatcgcagcagcagcatcaccgcctcctggacagctgatgatgcactggagcaggagcaggcggagaaggggcaggagagggacaaggagaagggcagggcggcggttgccaggagcgagtacaagcatgtgtacaagtccctgctgcgcggatgcttgaaaagaccacagcggaacagccagaatctgcccgccaactgcgtggattgcgaggacacgcgcaagtacatcaagagctctattgagctgtaccgccacttctcgaatccggccctgaatcggcggtgggtgtgccacgcctgcggcacggacaacagctcggtcacctggcactgcctcatctgcgacacggtcagctatctggcgcccatttacaaggacgccatcgccgccgaccgaggccaggatctggctggcagcctgggcaatcgcggcgagctgctggcggcggaccattcacatccacatcatcatcaccactacctccaccaggaactggaggagcagcatcagcatcagttacattcccagcacttgcataagcgccacctcaaaggtagatctgcatccggatcgggatccggaccgggctcgggttctggactgcgccgcacccagagcctgagcaccgctatcgacaagagcgcttccgggcgcagctgccacatttgctatgcgaacaaccagagcaaggacatcttcaatctgccgcagatcaagccggcgccgcagctgacagggattccccccgtggccgcctgcagcaactcccgttttgccatcgccaacgacactttttgcaggcgcaaacagaacaacaataacaagaaccagaatcacaaggtggttcgcgagagcggtgccaagcggaagtacaactttaccatcaccacgctctctcggtcggcggccaaggatgccggccatggccaaatgaagccactgcgtcaggtcgttaatctaaatctgaatctacagcaggagccgcagcagaagtcaccggctaatccgcagcagctgcagcggaaaacccagcgggagccagcagcagtgagtatgaatcccacgcagttcaccattccgcggaacggcgtcttcatagccgtcaacgagtggtcggagccaatggccagcagctcctccgtctcctctagctccaaccatcatcatcaccatcacagcaacagcaatagcaatagcagcggtaacagcaacatcatcaacaacaacagcagcagctccagcggcagcaacaagttgtatgagaacgaatgcgtggccctggcccagcagcaactaagagcagctgctgcgcaggcggcacaggcagccgcgacggcggtggccattgcgagttcgccatcagctaaggctatggccgaaccagctccaacggctaccatgcccatctatgcgcaggtgaacaagcagcacaagctcaagaagaagcaacagattgccagcgaatcgcaaacgaacaacaacactggcagtggcgagatcgcggatgcggtcagtgaatcccttaccgccggactaggcactagcaccgatggcagcggcgaggccagcgaatccgagtcgcaggtggaggagcactccatctacgccaaagtgtggaagggaccgcgcaaggcgaccgagtcgaaaattatgcatgatccagggagcagcagccgcctatcaggagccgcatccgcagcagcagggaccgcgtcagctggagctatagctgcagccgtaggagcagctgctgcctcgcggcacgacaataagacacagcttggcaacggcagccgcagtaagatgtggatatgcatcaaatgttcctatgcctacaaccgactctggctccagacttgcgagatgtgcgaggccaaagccgaacagcagcaacagcagttgcagctgcaacagcagcagcagcagcagcagcagcaccaccaccaccaccaccaccttgcagcagcaacaggcagaagcaccccgcgacgagccatggacctgcaagaagtgcaccctggttaactactcgacagcaatggcctgcgtggtgtgcggcggctccaagctgaaaagcatctcttccatcgaggacatgacgttgcgaaagggcgagttctggacctgcagccactgtacgctcaagaactcgctgcactcgccggtctgcagtgcctgcaagtcccaccgccagccgcagctctcgatggccatggaggcggtacgggagcgaccggatggtcagtcgtacgaggagcaggatgctgcagccgtcgggggcggaggaggcagtgcccaccaatcgggcgccaatgaggtcaaggcgcctacagccttgaacctaccgctaacttcggtggcgttgcccatgcccatgctgcagcttccaacgtcaacagcggctggtctgcgcggctcacgcagtccctcgcccaggatgcagctgctgccatcactccagcagcagaggaactccagctcatcgggcgctatacctaaacgtcacagcaccggcggctccattgtgccacggaacatttccatcgctggtctggccaattacaatttgcagcagggccagggagtcggctccgcatcggtagtgtctgcttctggagctggatctggagctggagctgtcggagccagtaccagcacaaagaagtggcagtgtcccgcgtgcacgtacgataactgtgccgcttccgtcgtttgtgacatctgctcgagtccgcgcggcctggcgagcgcagttttgggcgaggcgttgggcagaaagtccgttcgagttgccctcacaccggcagatattcggcaggagagcaagctgatggagaaccttcgccagctggaggagaccgaagcgttgaccaagtggcaaaacatcatacagtactgtcgcgacaatagcgagcttttcgtggacgattcgtttccgccggcgccgaagagtctgtactacaatccggcgagcggagcaggcgagggaaatcctgtggtgcagtggcgacggccgcacgagattaactgcgacggcggagcgtatccaccgtgggctgtgttccgcaccccgctgccctcggacatctgccagggcgtcttgggcaactgctggctactcagtgcgctggcggtgctggcggagcgcgaagatctggtcaaggaggtgctggtcacgaaggagatatgtggccagggcgcataccaggtgcgcctctgcaaagacggcaagtggacgacggtgctggtggatgatctgctgccatgcgacaagcgtggccatctggtttattcgcaggccaagcgcaagcagctatgggtgccgctgatcgagaaggctgtggccaagatccacggctgctacgaggcgctggtctcgggccgggcgatcgagggactggccacgctgacaggagcgccttgcgagagcattccactacaggccagtagcttgcccatgcccagcgaggacgaactggacaaggacctgatatgggcccagctgctgagctctcgatgcgtacgattcctcatgggcgccagctgtggcggtggcaacatgaaggtggacgaggaggagtaccagcagaaggggctgcgcccgcgacacgcctactcggtgctggacgtgaaggacatccagggacatcgcctgctcaagctacgcaatccgtggggtcactattcgtggcgtggcgattggtcggatgactcctcgctgtggacggacgatcttcgggatgctctgatgccgcacggcgccagcgagggcgtcttctggatctcgttcgaggatgtgcttaactacttcgactgcatcgatatctgcaaggtgcgctccggctggaacgaggtgcgtctgcaggggacattgcagcccctgtgctccatctcctgtgtgctgctcaccgtgctggagccgacggaggcggagtttaccctattccaggaggggcagcgcaactcggagaagtcgcagcgatcgcagctggacctgtgcgttgtgatattccgcacccggtctccggcggcgccggaaatcggtcgattagtggagcacagcaagcgtcaggtgcgaggctttgtgggatgccacaagatgctggagcgggacatttacctgcttgtgtgtctggccttcaaccattggcacacgggcatcgaggatccccaccagtatcctcaatgcatcctagcgatacacagctccaagcgtctgctggtggagcagataagtccctcgccgcatctcctggccgacgctatcattagcctgaccctaaccaagggacagcggcacgaggggcgcgaggggatgaccgcctactatctgaccaagggctgggcgggtctggttgtgatggtggaaaatagacatgagaataagtggatccatgtgaaatgtgattgccaggagagctacaatgtggtgtcgacacgcggcgaactcaagacagtggactctgtgcccccgctgcagagacaagtaatcatcgttctcacccaactagagggcagtggcggcttcagcatcgcccaccggctgacccatcgtctggcgaattcccgcggcctgcacgactgggggccacccggcgccacccactgcccgcccatcgagaatgtccatggactgcacgctccgcggctaatcacctagaatgggatagggatagggatggatggcagtgacgcaatttcgatgctaccccgcgatatgtcgctgttcgaatcctgatttgcatgcgtctcctctcaattctacccgtcttctagtcgatgttctgttaacgaatcacacattacagcgaaaaacccaaagttgaaaccaatcagcatgcgaaacaattcatatatatgtgtatagagccgtgcagatatgatatatgtatgtgtttatgcactaaggcgtatcggaaagtgggagcagatccccggtggggatacggcagagcccagaagccccagtccggagtcctaaggctaaggctcggcacgattcgcttgagatccaatgatctgtgttttgattagagcggctatgattgtggattatatagatatgtattgtgaatttaagtgcatccaatattaatatgtgtattgttttaaaaataaagactacaagttat

SEQ ID NO: 26994 - protein, 718 aa, DROSOPHILA
MGTISSVLQWSCTKCNTINPTESLKCFNCGTVRKVFPQQQQQQHRSSSITASWTADDALEQEQAEKGQERDKEKGRAAVARSEYKHVYKSLLRGCLKRPQRNSQNLPANCVDCEDTRKYIKSSIELYRHFSNPALNRRWVCHACGTDNSSVTWHCLICDTVSYLAPIYKDAIAADRGQDLAGSLGNRGELLAADHSHPHHHHHYLHQELEEQHQHQLHSQHLHKRHLKGRSASGSGSGPGSGSGLRRTQSLSTAIDKSASGRSCHICYANNQSKDIFNLPQIKPAPQLTGIPPVAACSNSRFAIANDTFCRRKQNNNNKNQNHKVVRESGAKRKYNFTITTLSRSAAKDAGHGQMKPLRQVVNLNLNLQQEPQQKSPANPQQLQRKTQREPAAVSMNPTQFTIPRNGVFIAVNEWSEPMASSSSVSSSSNHHHHHHSNSNSNSSGNSNIINNNSSSSSGSNKLYENECVALAQQQLRAAAAQAAQAAATAVAIASSPSAKAMAEPAPTATMPIYAQVNKQHKLKKKQQIASESQTNNNTGSGEIADAVSESLTAGLGTSTDGSGEASESESQVEEHSIYAKVWKGPRKATESKIMHDPGSSSRLSGAASAAAGTASAGAIAAAVGAAAASRHDNKTQLGNGSRSKMWICIKCSYAYNRLWLQTCEMCEAKAEQQQQQLQLQQQQQQQQQHHHHHHHLAAATGRSTPRRAMDLQEVHPG

SEQ ID NO: 26995 - DNA, 2721 bp, DROSOPHILA
tcagccttccgcgtcgaaatcccattccggaaatgggcgcaagcagtcccaggagcagaagacccactcccaagggcctcaaaacgcccccaatgaaaagcatatttgcttcctttgtttgttcgggtcaagtagaatttgccagtaattgaagtatttaattagttggaacctcgcacagtgcctaactgtaaatagcgactgaaggagagtggtgtgttctatttatataggcaccgttatgtgtgtcgcactctcctgattattcagttctcgctgtattatctatattcgcaaagccggcaaagcaaaactaaaacagtaggggcattcatagttattgatttcaatcattaattgaattaatttaattttaagcagagaaagatttctgtatgctgtaagtgttctggtaactttacaaaacttaatttagctttttatttatttatattatttcctagctagatattatcgatgagcttaatagcaccgtaaatgtgaacgtgttttgcaaaatttttgtcaagtaattaagaaaagtatacattcttgcatgctttgataatttccatctgcgtgtaattttaaattctcactgaactaatttaatggaagtttcctgaatttcaaatgctttaggtagctttaataaacaacatatagtttatttgaattattccatatattaggtaaatattattgtggagtttcactgtgccgttaatgcgaaagcttaataaatgtatttgtcaaaaattttaggaaattgtgcatgtgtatgcgttgtttttatatttttcatctgtatagtcagttataagtagccaaatttagtaactagattttgtagctaagtatggcagcactgttgctgtggtagcatctctttgtattctgaaaacggtaacactaattgcgcgacaatttggattgtttacgtttttatccagtttaattgtaatataatttaaaaaaaatattgttgttaactgtcataatggacttcaatagcctagcctacgatcagaagttcttcaatttcacagcggcacagttgtctgcagagcgtgagtgctacatccttatatctctggatcagcgtcctttatccattaattccttttaaataggcgaacatattgtgcaggacataattaagaagggtattggtcagatcatcgacaagatcaagacacccgccacagcggaattgctggaagccgagaaggagaccgttgagcgtcgtttccaggcatccgcctccaagggcctaaaagccctcagggaactggacagcaaagtgttccacgttccaccgcatgtgctgcatccggagcacatgttcgtcgagaatcagtataccagcgaagaggaggagcagaagacagccaggttggaggagctgaaggccaaatacagagaggtaacttgtagaaccaatggaaactatcttgtatgcctcattttaatcattataatggggaaaaggatgctttattttatgttttaataatgctaaatcacatcaatttcagaacatggccatgctggcgcatttgaagatcgaggaggagaagtacgccgccatggaggatctcatccagaaggagatcgaaatgcaggatcgcgtgcagcgaagctgctcctccctcaacatcaccaagctgaagcaattctggaatcaagtgcccctgcagataaagaaggagactgattaaataaactaactggatcaagttttttaatctacatttccaatatcttctttcgaaactagttttaaccctggagtcatttataatcactaagactcttctatattccactttacctattattatgtcgttaacttagttttaaacttaaaattaaattaaattaaaattattatgaatccgaaacacctagatgattacttactagttttaaaccaatttaccttagcattatattagttcctttgacaacagcggcaaccaagcaacggtcgctgtttaaattttccaactgccttgttttcaaacagaaaacaagccggttaaaaagtttcaagcacagaacagacacaaaaacccccttatatgttacatttcgaatcgtatattttgctataagcctggaaaaatgggagactcgcacgatgtctgcaggcagctgctgccgcgcgcaatcttcggcatcaatggcaaggtggagaatggagtgcgccagcatccggtcacgggatccatcatctttgcgctgggcaacaaaatcggcatcgccgactacaagaagaatacgcaggagtttgtggccggacacacgaacaccatatcgtgcctggatctcagcaagagtggcaaatacatggcctccggtcagatcaatcacatgggcttccgcggctatgtgatcatctggaattacgatcagcgcaaggagatcgctcgccacgatctgcacaaggtatctgtgcaggccatctgctttactgcccaggatagatgcgttgtgtccatcggtggcgtggatgatggttccgtaattgtcttcgacatggaggcattgtaagttgttcatatcagagctcatgcttgaactccttcaatgacttcgtttgccattacagctctcccatttgccaaacacccgcatcgagggccatctctggaaatgccttgactgtccggccgttgcacaacaatccctacttctttgtgaccgccggcgatcgcc

SEQ ID NO: 26996 - DNA, 546 bp, DROSOPHILA
atggacttcaatagcctagcctacgatcagaagttcttcaatttcacagcggcacagttgtctgcagagcgcgaacatattgtgcaggacataattaagaagggtattggtcagatcatcgacaagatcaagacacccgccacagcggaattgctggaagccgagaaggagaccgttgagcgtcgtttccaggcatccgcctccaagggcctaaaagccctcagggaactggacagcaaagtgttccacgttccaccgcatgtgctgcatccggagcacatgttcgtcgagaatcagtataccagcgaagaggaggagcagaagacagccaggttggaggagctgaaggccaaatacagagagaacatggccatgctggcgcatttgaagatcgaggaggagaagtacgccgccatggaggatctcatccagaaggagatcgaaatgcaggatcgcgtgcagcgaagctgctcctccctcaacatcaccaagctgaagcaattctggaatcaagtgcccctgcagataaagaaggagactgattaa

SEQ ID NO: 26997 - protein, 181 aa, DROSOPHILA
MDFNSLAYDQKFFNFTAAQLSAEREHIVQDIIKKGIGQIIDKIKTPATAELLEAEKETVERRFQASASKGLKALRELDSKVFHVPPHVLHPEHMFVENQYTSEEEEQKTARLEELKAKYRENMAMLAHLKIEEEKYAAMEDLIQKEIEMQDRVQRSCSSLNITKLKQFWNQVPLQIKKETD

SEQ ID NO: 26998 - DNA, 8691 bp, DROSOPHILA
gctccggtgcacctgcgccttttacctgcgcaccccgcccgcagttcgagttcccaattatccacggtcactgttgcaattgcatttttccagccacgggcggctcaaaatttctgtcagtgcaaaacaagttctttaagggtggtgcacgcggcaacaacaacaaccacaaggtgattccctccgcattttcgcgccacatgcgccgttaatgctaatgtaccgcgctctcgctcgctctctccgctcaccaatcacaatgcgctccggatgggcgaaacttggtcgagcctaggcaacttgataattcccttttggtgtgttgtgttttttgcctgaaaacatctccccatgttttaaaaatgattcaaagctttcgttgaataatggcgggcttaacagttctgcgatttgcttaatagggtccaattggatggagtttaactttcaaaaactttcgctaaacagaaagctcatcttctaatgagtagagtctgaaatttagacgcagaatccataaaaattcttagtggttcatgcattgttgttaaaatgttgaatgctgttttgtcttttcggaactcatttggaattccaaaatttaaggtgaaacactatttaattttaatttaaaattccttttaatttcagcagtatgattcccctctgatttgtaatcacaaaaatgttcatggccattcattgaccatcatttatacttattataatcatttatactatttataaaaattgaaatataacagttagcagaatcagtgtgaccagccattgtgaggatcaaaaactaaacctccaattcggctatgcccgcgataccctgaacgaacaggggcgcgaatgacaaaaacaacaaaaaccagcagcagcagaagggcagcgtcgtaacgagagagccgggcagagaagaagaggaagaggcaacggcagcggcgagcgcatgaacgtgagttttgcagtttgatggttaaatgcgtgcgtgaaggttggagtgaagattttgagccgaattcgaatcctagtccccgccgcaataagtgggtcagaattggagccgttcgattgggccaaacaaaaagctgggcgccaccgcagactgcagctaaaacacgccgccaaagtaattggaagaagaagcaggcgcacaataggaataattgttcatggattttttcgatttctcgttcgcttgcagaaggaaaagtgcacgagggtggaaccaagggtaaataagattcgcccgaaaacgcttggaaaatgtaaacaatctgtaagcacagcgacgataagcgattttcaaagagtttgccagctttttacatcgatcaaacactcgcataataaacgaataagaactgacgattaaatcgaattgaagtggagtgacgactatgggataccctaggaccgcgtagagtgaatgaatttgacaagtgagttaaaaaagccatggggcacgaattaagttagcataatatatgtgcgtaaatcaattcagtgctattaactaagtttgttgggggaaatgttagctgtgtaatccgcataaaaggaaatcttgtttaggacccatacgcccctgataccctggaccgaagcggacgccattatcctattagccgttatgccccatcaagcgattcgattgtttgaggttagtaacagtacatctgaccaaacttctgcatcgaccctctgtattaaacgcagttctttgcggcataagtgaaaataaatagaagataaaatgtgcatgtgagcctcccgtgcatgagtgtgcctgtgtccgtgcgccctgcgaaggagaaacagagagcggaagaaataggaaaagaagagagcgggcgaaacgaaagagagagcgacggttttggagcgcgcgcgcacatcaaaattaaaaaacaaactgtgagatacatttgggtttattttttatattttgtttaggctacataggcgatgatgatgatgttgatgagcggcaaaagcaacagagagagagatagagagagagagagagagcgagcgactcgagtgttatgttgtgttttcagtttcggtttcggatgtatcttcttcagtcggaataaggaatacacgattgtcggagcgaacggattacgcataagaactctctggaaaacgaatttcgcctcgcgaaaatccgctgaaaaggcaaagccaagccaattcaaaacggaatccgcaccgcatcaaattaaaaatcgaatcaattagcgaaaatcggtactgaacgcgcgacccaacaacaacaaaagccaagcgtcttgcatgcggctgctaaaaaaggtgtgtacgcgaaggagatgcacgtagagagcgaaagaggaggcacgagcgtgccactatcaacagaatttgataaatagactttagtccaattgctgccaaatgcaaatattgattttcactactcccaagatttcccaaaagattcctctcgacgcttttccgtttttggaaaatatacatacacaaatatacggacgatttgcggcgcagaaaccacctacatacggacatgtagagaaacttgtgtgaatacaaccctcgtcctcatccccctatgtttttgcgtcgtatcctcgctgcacgaacacaaatgtagcgctgtaaccgtgtgtgtatgtgtgtgtctgtgtgtttgtgaaaggactttaacttcttggtcgtgttttttccacgtcctgcgactcggagacagacccgtttcaatggaaaacgttcaagggtgacaagggtagtttcgctgatgcctcctccttctcctccccctcttctttctgcatggagtccttttcctgctcttgttcttcttatccttgtttttgttgccgctgtctacacggttcgaaaatatcctagaagtgcattcctttcctagggcgttgcattgtttagccgaaaaaaagggtaccaaagctgagtttgtttattgatttcatcaggactgttcgcaatccaatcgcaaccattacgcacaaccgcttttcttaaactacagatggtatggaaattcacgttgttgtgatttccctttaaacactttaaggagtgtattttctttttatagaatgctaattcatagatgttaaaacatccctaacatcttgtcgttttttaaaatctccttgtcaaaacggtaataacattcaaagttaccttaactcaaggaacgtaaaatcttgtccttaaaatgggtttatttaataatatcaacatatttgcgcattaagtatatacattttcctggcttaaatttccaatttggtttgctttaaaattttacttagaactgattaaaccgaacaagttcgttaagttcttgtttatcgaaatgcaaatccatttaaaggggtgtgatcctttacaccaactttttattaatatatattctgggccatagtgcatcttaatataagaactgaactgccaggcaaattgttttcaccacagatcgacaaaaatcatcaatcgcttgactttaatatttttccttgacgagagcaacgggaggcctaaactcaacccgcagacattcaataacccttttccaccttaaccccattcgtaaactggatttgctacccctcaagtcatactataaattaactcaaatcacccaaaatcagaatgaaggaagaaatacacgttcctgtcgtcaagttttccgcagagtgtggaagaaacagctccgtaatcctgacccggtggagggatgaaagtcggtcgttttattgggtctacgctcctcgtcttagagatggaaaccagttccgtctgttgttttatgacgtagtcgctttgtgtttgccaccccattctccccgccggaaaagtcgcttgcgcagtgctggcgaagcgaggtggtgggtggaaagacaggaaaatattgtaactacgtgataaggttgagcgctgaggtggggccccgtgagggtggtttctaatcccagtccagtttgttttcccgtgtttttggggagaaatttcccgactctagtatctgggttacagaaagtatctaaggagtacaggcagttcgccgaattgcgcgcgaaaactcgccattttagctcgtaaattaggaaatgcgtggctaattccgaaattccgggattccaaagaacttgacaatggcatgaatgcaaccaagtatcttacagatacaaaagatacacacaaatctgacctgctgccgcgcggcacacagctgcctttctcgggttgcattgcttttctcggattcgggacgggcctacttaaaggatcaggggtcggggatccggccttgtggattggtcataagaaggcaggcaagcggtcggggaattttcccgctacctacgatgatgcctagatgcagctgcaactgcctgcctaggactacttaatgaagcaccttttccttggccaatttagttaggttctacccttcggcaactgacgacgtcccgcgcgttccaaacgcagtttagaaaaaaaacacaaaacatttttatccacgagctcttcgcgtcttcgagttttcgtcaaacgtctctaaaattattcgcaaatcttactaatttttgtagcggaaaagcgccactccattgactgctgccttgtgctatagaaacgtgatctcaccactcttatgatggaacttttgtcaaacaattcggttccgcaacaaatggccagcagcaatgcgccgagcgccaacaatgtggcccactcctcaacggccaacggaagtggaggcggcagtgtgagcagcaatgccagcaactcctccgagcgactgctggcgggcatcctggagagctttcccgcctgggacctcaacgtgggactactgcccaacgtgggccagaggtgagatagaaacacaattaaaaatctcgagaggctcgacttaaatcactcttcaacttttttttctagctcaccaccacgcgcagacttctttatcaataacttcctgggcggcctggacacgcatggcgacttcagcattggacccattggcagcggtgcccgcagcaatccgaagatgtcgccagagtcatctaacaactcgagcatcagctgcggttggtgcgaggttagtgcttcaatacgctgcctggagtgcaacgagttcatgtgcaacgactgcctaagggagcatcgcaacagtccgctgtcctccaaccactcgatcgtgtccttgcccacgcccattggagcctcgcccacgggtggcagctcggtaaatgcacagactccgcccagcggcaactttatctgcgacatacacaacgagatgttgcgctacgtatgtgactactgccggaaattggtgtgtcagtgctgcacactgcacgagcacaaggagcacagctacgcgtccatccaaagctttatggtgggctcgaaggagaagctggagggcgccattgagagcagccaggtgggcacgcgctgcattaagagcagcattgacaaagcgttggccttcatccggcttatcgagcgcaattgcagcgagctgagcgataatatacgcaaggcattccgtcagtttatcattgccatcgaggaccgcgagcgtttcctcctggactttgtggaaaagctccgccagcgtcgtctggccatcctacacgatcagatggcaggcttaaagtctgctctcgccggactctccgaaacgtccgatatgcttagcaaggtggcggacaatgcctgcaacatggaccagattgaaattgccatgaagttgaccaatgggcagaggcagatggagcagtttgcgggcatatataaggacctgcagccaaaacaggaagtctttgccttcgcaccaccagattacagcctgctacaggatatccgcaaccagggtggcgttatcctggtggacgacaagaacttgcccatcgtctctagcagcaacggaattgtgccgagcgtctccagtgttaatgccgtggccgcggcctccgtgggagttgtgggaggcgttgctggagtagtcggaggcgttggcgtgtcaaacggcctggacttggccttcggcatgaacatgcccaacaatccgctgagtgttgcttcctcaagtgtgcgacgtcccctgttgcgagacaatagcttccggattccatcgcccataatgcaaccacgcggaggaagtgcctgtgggatgtccagtgggatgtccagcgctgctcttgattgggaactcaatggactgcgcagctcgccaggattacacttcagtgcgccgcgaaccacgcaggccattccgggatgcatggatctggtcaaggtgcgtaactcgaatgctctctcgctatccttcgccaccgagggccacgaggacggacaggtgagccggccatggggtctatgcgttgataaaatgggccacgttctcgtatcggatcgccgcaacaatcgcgtccaggtcttcaatcccgatggctccctaaagttcaaattcggccgtaaaggcgtgggcaatggagagttcgatctgcctgctggaatctgtgttgacgttgataatcgcattattgtggtcgacaaggacaatcaccgtgtgcaaatctttaccgccagcggcgtcttcctgctcaagttcggcagctacggcaaggagtacggccagttccagtatccgtgggatgtggccgtgaactcgcgccgccaaattgtggttaccgactcgcgcaatcatcgcatccagcagttcgactctgagggtcgcttcatccgccagatagtgttcgacaaccatgggcaaaccaaaggaatcgcctcgccacgaggcgtttgctacacgccgacgggcaacatcatagtgtctgactttgacaaccactgcctctacctgattgatccagacatcaacgacgtatgtatgattgtaaatagcttagttccattggtgcttatgcgcttttgaacttgttgcagattctttccgtgaagggacatgagggctcgggcttccatgaatttaatcgaccctccggcctgtgctgtgacgacgagggccgcattatagtggccgattcaaagaatcaacgcatcctggtcttcaatcagaacctggactttatgtgggatgtaagtacacttttcagcttaggatcaaccaacagggtattggaacctcactaacatggtattattgcgttccccaatttagatcgaggtgcgaccctccatcaatcccttgatgccgcccacgctggacgagaaagatcgcacttgcgatgtggccataatgccagacggtcgcattgtgttcctcattgaactgtcgccagactccaaggaagggtcaaacccttacaagcggtttgtgcacgtattctaaataaggccacgagtgccgatctttttttttagaccatttacaagagcgaaaccttagcgtagagtttcaaataacatgacgattatgaggaggtgccgaaaccgatttaataagaaaaaatctgaaatcatgaaagttagcgaaaatttttagcttaagtgctacaacgattacctcgatattgcttaagagttatggttacgatttggtaatttacaatacaatacgaattacacatatgtatctatggatatctatatctatacgcatatgcatatatctagcgaatatacaagcccaaccaactagaactataactaaaacaaaaacaaaaaacaaaaactaaagcgaaaggcaggcggttgagtaggatttaggagatatatataaacgtagggtccgtgagcattcagtagagttaccgaacctagtaaaagataatgcaaagagggaactcaaccatttactagatgaaaatattattacctgttagttagactgaaaggcagtttgctagctgatagaaggaggtacgaaccaggtcaggtggcgattgtgtttttttttacgggtttgcttagcggaatgaggaaactacattcgacaagagttactaaacatgatttgcagaaacactgtatggtatggtattaatgtttgtattatatttatagttcgtttgttcagttctgtttttcgtttattttaaaattactttttttttgggacatacatatgtattttaatgatttccttataattgagactgagcatttgacaacacgaactttgcgtgtacggaagcaaagcgaaacaaaacaaagaaacaaacaaaaaacaagaaaatattgatggaacccgctgacttttcgttgaactttatacaaagactgattaactaaaccgcaatttcggagccaactaaagaaccatatatggtgaggccaaaataagtgaaagagcaacacactcaaattgcaatgacattgataacgtaaagtaacttaacatagcttaacatacatactttcgcgcatatagagcgatacagatatcatatagatccgatcatccagtcacgaatcatcatgggcatagctgaaaccgagtttaactgacattcatcgacatatttacccatccatccatccatccatccactcactcataccgatcatgcatcacagggctttgtttttcgtttgtcgttactttgtaattattgtgaaaggatttagccacaggatacagattcacggcaggttgaaaggaggaggaggaggagggaggggttagctaaa

SEQ ID NO: 26999 - DNA, 3261 bp, DROSOPHILA
aaggttggagtgaagattttgagccgaattcgaatcctagtccccgccgcaataagtgggtcagaattggagccgttcgattgggccaaacaaaaagctgggcgccaccgcagactgcagctaaaacacgccgccaaagtaattggaagaagaagcaggcgcacaataggaataattgttcatggattttttcgatttctcgttcgcttgcagaaggaaaagtgcacgagggtggaaccaagggtaaataagattcgcccgaaaacgcttggaaaatgtaaacaatctgtaagcacagcgacgataagcgattttcaaagagtttgccagctttttacatcgatcaaacactcgcataataaacgaataagaactgacgattaaatcgaattgaagtggagtgacgactatgggataccctaggaccgcgtagagtgaatgaatttgacaacggaaaagcgccactccattgactgctgccttgtgctatagaaacgtgatctcaccactcttatgatggaacttttgtcaaacaattcggttccgcaacaaatggccagcagcaatgcgccgagcgccaacaatgtggcccactcctcaacggccaacggaagtggaggcggcagtgtgagcagcaatgccagcaactcctccgagcgactgctggcgggcatcctggagagctttcccgcctgggacctcaacgtgggactactgcccaacgtgggccagagctcaccaccacgcgcagacttctttatcaataacttcctgggcggcctggacacgcatggcgacttcagcattggacccattggcagcggtgcccgcagcaatccgaagatgtcgccagagtcatctaacaactcgagcatcagctgcggttggtgcgaggttagtgcttcaatacgctgcctggagtgcaacgagttcatgtgcaacgactgcctaagggagcatcgcaacagtccgctgtcctccaaccactcgatcgtgtccttgcccacgcccattggagcctcgcccacgggtggcagctcggtaaatgcacagactccgcccagcggcaactttatctgcgacatacacaacgagatgttgcgctacgtatgtgactactgccggaaattggtgtgtcagtgctgcacactgcacgagcacaaggagcacagctacgcgtccatccaaagctttatggtgggctcgaaggagaagctggagggcgccattgagagcagccaggtgggcacgcgctgcattaagagcagcattgacaaagcgttggccttcatccggcttatcgagcgcaattgcagcgagctgagcgataatatacgcaaggcattccgtcagtttatcattgccatcgaggaccgcgagcgtttcctcctggactttgtggaaaagctccgccagcgtcgtctggccatcctacacgatcagatggcaggcttaaagtctgctctcgccggactctccgaaacgtccgatatgcttagcaaggtggcggacaatgcctgcaacatggaccagattgaaattgccatgaagttgaccaatgggcagaggcagatggagcagtttgcgggcatatataaggacctgcagccaaaacaggaagtctttgccttcgcaccaccagattacagcctgctacaggatatccgcaaccagggtggcgttatcctggtggacgacaagaacttgcccatcgtctctagcagcaacggaattgtgccgagcgtctccagtgttaatgccgtggccgcggcctccgtgggagttgtgggaggcgttgctggagtagtcggaggcgttggcgtgtcaaacggcctggacttggccttcggcatgaacatgcccaacaatccgctgagtgttgcttcctcaagtgtgcgacgtcccctgttgcgagacaatagcttccggattccatcgcccataatgcaaccacgcggaggaagtgcctgtgggatgtccagtgggatgtccagcgctgctcttgattgggaactcaatggactgcgcagctcgccaggattacacttcagtgcgccgcgaaccacgcaggccattccgggatgcatggatctggtcaaggtgcgtaactcgaatgctctctcgctatccttcgccaccgagggccacgaggacggacaggtgagccggccatggggtctatgcgttgataaaatgggccacgttctcgtatcggatcgccgcaacaatcgcgtccaggtcttcaatcccgatggctccctaaagttcaaattcggccgtaaaggcgtgggcaatggagagttcgatctgcctgctggaatctgtgttgacgttgataatcgcattattgtggtcgacaaggacaatcaccgtgtgcaaatctttaccgccagcggcgtcttcctgctcaagttcggcagctacggcaaggagtacggccagttccagtatccgtgggatgtggccgtgaactcgcgccgccaaattgtggttaccgactcgcgcaatcatcgcatccagcagttcgactctgagggtcgcttcatccgccagatagtgttcgacaaccatgggcaaaccaaaggaatcgcctcgccacgaggcgtttgctacacgccgacgggcaacatcatagtattctttccgtgaagggacatgagggctcgggcttccatgaatttaatcgaccctccggcctgtgctgtgacgacgagggccgcattatagtggccgattcaaagaatcaacgcatcctggtcttcaatcagaacctggactttatgtgggatatcgaggtgcgaccctccatcaatcccttgatgccgcccacgctggacgagaaagatcgcacttgcgatgtggccataatgccagacggtcgcattgtgttcctcattgaactgtcgccagactccaaggaagggtcaaacccttacaagcggtttgtgcacgtattctaaataaggccacgagtgccgatctttttttttagaccatttacaagagcgaaaccttagcgtagagtttcaaataacatgacgattatgaggaggtgccgaaaccgatttaataagaaaaaatctgaaatcatgaaagttagcgaaaatttttagcttaagtgctacaacgattacctcgatattgcttaagagttatggttacgatttggtaatttacaatacaatacgaattacacatatgtatctatggatatctatatctatacgcatatgcatatatctagcgaatatacaagcccaa

SEQ ID NO: 27000 - protein, 698 aa, DROSOPHILA; identical to SEQ ID NO: 1719

SEQ ID NO: 27001 - DNA, 2043 bp, DROSOPHILA
gcccaaataattggaatagctatcatcacaatttacaaccaaatacatatctattataaataaaaaaatgaatatatttcaaaaaatatatatttatgctaccagagctgtaaattgtataatttattatgaaaaaaagcactaatacttattatgccagccgaacatagtaagaattttagagtctagagttcccatttgcaaggacatgacaaagccctggcaaccctttttaaaaaaaaaagacgatgactttgcagtctacaagtcacatttctgatttggcgtgaggacttcagttgattcacatctcggaggggatattactttatattatattaattaatatattaatttgtaaagcacagcattttcaaggtgagcatttcaagaaaattcttttccacgcactttacccatacaagttgataggttttcctaacgaaacaatggatttcaagacgctgaagaaaatggaggaggcggtgcgcatcggcggcaatggatctatgcgccgcaagcacaagaaaatcccatccttgaatgcggacgatgagaagcgcgtgcgggccgcattggccatgttaccgttgaagaatctcggcgaaattcaggaaatgaccatcaagttctccgattccagtgaggttgtggtaatcatgcccaggattcagaaaaccaatcccagttatttcttcgtgatgagtggccatttcgtgcgcaagtcgttaacagctggcccatccaaagcaccaaaggcacccaagccacacaagccgaaatctttttccgacaaaaaggcggaatcaggggagtccattaagatggtggccaagaagcccaaaaacaaagaggaagcagcaatggctggcggggattcggagccgaagcttagcaatggtaaatcaattttgatctcctctgaagatggtagcgatccggataatgagaaggtgccatcggatgagtctgatgtggatcggaccgtcgtctgcgccaaagattcgctgcgaagtttcggcgatgattccgacggcaagtaggacgatgacagtacggagtcgatcttcctatcctcctactccgattactatgattccgcggatgagcagctcaatccgaagacttatcgcgctcaggtgtcagaggacgaagattagacatattcatttgttgctacatttgtaccaattttctaaataaatcgcatactatatacgtgcatactgcacatcatatatattttctctaaatttttttgggactacttctaaaagatgtttattcattgtacctaaaattttcattaaatgtttatgttaagtttttgccagtcattatttcgtgttctctttcgcatagaatactttagagttgtcaaaattattttcaggagctatcaacacaatttaaaaccttatgttaattataaataaaaacaagaaaaaatgaatctgcatgctgaatctcaatcttctcgcttttatagttcctgagatatcgacgttcctacgacgacagacggacatggccagatctacagatctattaacaagtttggtgctaagttgcacaaatatttcttgtttaacgaacactcattaaaatagttagcagaaaatcacaaggcaaattacactaattacagcaattgcatcgataatgaaactatttcaatttatgtgattgtacaatttcattgccaacacgaaaagggaaacaattttcggagagtattaaatattattattattattattaactgctgtgatttttcgacagccactcgttttgccactaggctaatcaataattgcaaatggtatggaaaatggtaagttccgactgaaattaaagtgttttatagagtcaagaacaaaaagcgtttcgccagtattcaaaaatcaattcgactcgactattaccttaatcaataaatttccaataatgcattgaacatcagataccataccgaaattcttagtttatggtgtgtggaacaatgcaatttcaaagctaacaaaaccaacaaaaggacctcgg

SEQ ID NO: 27002 - DNA, 594 bp, DROSOPHILA
atggatttcaagacgctgaagaaaatggaggaggcggtgcgcatcggcggcaatggatctatgcgccgcaagcacaagaaaatcccatccttgaatgcggacgatgagaagcgcgtgcgggccgcattggccatgttaccgttgaagaatctcggcgaaattcaggaaatgaccatcaagttctccgattccagtgaggttgtggtaatcatgcccaggattcagaaaaccaatcccagttatttcttcgtgatgagtggccatttcgtgcgcaagtcgttaacagctggcccatccaaagcaccaaaggcacccaagccacacaagccgaaatctttttccgacaaaaaggcggaatcaggggagtccattaagatggtggccaagaagcccaaaaacaaagaggaagcagcaatggctggcggggattcggagccgaagcttagcaatggtaaatcaattttgatctcctctgaagatggtagcgatccggataatgagaaggtgccatcggatgagtctgatgtggatcggaccgtcgtctgcgccaaagattcgctgcgaagtttcggcgatgattccgacggcaagtag

SEQ ID NO: 27003 - protein, 197 aa, DROSOPHILA
MDFKTLKKMEEAVRIGGNGSMRRKHKKIPSLNADDEKRVRAALAMLPLKNLGEIQEMTIKFSDSSEVVVIMPRIQKTNPSYFFVMSGHFVRKSLTAGPSKAPKAPKPHKPKSFSDKKAESGESIKMVAKKPKNKEEAAMAGGDSEPKLSNGKSILISSEDGSDPDNEKVPSDESDVDRTVVCAKDSLRSFGDDSDGK

SEQ ID NO: 27004 - DNA, 2668 bp, DROSOPHILA
atcaaatagacatgacgtaatctccccgtttcgtcatcgatccactgccgttgtgtcttgttgccttgtcttgtgctattcagtgtgctcagcctcagcgcaattgaactgagccgttgtgggcgtggcagcggctcatgttcggttattggtttgacgtgacaggcagactcgagagttggaaactctctgccggcgccaggtgaactgcccccttgagtatcgaccatgtatttgcattcataactgtgaatccgcgaactgatcagtttcttttctttatgcctatctttaagatgcctgcggcctgtccgatgtgacgcacattgaatccctgcaagagaagtcgcagtgcgccctcgaggaatactgccggacccagtatcccaaccagcccacgagattcggcaagctgcttctcagactgccatcgctgcgaacggtctcctcacaagtaagtttattatctagctaattattacacaataaatcgtcaaaaaagattaaatatgaggtacttggaatatcaagaaaaggggaaaatacaaattgtaaagctgaaacagacaacagctggcaatttcaaaatatactggaattagactggagatagaaattttataaaatatttgaaatactcgtattaaatatctttcctaataaaaatctttgttttgccttacgttctttttcttcggttaggtcattgagcaattgttttttgtgcgtctagtcggaaaaacgccaattgaaacgctgatacgcgatatgctgctgagcggcaacagtttctcctggccctatctgccttcgatgtgacacacgatgtggcgccaattgacaacaacttgatcatcggccgcagctgtggcggctgcaacgctcaacatcaattccggcggaggcggcatcggcatcggcggcgggggcagtggcagtggcggtggcggtagtggaggcggtggcggagtcgttggatgtggcagccacaacgttgtcgctgccagtcatgaccagctcgccaatgttgctgtcatgcagcaaacatacggcagcggcggcagcagcagcagcagcatcagcggttgccacaacggtaacaacggcagcggcggcagcatttgcaatcagcagatcaacaactacggcaacaacagcaacaacaatgtcggcaatcatatgagtgcaggcagttttttcggtgggtccaacaacagcatccacagtagtggcaatagcaataccgattatatgaccacgccagccaccgcttatgcgacaccagcgacagcagccacatccacggtgaacaccacaacgatgctgtctaattactgcgatgccgccaccatgatgatggccgctgctgcagtcaatgcaaatcaatgcctgcagcaacatcaccagcgcatgttgctcgcgggcagcagcaacagcagcagcaacaacagcagcagcaacagcaacggcgcagcagcaatgccctcctcatcctcgtctggctcactgtcatctgcctcatcgaccccaacagcaacagcaactgcgactgcaattgcaacagcaacagcaactgcagcagcaacagccgcgcagcaacaacagcaacaatcgccgccaaatttaatcgatatcagcgaagttcctctcattgtggatgtcaagtagtgtaattatttatgcatctagaaatggggctataaaccaaccttgtagataccccgccccgcccccaccactaccacaaaaaccataaaaccccaaaaaaaaaacaattgaaaaatgtaaaaaaaaaaagttggaggatgagcgccgcgtagcttaattgactaattttccatttgtagcttttgttgtaactttgtacataactcctcgaaaaattcaagtttttctctaggccaccccagctgtgagcaaaaccaatctcagctgacatatccaagagaacttcaaaagtgaagcccccaaaaaaagtaagaaggcgccaaaaaaacgtctttacatatgaatgtgtataatatttaaatggcactgagttctacttaattttagaccacaaacacttgaaaaaatcaatgaaaaaataagaattgtggaaagagaaaaatcccccctaacactttcaaaagacaaaacataaagatagttaaaatatttatatatgtaatgtagcatatacacgtatatagtacatatatgaatatataaacgaaactctactcccagtggtttgcagaaatataccaaaaattttaagctatgtttacttgatgtgtggcaatttttatgtgtgctttagcaattttatttttactttaagtaaaatttaaaatttataaacattcgattctcgactggtttttctcggcggatgtatctcaaagatgcttctgtatgggaaggccgaattgttgaaatacgaatgcaaaatttagcgaattttttatttagtaaccattacgagtaaaaacacaaaatgttcagtgcaagtttcagttcttaaacgattttttcgtaagcttaagcattatcttatttatgtgtatagagtatgaaaagttttctatattttgtaataataaaaatttgcgtttataatgaatcctctattgtgtttgcattttttgtttggtatcattttcttggggtaagaacactatttcga

SEQ ID NO: 27005 - DNA, 668 bp, DROSOPHILA
ctgccagtcatgaccagctcgccaatgttgctgtcatgcagcaaacatacggcagcggcggcagcagcagcagcagcatcagcggttgccacaacggtaacaacggcagcggcggcagcatttgcaatcagcagatcaacaactacggcaacaacagcaacaacaatgtcggcaatcatatgagtgcaggcagttttttcggtgggtccaacaacagcatccacagtagtggcaatagcaataccgattatatgaccacgccagccaccgcttatgcgacaccagcgacagcagccacatccacggtgaacaccacaacgatgctgtctaattactgcgatgccgccaccatgatgatggccgctgctgcagtcaatgcaaatcaatgcctgcagcaacatcaccagcgcatgttgctcgcgggcagcagcaacagcagcagcaacaacagcagcagcaacagcaacggcgcagcagcaatgccctcctcatcctcgtctggctcactgtcatctgcctcatcgaccccaacagcaacagcaactgcgactgcaattgcaacagcaacagcaactgcagcagcaacagccgcgcagcaacaacagcaacaatcgccgccaaatttaatcgatatcagcgaagttcctctcattgtggatgtcaagtag

SEQ ID NO: 27006 - protein, 210 aa, DROSOPHILA
MQQTYGSGGSSSSSISGCHNGNNGSGGSICNQQINNYGNNSNNNVGNHMSAGSFFGGSNNSIHSSGNSNTDYMTTPATAYATPATAATSTVNTTTMLSNYCDAATMMMAAAAVNANQCLQQHHQRMLLAGSSNSSSNNSSSNSNGAAAMPSSSSSGSLSSASSTPTATATATAIATATATAAATAAQQQQQQSPPNLIDISEVPLIVDVK

SEQ ID NO: 27007 - DNA, 2653 bp, DROSOPHILA
taacctcacatgaagaacgaattcatataccgaaattatagcaaacacattttcaccgctgtttgcatcagcggcaacgtttccaaaattttcaatagccatggcaacagaaataacaacgaaacggcagaaacagcgactcgaaatttggttcaagcgggaagatgagcgcaaaaaaaattataattataattataaatgttataaataaaaaaaatgttattaataatttttagcaagtctgtataaggtgtttaacaaaatttggataattcttcgtcaaatgactactaattttatttaagtggtttcgtaagtcattatataaattattaaattcgcttttttcatatctattgcagttaagggggtggacgccagtttttttttaaatagaaagctaatagttgtgcttgatgtaaaaaattccttgttcgaatccatcacgttcacattaataactaaaagatattctcgcgcgcgcactctgccatcagccttaaactctttggaacctaagatgtgtagcattatctccgttttctaagctcccctcattcacgctttctctctcttgtactctcgcaccctcaactttggggtaaggttctgctgttcgctcgtcgttcatttattcgcgttcgttaacttgaacatatcgcatagatgcagaatctcgttcgctaagcccaataaaatcgcatccttcgaaatcgctacataaacctcgaatttttattgctttaaaaggggtaataaaaaagcttattagctcaacatttggtgtcccgacttgatttgttcataaacaatatatagcgcaaatcctgcaaagctgtttaaagctttaacttcaattatttcgctgttgttgctgagtacgttgttggacaacaatttgtgtctgcacgctgacaaggttaaaggcagtgagcattgaaagtaaccccgatggttacgcaatagattgcaatacataaagagttatatttgtgcgcgtatggtcagggacaggtggcgcaccggaaagcggtggaccggaccacatatcgcaggacaatggaataatctcctggggaccagaccacatgaatataaagcccggcatggacgcagcaacagtttcaacaacaatgaagttcatcgatcaccgccgcagcaggcatcgcacgtcggcgttccatatccacgattgccacaagtaggaccggtggttaagccaccttatgccatgccacagccaccttcatagcgtgtgggtcaacaagtgggccaggagccaatcagcggcatgatttcccaaaagccaccgccgatcccgggacagggaataccatgcaaaagcagcctcgccgcgtcaatacccacatccccatcagaatccgcagcaccagcatccgcaacagactccggccaaccaaactgccccagcgcagctggtgagaaaggagctgatcctttcgcatgacagcgtggaatccatcacgccagttttgtaccgatgaaagcggcttacgatggcggacgtatgcccggtggatccatagcggtccagttttttggcacttcaaacctgcacggcctgttaactttgcaagttcttacgacagcagctgttatgctgtcaacgcccaccctaccatgaccagttaacataaatattgatccctacaattctaaatacttccctcttacacgaaatagaacctccgacgcatggctttcctagagagaattactcatttaataacataataaactttaattttaaacataacaagagggaatgctatagtcgagctctccgactatcagatacccgtaacgcagccagtggaaatgcgaacgtgaaatttcatcacttttctgggatatcgatagatattggtgaacaaaatgagaaaaattttaaaatttgttcaaaagtgggtgtaaggaggggcgtggccaaagtgtttttggcacaccatagaaattggcaagacaaacaataaaaacgaagggttgtgcgtggtagttgtgggcgttagagtgagcgtggcaaaaagttttttgtggtttgagagcgttagacagggtgggcaacttttggaaagcaacttgcgctgcgcttatctctctggaagccgcatgcttaatcacatcactttctagcttttatagttcctgagatcgaggcgttcatacagatagacgaacggacagggccaaatcgactcggctattgatcctgatcaagaaaatatatacattatatggtcggaaacgcttttttttttcgaacgggtcccacggccacacctccagcccaaccgaccgaggtgcgctgccgtgtatcgtacagctcgattcgcgagaagatatagacgcgatataaaaaagagaacaggaacgaggaaataaataaaatgtaaaataactatattaaatattactgttagtaagatctaattatgtattgaaaaagttaaaatcgattgctttaagagcggcagagagtcaaaaattcagataataggataaagtctattatagtcagaacataaaactctgtaagggtcatgcaactcatagttagatctacaatgatttaagataaggggtatatagtttctagtgaatctacttggaaccgagaagttaagccgactaa

SEQ ID NO: 27008 - DNA, 555 bp, DROSOPHILA
atggtcagggacaggtggcgcaccggaaagcggtggaccggaccacatatcgcaggacaatggaataatctcctggggaccagaccacatgaatataaagcccggcatggacgcagcaacagtttcaacaacaatgaagttcatcgatcaccgccgcagcaggcatcgcacgtcggcgttccatatccacgattgccacaacgtgtgggtcaacaagtgggccaggagccaatcagcggcatgatttcccaaaagccaccgccgatcccgggacagggaataccatgcaaaagcagcctcgccgcgtcaatacccacatccccatcagaatccgcagcaccagcatccgcaacagactccggccaaccaaactgccccagcgcagctggccagttttgtaccgatgaaagcggcttacgatggcggacgtatgcccggtggatccatagcggtccagttttttggcacttcaaacctgcacggcctgttaactttgcaagttcttacgacagcagctgttatgctgtcaacgcccaccctaccatgaccagttaa

SEQ ID NO: 27009 - protein, 184 aa, DROSOPHILA
MVRDRWRTGKRWTGPHIAGQWNNLLGTRPHEYKARHGRSNSFNNNEVHRSPPQQASHVGVPYPRLPQRVGQQVGQEPISGMISQKPPPIPGQGIPCKSSLAASIPTSPSESAAPASATDSGQPNCPSAAGQFCTDESGLRWRTYARWIHSGPVFWHFKPARPVNFASSYDSSCYAVNAHPTMTS

SEQ ID NO: 27010 - DNA, 3736 bp, DROSOPHILA
ttggccagcgtagtgaatcgcctgctgaactgatcctttaccagctctggagtgactgtggaggccgcgtccaggtactgcaccactggaatctggcccatttcgagcacgggaacctgtcgcacgcgaagtcccggtaggagtacttgggattgggccataatcagtgcaaggagtccaaccagtggtataagatgcagcctcattttgagttgatgcagcttggagaatgctggtgtcccactgttagcttcacactttatacttatccaggaaattccggaagtctcttaccttccccaagcatcgggtgattgatctgcaattggcttaccgcatctgctctgctcgtgtccgttcaaccggttaggcagtatcgttattttgaataactggaattggcgtgcggaatgttaatggccacagtcttcagttcgaagctcacacttcaaaatgtgatatcaaaatgttcattttgtaattgtaattgatgtacatagcacaagttttgaacgacaagtataaagaaaaagacaaagcgaaaatctccttcaattcgaatcttaacagctcataaagttatgaggcagagtttccaccctctgaccaagaaacgaatcgtatttcatcctccctacatcttgcagagtaaattaaatagaataggtatagtgattccgacatagatatttcgtattttgaatgcatccaatggcatggcaggggaacgcttacataagcattctatcacaagtgattagactaatttagaaagttaatctgttaatttcattaagctcactgatagctctcccactgaatgacatttttgagtcatagtcacaaaagatcacaaataaatcgaattgaccattcacagccagactcaaacaaatttcagacggtgaaaacactccttcaatccttagaatcagtgaagtcgggccattagacgcttgcaggaatacccctaactccattcagaagagcttcgactttggccggttggattttccacctacatacgtacacgatgcatgtgtatttgaattaactgaataagaacgccgattagcagctcagtaggcggaatcagtagacagcgatacaggtgagcggtcgtttatctactccataccatacagcgtgctaagtcgcagctgcgattccagtgatatcgcaatatcgcgcaatctgacatcgaatctttgaaggcgacttacggcgaaatgtctggcgatcgactggatgtgattatctttggggccagtggcttcaccggcaagtacacggtcttcgaggcggtcacggtgctgcgcggcttgcgatggggcatcgctggcaggaaccgcgagaagctggaggcggtgttgaaggagatgggcgccaaggccaagaaggacctctcgcaggtgcccatcttcatcgcggacgtcaacgaccaggcctccctgcttgagatggcgaaaaagtgccggattgtggtgaacacggcaggaccctaccgctttcacggcgaaaacgtcgtgaagtgctgcatcgaatcgggcacgcaccatgtggatgttagcggcgagccccagtacatggagaccatgcagctgaggtacgatcagctggccagggaaaagggcgtgtacgtggtcagcgcctgcggctttgactccatacccgccgacatgggcgtcgtctttgtggaaaaaaacttcgacggcgtggtgaactccgtggagaccttcctggagaccggaatcaaagaaggcggcagtggcggaggcactgccggcctcaactacggaacctgggagagcgccgtttacgggctagctcactctgacgagctgcgcggcatccggaagcagatctatccccagagactgccaagattctatccctttctcaagccacgaccgctggtcttccgctctaccgaggttgacaaggtgtgtctaccttttcccggctccgaccgctcggtggtaatgaggtcccagcgcttcctctacgaccaggacaagaaacgtccggtccagatgcaggcctacgtgggattttcgtcttggctggtcgccggcggtgtcatcttttttgccaccatcttcggtctgctgtcaaagttcaagctgggacgtacgctgctgctcaattaccccggtctcttctccggcggattggcctctcgttccggcccaagtgaggagtcaatggagcgcacctatttcaagatgacttttaaggccagtggctggcttaagagcgatcgcctggccgagagttcaaaccaatacacggagtccccgaccaagacgctgatggtccgcgtatcgggcatgaatcccggatatggagccacctgcgtggctgtgctctcagcggcactgaccattcttcgtgagtcggacaagatgcccagcacaggcggagtgctgcctccagctgccgccttctctaagaccggactaattagcgagttggagaagcacgaccacggcatcaagtttgagattctggccaacaagtaatgtccagaatcgcacttctccctcccagcggctctcttttaatcaccttacttggctgtttgttactcgcggtttgaactgtaattatataagcacttattaaactaacccccacatccgctgctgttgttgccgatttcaaagtccaggcgaaacgggttagatctaattcagtgaattttgcacctcagaataaattaagatgcgaaaaacagattttcctaccttaaaatgtaaatattatcttggctaacatcgccaggtgcaagtcgctatgaacatgactttctgatttcaagcggtttgattcgtatattcgactaaattttaattaagatttttgtattttacaaagacgtaagaggggattgggtttcagaagtttttaaaaggaaccgtaatcgacttgttgctttcgtttgctctttctaaacggccttatatagccttaaaagtgagaaaccctttggattagttctccaatatattaatacaatacttcttactacttacttccatcaagagaacacagttaactgaagtgctattactttataagcaggttgaatgtctggtttggagcataaatctggagaggattcgcagcgtagacggtcacgggcagattccataccatcgtctccacgggcatttcagacggtgcttttagctcgccggactccggattcggaatgccaaagtcaatcaaagttgtggtcacaaactcgaaatgcaatcgccatcgcacgtcgacgaggtctgtgcggaatgtgggtgttacgtgcagcggaatgggtaccacgacctgggtctgcagcgttgcgtagcacacttggtgggaggtggaaatggtcgaaagtttcccggttggctcaggcgcctccttaacctttgagctagccgatgtggccgacttgtggaggttatctgccaacactccgctagctatgctggccatatcaaaggagttcatcgaggagacatcatcgcccgtcgaggattgcgactgcagctggtgattttgcactggttgcggtcggatggaaagctcctgctgctgcagctttaccgaaaactggacgcagcgcacctggtaagatgcagtaggattttagaaagcgcattatgagtaatgacaaaaaaaatcaccaacctttcgggggttaacgccgggatcaaagtccaggctgcccacaatgtcctcaccgagctta

SEQ ID NO: 27011 - DNA, 1633 bp, DROSOPHILA
gccggttggattttccacctacatacgtacacgatgcatgtgtatttgaattaactgaataagaacgccgattagcagctcagtaggcggaatcagtagacagcgatacaggcgacttacggcgaaatgtctggcgatcgactggatgtgattatctttggggccagtggcttcaccggcaagtacacggtcttcgaggcggtcacggtgctgcgcggcttgcgatggggcatcgctggcaggaaccgcgagaagctggaggcggtgttgaaggagatgggcgccaaggccaagaaggacctctcgcaggtgcccatcttcatcgcggacgtcaacgaccaggcctccctgcttgagatggcgaaaaagtgccggattgtggtgaacacggcaggaccctaccgctttcacggcgaaaacgtcgtgaagtgctgcatcgaatcgggcacgcaccatgtggatgttagcggcgagccccagtacatggagaccatgcagctgaggtacgatcagctggccagggaaaagggcgtgtacgtggtcagcgcctgcggctttgactccatacccgccgacatgggcgtcgtctttgtggaaaaaaacttcgacggcgtggtgaactccgtggagaccttcctggagaccggaatcaaagaaggcggcagtggcggaggcactgccggcctcaactacggaacctgggagagcgccgtttacgggctagctcactctgacgagctgcgcggcatccggaagcagatctatccccagagactgccaagattctatccctttctcaagccacgaccgctggtcttccgctctaccgaggttgacaaggtgtgtctaccttttcccggctccgaccgctcggtggtaatgaggtcccagcgcttcctctacgaccaggacaagaaacgtccggtccagatgcaggcctacgtgggattttcgtcttggctggtcgccggcggtgtcatcttttttgccaccatcttcggtctgctgtcaaagttcaagctgggacgtacgctgctgctcaattaccccggtctcttctccggcggattggcctctcgttccggcccaagtgaggagtcaatggagcgcacctatttcaagatgacttttaaggccagtggctggcttaagagcgatcgcctggccgagagttcaaaccaatacacggagtccccgaccaagacgctgatggtccgcgtatcgggcatgaatcccggatatggagccacctgcgtggctgtgctctcagcggcactgaccattcttcgtgagtcggacaagatgcccagcacaggcggagtgctgcctccagctgccgccttctctaagaccggactaattagcgagttggagaagcacgaccacggcatcaagtttgagattctggccaacaagtaatgtccagaatcgcacttctccctcccagcggctctcttttaatcaccttacttggctgtttgttactcgcggtttgaactgtaattatataagcacttattaaactaacccccacatccgctgctgttgttgccgatttcaaagtccaggcgaaacgggttagatctaattcagtgaattttgcacctcagaataaattaagatgcgaaaaaca

SEQ ID NO: 27012 - protein, 430 aa, DROSOPHILA; identical to SEQ ID NO: 4548

SEQ ID NO: 27013 - DNA, 6878 bp, DROSOPHILA
ttttattgtaaatgattttggcttgcaattaaagtgatcataccaacattttctggcaatacactcgatcgaacggatatagcgtggaaagtaatttaagcctaagtcaatccagttgatcttcgacgagcactcccacggccgctgcttgaacccatcgattctcggatgtcccacacgatccatgaaggcgcttctcgtgcgcagactcttgctcctcggtgcctccttcttcttctctaccagcgcaaagtggttggtctcccaggcgggaaagtggctaaccgaaatcgcatcactgtccgcatagaagggcagctcgtacgacgatcgcttgtatcccagatgatagctcttctcctcgggctcgcccggcggatcgatgctcatgtagcgcggattaaatgcctgtcccagaattttggccagcgactgcgtggatagctcggcgcagtaatcggcatcatcttgagccgtccccagcactgccaaccaagtgagcacaatggccagttcactttgggatttcatagttggacacagtatacgcagaaacatggctggctaaaaacagggctacaccaatatcaaccaattgatttatcgtgtttacagcagttatcgttgctctctacactgtaacttatttaggtactaaagtaataacagccaattcaataaaaagaaggattttaatttcagtgtcattgcgaaagattataaattaaatttattcatatatataattaaaacgcattctaaactttggataaatttaaagtttttttttttaaattaaactataaaagatgggtctaaatatttgaagtcataataaaattgtcatcataaggtaagtttcgctactcaagtgggctccagttttttcgactatcaaacataatagccgaaaaaactgctctgatggctttattcgaaaaatcccatctctatatattcgtaccgttatgttttatcaaaacaatagagagtatattgtacgttgtaaaatatacatatattaaatctgcattacttaaaatgattcctcgtattacaactactgagtgtatgctagtccttgggttctgtgtaaagtaaacgaatcgtacacgcgctgcagctcagacagacgatactcctccaggcaaacgattccctggagcgacggagatagcttcagcgcgcacgataggcagtggaccacatgtcgtttctcctgctccttgatgaacagcacattgaaaacctcaacctgcaaagagtgcacaaatgattaaataaactgcattcatatcacctttggaaactgtataaatatgttaataatactacgctaaatacctcgcattgtccgcagtaatgggatgcttcgttctttccgcgtccattgaaacgtatttccacacctttcgatttgacatactcttgtatgtgcaatacgtttttcaacgtttgcagcaaacacattctgaaaattacaaattacatatgtatgccctatagtatctgcataatggtgattcctatcatttgctaactcactttatcagctcgaaaagtttggtatcagacactttaatattccttgcaagattccagcttaaatgcaccatcggcacaatgctcttgaaggcctgcactttattccactcatatcgctcgatggcaagagaatactgacgggcagtcaagggtccaacattccacgcaatgttgttgcaccaaccgatcgactgaacccaatggacgcatctgaaagtaggtttgattgttaatacatcatccttcctttcatattcagtgcttacccggcattcacccaaaccaagtcaccgggcttttgtataaatctataaactggtatattctccttgtataaatcctccaggacgggccaccacgagccgtgcagatagctaatgttgttcttctcgcaaagattgtgaactccgccccagtaggcgtcagggacggcaaaccattcacagtcgccaggaccgatgttgatgttgattgagcagaagttgttgttctcttggtggccaggcgtcctacttccgggcaccttcatgtacagctgaacggtgttcatgcccaaaatgacgtggcccacgtgtgatagcatattggcagcggatataactcgcgcaaaagctggcagtttttgtagctctgttaattgtggtttccatttcttttcatcggagaggtccacgttggtcccgaacctaaaaaaaaaagcgaaataagcatttaatttatgttcataaagttcgtaatgcagacataaatggtttggagtttctattacctcaacattttgctgtttattttgtgttttttacgtttgagaacaatgttcgaattggataccgagtcctttgagtctgaatccgacattgcttgcgagccggggaaacctttatcgctttcatcctgcggtaaaataagctacacgataaagtaaacttgtattcatgttaaagaggaaccaacccaacgaacattaccttcaagctgtcttgaaaactggatgcctgatattgggcatatttggctatggttgtgtgagaccgatgggaaatgcaggcccagacgcgcttaccctgcgaagtgtcccaattttcatcgggagactggtgcacttgtgtccgaacctcaacactatggtccgggttggcttccaccaacgttttggtcgaaaagagaccgagatctagcttcaagacgcccgctaagccgcgtacaacggcaatcggatgtttcaggcaaaactcctgcaactgtgggctgaacgcgtgcttcttattttctaaatgaacagagggtgtgggaggcaggagttgatctcgcgtcagtttctgcggtgggcaatcgggcggagatggcggcggcgcattcacttgcaaaatggtacagtgcacgggcggttcatcaatcggcagcagcttcacagctaccatcaactgcttcgagtccatttgtattttgaacgtggtcgagatgtcggcgttgtcaccgccaataaaatcatgcctcgagtcctcattgttactcagtgcatcctggctcaaacgttcgagcttgatgctctcattctgtttataaatatcattcgagatgtcgtcgaaggtgtcaagaacactttgctccgaacttttgttgctctccggcatggcgttgaagttgcgctggtttaaagattccgaaatgtctgtttggagtgttaaaaagtgatttaatactttaagatatatactatttaaattggtcacttacttattagattttgcgctgatgtctgactgttgttttgtgttacttcttgttggcttgtgccatcttccttaatacgtttcgaaggtatgggactttggctgagttggctatgcggataaggtggtggcggtccctgtttaaaaacatgatttagttgattgcccactgattggtttaggattaaggaattcacctgtactggactttgctttgtgacctgtcttggtagcatctgcgctgtttgttgttggcgagagttcatttctaatgatattggcaggttccaagcttcttcgattgaacacagctggcggcgcttggatgtaatacttggcaatggtgcttgactgagctggccctccaggaaagtgattctctgagacaggcctttcgacagtccaattgtgtcctttttcatacgtattgcttgtttttttcgaattaacgaagacttcttcaagcaaaacaagtgtgttaggtattggaaatggctacaattgcatatataaatttacctggaatgatatttgtttggttgcatttaagtagcaagcataggcatctcgtaattgaccacagctctcataaagtatacccaggttggtccacgcggctttatggtctttatccagttgcacagcacatatgtaggcttgaagggcatccgtgggttgattttgttgctgatataagacgctagaagtgcatgtgtagaatacaaataagataggggccaagctaaacacattcattgttattttacccgattgagcaccaagtatcagcattcccctcacttttttccaccgagttgcgatatgctaggaaagcatcatgaaccttattgatgccggcgtaacaccttcctagtaaatataatgattgtccactctttgggtcagcttcgattgatttttgtagaaaatttaatgcgtttgcttcacgttcctttttttcgcctaggcattctacgcaatggtacatccatcctataaggattcaataaaaagttatgtctctaccagcttaaaatataactttttaacttacctaattgtcgataaacatctgctttgagctccaaggagatgtttttctcatttagaagaaattcgtagccatcctttgccgccttgtgcttgttttgaacttcgtacaaatgcgcgatttgaaatttgactgcaaagtattaataatgaataaagtttaagacacggggtgaacgtactgcaaaatatttaaattctgaatgaatcatagaagtttgccttcatcgtattacttgataattcaatgtatgaggactttttgcatataagttgtttatatatcaataataagataacattttaagatgataagtaaataactgaagaacagaaaaaccttttcagatcacagttttaattacacatgaaacttatatgcaaaagtttataattattcaatagatcttaccctgaagttccgaaaaggtcgaaggatatgtataaagcagcgccaattgtaaatgttttagggcaatatggaactccccgcagtgttttagcataagacctagacgcaaatgaacttcatttgcacatgtaaaattgggacttaggtataaaagctcctgaaacgatttgatggccctggaaaaaagtaagtaaattaatttttttattcgttgttctgaattatttgttataacttgaatgtattattttaatttattaaattttgttttatatttaatttatagtaattgtttacagtgagcggtgtttacataagtgcatacatacttatgtgcatgcagtcacgtacacacatgcacgcgtatgtacatacatacatacaaataaccatttgaacaaacaaattcaagtaacatacttaattaaactagaactccgatgataagtgcacaacagtaaacttaaatgttaatctcctaaaatatgcctgcaaaatgcaggttttgtttataaataacaatagaacttgcagccgtcgtgtcggcagacatgtctgcgtgcactcaaaaaaacgagacagaccgtttcatggctttttatcagatagaattgcactgagaatcattgattatttgcgtcggacgcggtctgcctaaatgttagctttcgaaattaataaaattaaacaaagaacacattttaccccgcaattcaactaacgaccttaaaggggggcactcattgcattttgtacacagacacacgcacacacacgcaccgtgtacatacatgcatgcatgtaacgagaatttatgtatttttataacagcgaatttgcaaaaacaaacaaaggaatacaatgaaaacacatatattcattttaatttttggcaatattacatcggtttaattattattattgtaagtgttaatgtttacagcatccatttgttttttttttctttagaacccagacaactatgaaaagattcaaaactaaccagtaaacgcactttttttattcgaaaaaatctcggcagtcttaattttaattcgttgtgaattgtttacaaatatatatataatattagtggcagtgttgtttcgtgtagaatctatttagtaaacaatttaatatcaatacaatagggatgtgacaggcgcgatatcgtgattaaatgggaacgatatgaaagcgaaacgtatacatcgataagagccatcgatgattacaattgataaataaatgtgcttccactgcacatgcatctacgtttaaacgattcatatcaaaatcgcatgtaatgggttttaattattaaatataacttaattgtttttgaacgtagcataaagatatttcttaaatacaacaaatatatttaagcagttaaaatattaaaaagataagtaaacttaccatttaaagcaccgaagtttaaaataagcaacgcctattccatagataaatgcatgatttgtccagtaattgttttctcggaatcttaaatacttttggtacgctgataaagctacaaaaagaataagatattaaaaaacaactcaattctttcaggatctctcgtgatggattgaagtgttatgttatttatgcgtcgtactctgcagtttagcagtatttaatgttaaagtgtgtcattaatgcggcattctacaactatgttcccgagtttggaaacaattgttccacctgacacattatgtaaggtaaaagaaccagatattcacaatatatgaatttgtgaggactacaagcatcctatatatcctatagatgtcatttgcagagtgcactgattgtatctggacatgtgcatctggatttatgtatttaccttcggagtattcgccaagaagaagatgcaggtggccaagtttgcaaagagcgttaacgtagtgttcatcctggtgtttttcttcaatgatggacaccttttccttggcatcttgctcgaaaggtttggtgtcgtcattgtttcgggaagatgtgttttccatatgttcacctgcttgagttgatggctcaaacttttgtatagcatttttattatcactgctgttctttgattcgtgaacctgaccatttgcaatgtagttttgtaagtttgtgatggt

SEQ ID NO: 27014 - DNA, 3088 bp, DROSOPHILA
attaaattgtttactaaatagattctacacgaaacaacactgccactaatattatatatatatttgtaaacaattcacaacgaattaaaattaagactgccgagattttttcgaataaaaaaagtgcgtttactgggccatcaaatcgtttcaggagcttttatacctaagtcccaattttacatgtgcaaatgaagttcatttgcgtctaggtcttatgctaaaacactgcggggagttccatattgccctaaaacatttacaattggcgctgctttatacatatccttcgaccttttcggaacttcaggtcaaatttcaaatcgcgcatttgtacgaagttcaaaacaagcacaaggcggcaaaggatggctacgaatttcttctaaatgagaaaaacatctccttggagctcaaagcagatgtttatcgacaattaggatggatgtaccattgcgtagaatgcctaggcgaaaaaaaggaacgtgaagcaaacgcattaaattttctacaaaaatcaatcgaagctgacccaaagagtggacaatcattatatttactaggaaggtgttacgccggcatcaataaggttcatgatgctttcctagcatatcgcaactcggtggaaaaaagtgaggggaatgctgatacttggtgctcaatcggcgtcttatatcagcaacaaaatcaacccacggatgcccttcaagcctacatatgtgctgtgcaactggataaagaccataaagccgcgtggaccaacctgggtatactttatgagagctgtggtcaattacgagatgcctatgcttgctacttaaatgcaaccaaacaaatatcattccaggtaaatttatatatgcaattgtagccatttccaatacctaacacacttgttttgcttgaagaagtcttcgttaattcgaaaaaaacaagcaatacgtatgaaaaaggacacaattggactgtcgaaaggcctgtctcagagaatcactttcctggagggccagctcagtcaagcaccattgccaagtattacatccaagcgccgccagctgtgttcaatcgaagaagcttggaacctgccaatatcattagaaatgaactctcgccaacaacaaacagcgcagatgctaccaagacaggtcacaaagcaaagtccagtacagggaccgccaccaccttatccgcatagccaactcagccaaagtcccataccttcgaaacgtattaaggaagatggcacaagccaacaagaagtaacacaaaacaacagtcagacatcagcgcaaaatctaataaacatttcggaatctttaaaccagcgcaacttcaacgccatgccggagagcaacaaaagttcggagcaaagtgttcttgacaccttcgacgacatctcgaatgatatttataaacagaatgagagcatcaagctcgaacgtttgagccaggatgcactgagtaacaatgaggactcgaggcatgattttattggcggtgacaacgccgacatctcgaccacgttcaaaatacaaatggactcgaagcagttgatggtagctgtgaagctgctgccgattgatgaaccgcccgtgcactgtaccattttgcaagtgaatgcgccgccgccatctccgcccgattgcccaccgcagaaactgacgcgagatcaactcctgcctcccacaccctctgttcatttagaaaataagaagcacgcgttcagcccacagttgcaggactagatctcggtctcttttcgaccaaaacgttggtggaagccaacccggaccatagtgttgaggttcggacacaagtgcaccagtctcccgatgaaaattgggacacttcgcagggtaagcgcgtctgggcctgcatttcccatcggtctcacacaaccatagccaaatatgcccaatatcaggcatccagttttcaagacagcttgaaggatgaaagcgataaaggtttccccggctcgcaagcaatgtcggattcagactcaaaggactcggtatccaattcgaacattgttctcaaacgtaaaaaacacaaaataaacagcaaaatgttgaggttcgggaccaacgtggacctctccgatgaaaagaaatggaaaccacaattaacagagctacaaaaactgccagcttttgcgcgagttatatccgctgccaatatgctatcacacgtgggccacgtcattttgggcatgaacaccgttcagctgtacatgaaggtgcccggaagtaggacgcctggccaccaagagaacaacaacttctgctcaatcaacatcaacatcggtcctggcgactgtgaatggtttgccgtccctgacgcctactggggcggagttcacaatctttgcgagaagaacaacattagctatctgcacggctcgtggtggcccgtcctggaggatttatacaaggagaatataccagtttatagatttatacaaaagcccggtgacttggtttgggtgaatgccggatgcgtccattgggttcagtcgatcggttggtgcaacaacattgcgtggaatgttggacccttgactgcccgtcagtattctcttgccatcgagcgatatgagtggaataaagtgcaggccttcaagagcattgtgccgatggtgcatttaagctggaatcttgcaaggaatattaaagtgtctgataccaaacttttcgagctgataaaaatgtgtttgctgcaaacgttgaaaaacgtattgcacatacaagagtatgtcaaatcgaaaggtgtggaaatacgtttcaatggacgcggaaagaacgaagcatcccattactgcggacaatgcgaggttgaggttttcaatgtgctgttcatcaaggagcaggagaaacgacatgtggtccactgcctatcgtgcgcgctgaagctatctccgtcgctccagggaatcgtttgcctggaggagtatcgtctgtctgagctgcagcgcgtgtacgattcgtttactttacacagaacccaaggactagcatacactcagtagttgtaatacgaggaatcattttaagtaatgcagatttaatatatgtatattttacaacgt

SEQ ID NO: 27015 - protein, 217 aa, DROSOPHILA
MLKHCGEFHIALKHLQLALLYTYPSTFSELQVKFQIAHLYEVQNKHKAAKDGYEFLLNEKNISLELKADVYRQLGWMYHCVECLGEKKEREANALNFLQKSIEADPKSGQSLYLLGRCYAGINKVHDAFLAYRNSVEKSEGNADTWCSIGVLYQQQNQPTDALQAYICAVQLDKDHKAAWTNLGILYESCGQLRDAYACYLNATKQISFQVNLYMQL

SEQ ID NO: 27016 - DNA, 3379 bp, DROSOPHILA
cggatccggcaattaactcccttttgcgaacggaaatagaaagagccctcaagcaaaacatgcccagtggcaccatacaaaatacgttaaacaaattcaaggccagcaaagtgcaactaaagaagtaccgactcgacatcaagtacaaaagaaacgtgtacctcatatgcattttctataccgacaacttttctggcgttaaaatggatgcgacaccgatgatcaaaaaagccgggtaatatctcaatttgcatcattttgttggatataatttacctatgagatttttagaggcgaattcatggatgttggaagcctattcgaggattttggattgattgaaactcgctatgatactgcgaaacttcaaaatgaatccagtttggaggataaagccaccaatgatgctatagagttgggcgccgaagagatcgaagtcgttgacaatgtcgatggctccgtcaatgtatgttttcttttttttcatttatattatataaatattaattttcctacatttacatacagttcctatgcagtccagtggttttaactagcttaagtaggaacttggaaaaagccggatacaccgtggaaaacagtgaacacatattttcaccaatggtaaatcattcatttcattcaatttcattttatctaaatagtattatctttcagaatgtagtgcaattatcacccgaagagcaaaagacctatgatgtttttgtagaaaaactgagaaacctcccaggcttagaggatatctatgacaatgtggaacaaaaatgacttgttgaataaaacgttgagtttaaacttgaataaataaatttgtttctaactgattaagatacactgttaagtaacagagtgtgcaattttcagtgttcccgtttcagcgctaaacgtttctgttattttaaagcttatgtaaactggctggaatacccttgacgatctaaaatccagctgtttgtgtgcggccaaaccaatacatgtggaatcaaaatcatcggtcgaaattgaaaatatgaattatttaagagtaattcggaataattggaagaaatgcacgttcggagcggcagtatctgtgtacgcgctgcaagcgctgaaaactcacatcgagtatgcattcagaaaaccgtgaaaatttgacgcaactttaacccccttatttgctctccaggattgaacaacatatgcgggaattcgcctccaacattcaggccaactggatatcggatcgccccaaaaaggtactggtggtcatgaatccggtggccaacaagaagagatcggagaagtttgtaagtagctggcacacagctgactaagatgataacccagccatagattttcagtttaagaactactgcgagccggttttgcatttagctggatattcggtggagatccttcggacgaatcacattggtcatgccaaaacctacgtggaggagttggcaacgctacccgatgccattgttgttgccggcggcgacggcacctcatcggaggtggtcactgggctgatgcgtaggcgcggcaatctctgcccgatcaccatccttccgctgggacgttcggtgcagtccgcatccaagcgcatcaacatctttggcgtcaaggacgtcgactatgtgaaaagtctttcgaaagcccttgaacctatgctcaaggatgagagccagtaccagagtgtgatccgctttgatgtgatcaatgaagaagatggcagcaatagccaattgaagcccatattcggtcttaatggtctgtcctggggtctgctggaggacatcgatgcggcaaaggataagtactggtactttggaccactgcgacactacgcttccgctgcgtccaagtcctttgccgataactggagccttaagaccgactatgtgtacacaccgccgtgtcctggctgcgttgactgtgctgctactgtgcagcgccaggagaccgcccagccttctggcctcttcaccagaggcctcattaagtacaagaataatccgggtgaaaccaagaggccgctcgtcaagaacgacaattgcagcaagaagttcgagggaagcgctgaagccagccagattaacatcaattgtgttcagaacaaggataactttgcggagctggaaagtcagtttataagctccctgcagccgggctgggagtttatcaaacaaattccggaagtcacgtgcagcaaaattttacccagcttggtggttaagagcaggactattcaactgcatccggatggtgaaatgggcgagaagttttactccatcgatggcgaggagtacgatgcaagacccattaaggtatctgttgttcccaatgctattaaagttttttgttgacattttaaacgtgtatattaattaaatcttgattaaatggcgctactagtatagcataacacattcacagcaaaagttaaccgctatttcttcccaaatccagagctgcgtataatcattctcaaacttctctgcggtgatcaaaatcaatttatcgtttattcgaatgcatgagccagttttacggcgcagtacttttattgtaaatgattttggcttgcaattaaagtgatcataccaacattttctggcaatacactcgatcgaacggatatagcgtggaaagtaatttaagcctaagtcaatccagttgatcttcgacgagcactcccacggccgctgcttgaacccatcgattctcggatgtcccacacgatccatgaaggcgcttctcgtgcgcagactcttgctcctcggtgcctccttcttcttctctaccagcgcaaagtggttggtctcccaggcgggaaagtggctaaccgaaatcgcatcactgtccgcatagaagggcagctcgtacgacgatcgcttgtatcccagatgatagctcttctcctcgggctcgcccggcggatcgatgctcatgtagcgcggattaaatgcctgtcccagaattttggccagcgactgcgtggatagctcggcgcagtaatcggcatcatcttgagccgtccccagcactgccaaccaagtgagcacaatggccagttcactttgggatttcatagttggacacagtatacgcagaaacatggctggctaaaaacagggctacaccaatatcaaccaattgatttatcgtgtttacagcagttatcgttgctctctacactgtaacttatttaggtactaaagtaataacagccaattcaataaaaagaaggattttaatttcagtgtcattgcgaaagattataaattaaatttattcatatatataattaaaacgcattctaaactttggataaatttaaagtttttttttttaaattaaactataaaagatg

SEQ ID NO: 27017 - DNA, 1258 bp, DROSOPHILA
gaatcaaaatcatcggtcgaaattgaaaatatgaattatttaagagtaattcggaataattggaagaaatgcacgttcggagcggcagtatctgtgtacgcgctgcaagcgctgaaaactcacatcgagattgaacaacatatgcgggaattcgcctccaacattcaggccaactggatatcggatcgccccaaaaaggtactggtggtcatgaatccggtggccaacaagaagagatcggagaagtttaactactgcgagccggttttgcatttagctggatattcggtggagatccttcggacgaatcacattggtcatgccaaaacctacgtggaggagttggcaacgctacccgatgccattgttgttgccggcggcgacggcacctcatcggaggtggtcactgggctgatgcgtaggcgcggcaatctctgcccgatcaccatccttccgctgggacgttcggtgcagtccgcatccaagcgcatcaacatctttggcgtcaaggacgtcgactatgtgaaaagtctttcgaaagcccttgaacctatgctcaaggatgagagccagtaccagagtgtgatccgctttgatgtgatcaatgaagaagatggcagcaatagccaattgaagcccatattcggtcttaatggtctgtcctggggtctgctggaggacatcgatgcggcaaaggataagtactggtactttggaccactgcgacactacgcttccgctgcgtccaagtcctttgccgataactggagccttaagaccgactatgtgtacacaccgccgtgtcctggctgcgttgactgtgctgctactgtgcagcgccaggagaccgcccagccttctggcctcttcaccagaggcctcattaagtacaagaataatccgggtgaaaccaagaggccgctcgtcaagaacgacaattgcagcaagaagttcgagggaagcgctgaagccagccagattaacatcaattgtgttcagaacaaggataactttgcggagctggaaagtcagtttataagctccctgcagccgggctgggagtttatcaaacaaattccggaagtcacgtgcagcaaaattttacccagcttggtggttaagagcaggactattcaactgcatccggatggtgaaatgggcgagaagttttactccatcgatggcgaggagtacgatgcaagacccattaaggtatctgttgttcccaatgctattaaagttttttgttgacatttta

SEQ ID NO: 27018 - protein, 406 aa, DROSOPHILA
MNYLRVIRNNWKKCTFGAAVSVYALQALKTHIEIEQHMREFASNIQANWISDRPKKVLVVMNPVANKKRSEKFNYCEPVLHLAGYSVEILRTNHIGHAKTYVEELATLPDAIVVAGGDGTSSEVVTGLMRRRGNLCPITILPLGRSVQSASKRINIFGVKDVDYVKSLSKALEPMLKDESQYQSVIRFDVINEEDGSNSQLKPIFGLNGLSWGLLEDIDAAKDKYWYFGPLRHYASAASKSFADNWSLKTDYVYTPPCPGCVDCAATVQRQETAQPSGLFTRGLIKYKNNPGETKRPLVKNDNCSKKFEGSAEASQININCVQNKDNFAELESQFISSLQPGWEFIKQIPEVTCSKILPSLVVKSRTIQLHPDGEMGEKFYSIDGEEYDARPIKVSVVPNAIKVFC

SEQ ID NO: 27019 - DNA, 30889 bp, DROSOPHILA
ttcgctttggcacgattattaccgctgcagttctcctttttcctttgagctccttttccctctgccgctgtcggcgtctctgcttgcctgccctctcactcgctccttttgcctacttggcaatttcataacgtgcccccaaacgagagagagcgagagagttcgacgctcaactctcgctcgctcgctccatccctctcgctctggcagcaacttcgtttgctggtcggccgtgctgttagcgagagataaagagagcgcaaaatgagcgccagcagcgaggcgtcgttttcgagggtcgctcagtcaccgtcacatttgcgtcgtttcattcggtttcgtgcgctcggggattttgtttggttctctgctctgtgcggcagatcgcgaggcaacgcgtgcggtttgctggctaaattctacatatacacattcaacatccgacggccgaagcggagctagaataggaaaaccaacctttgcagtgctaattatttacaacacaacagtaagtgtgtggtgtgtggaaataaagcagcataatcgcgagcgggagaggttgtgaaatagcgcccatatctatatgatgggtgcctttgttggctggtgtgcgtgtgtgtttgtgagcttctaatgaaaaacgttctatttttaaatgcgcacaccataaaaaactgaaacgattgctccacacttcaactttaaaaattatcagtcaacgagtgccagtgtgttggtgtttatgatgacggggggaaaatgaaaatcatcataaatattcgtctgtgtctacttgtgaaattttccacaacgaagaaaaaggaaacgagaaaaaaaaaacccagacaccacaaatatatgtgtttgcgctgcagcgacgccgactgcgaaacttcccctctttatgtttcatgcttcgtttttttttcttccatttcattttttcggtcgtcacgaagtctcttcggcttttatcgtgtccatcgatctccaacactaaacacccgcagtcgggaagcagaagcagcagcaactgtaacacaaatccgttagctctctctttacgcgagagcgtgattagtgtagggaaagagcaaagttgaaaaattaacaagaagcagaaactcgctaggaaatttaaaaaaataactgcacttcgctgttgaaaatttgcatacaagtatgtcgctgtgggtgtttatttgaggatgtatgtgtgtatgtgcaaaggctaagcaacaataataatctagctgaaatttcaagcgcgcaaaagagatgaaagatattgttattgctgcgctgaaattaaacatgaacttgaccttgggccgcattgcgagttttttgcgttactaattttgttttctgtcttctttctctttgcagcataactgctgacacactaaacaaaactgaaaaaagaaccaagggcgaaagctgtttattttgtttaggcacctaagtttggccaaattataatcaaaaaacgagtggcgaaaaaaacagcaagtcagagagagcgctcgacgttcggccccaaggtcgtgggcccaaacccccaggatccatttccaacaaccccatccaaccacccgagaaaccagaatggatgacgatcagcagttttgtttgcggtggaacaaccaccagagcacactgatcagcgtgttcgacacgttgctggagaacgagactctagtcgattgcacgctagccgccgagggcaaatttctcaaggcccacaaggtggtgctgtcagcatgcagtccctactttgctgtaagtgttaccaaattcatagtttcggaaaactctgttaacactaaaaatacacttttttcagaccttactacaagaacagtacgacaaacatcccatctttatactcaaggatgtcaagtaccaagagctgcgcgccatgatggactacatgtaccgcggcgaggtcaatatctcgcaggatcagctggccgctctgctcaaggccgccgaatcgcttcagatcaagggcctttcggacaatcgcactggcggcggagtagctcccaagccagagtcctccggccatcatcgcggcggtaagctgagcggtgcctacacactggagcaaactaagcgggctcgactggccaccggcggagcgatggatacgtctggcgatgtgtccggttcgcgcgagggctcctcgagtccgtcgcgtcgtcgccgaaaagtccgacgtcgcagcatggagaatggtgagttgtcaagcgattaggattatcttacatatttgccgaatataaaaaaaagttccaatgcgggaatgttcttcaaacgaaattagcgttaatcaaaaatcttcaatttggcacaattaataaattgaaattgctttgctaataatatatttatgcaacacaacaaaatttcctcctaagtacaaacttatttattaaaattgttcttatttttttgcagatgcccacgacaactcaaactcgtccgtgttacaagccgccgcctcgaatcagtcaatcctccagcagacaggggccggtttggccgtctccgctttggtcaccacccagttgtccagcggaccggcagccggaaccagcagccaagcgtcgtcgacccaacaacagcagccattgaccagcaccaacgttaccaaaaagactgaaagcgctaaactaacatcctcgacagccgccccagcgagcggagcatctgcgtcagcggctgtacaacaggcccatctgcatcagcagcaggcgcagaccacaagcgatgccattaacaccgagaatgtacaagcccagagccaaggtggcgcccaaggcgtccaaggcgatgacgaggacattgatgagggtagtgccgttggcggaccaaactcggccaccggacccaatcccgcctccgcctctgcatccgccgtccatgccggagttgtggtaaagcagctggccagcgttgtggacaaatcgtcgtcgaatcacaaacataagatcaaagacaacagcgtgtcatcagtgggctccgaaatggttattgaacccaaagccgaatacgatgacgatgcgcacgatgagaatgttgaggatttgacactggacgaggaggacatgacaatggaggagctggaccagacggccggcaccagccagggtggcgaaggatctagtcaaagtgagtttgcattctaatcttcttgtttccttacaactaatggttggtttttttcaaatagcatatgcaacatggcagcacgacagatctcaggatgaacttggactaatggcacaggatgcacagcaacgggatccccaaggtgagtgtttgttgcctctgaaatcgataatatgagctatgaacaaatgaaaaagcaaaaagtatagcttagcctagaagtattagatgagatgttttttcgaatcagcgagcacgacaaacaacaagcttaaattcaaatgcagattaaagattgaaatccaacttttcaaggtcacaactccatttttttcacacaaacatttaaatatacaaatttatttttgcccattttaatgtacactacaacaaaagtcgtgctccgaaaaaaagctctaaaacgttgaagaagaaaaaagatgaaaaagtcgtagaatttgttcaaatatgattttcaacaagatagcagacgaaaaaagcaagcaacaagaaaaagtacaaatacaaacccaaaataacaagatttgtgagcgagagtttggcgcagagaaaaaaaaaacaatatgaaaaacagcaaaattaataacgaagagcaacaatttacgactcttatttgagtttttttttaatgagagcatttgaaatgctggttttgataattttttgtttttgcctgcgtcgctcatttcgccacagataaattaacccgaaacaagaataatttgtgcaagttgaaagtattacttaaaaactctttctttacttaatatgattttttacgaaactaatatttttttaattatgacacacataattcgtataactagtaatctttttttgtacatatctattataattaatttttaacacacacacacacttttgaaaagaaaatgagaaacatttaccactcacacaccacaaacatatataattgctatataccacaaaacccaaccaccaaccatcccctaacattctcattttatcattatctatatatatgtatgattccatgtatgatcatttgttgttgaattttcgtaatacgtttcattacaattggtgtttgattaactcttaattttgctttattttatcttaccgtatatataaatcgcataattctacattcccaacatttttagttgctcgccctatctatcttccttccccacctgtattcccctctttccgacattatgccgttagctgcagagtaatgaaacaggaaatataaattgaaagtatttttcataataattcataaaccatggtcacactgactcacccacaaacacacaaccacccacactgcagctttgacctaggcagaaatctcgaagaaatgcccttatcttttaagttagcgtttaaacttacgtatcaacagtgttctatttgtgtgcgttgtgatctctctcgctcgctattttcccctctgtaagctgtttgtgtgcgtgtgtcattgtgtgtatagtgcgtgtgtgtgagtgtgcagggctccgtccacatgtattttcccttcacaaagaaagctctctcacagtacagtcgcgtcaaaagattgcaaagtttggccacacttccagcatttctagcaaaactcgattatgtttgttcgccttaactttgtttgcattttcaaagcatatcacaccacacccgagaactttcgcaaacaaacacatttaatctttcatttgtcatactatactttgtgccattccattttgattttcctctactttagaactctcagcgcgtgctaatgttttttacacatattttttactttacatattattacgaaaatacgcatgcagttttaaattgtattttagtactatctctatatatacatatatattttgctttattttggttgacgggactttttttgattgtttatttttcttacggatttgtttttagttttaaagctagattgtaagcttttccgatgcaagtaacgcgcgcgaaactttcttacgcgtttttacattttgtaagtttgggaattctttttcccatgacttcagatgtacgtcgttgttaaaaactttaaaaaaccctttattaagttaagtgaaaagtgaaaaaataagctagaggaccgcacggatggaacctggtactgaaggatcgccgcttttggaggaggaccagctgccgaaggtctcaagtcgttgccaaaacaaagcacgtaaccatccaagatggtgaggtacacttgcagctttgggtaacttgacgagatccaactgtagtcaaccatccaactgcgtcacggaaatctcaggtgcgtgcccaggtgagtatgctccgcccaacggtatcggttgggcgaagtgaaatacaagaatgaagtaaatttattattttaagttcatttttgtttgactccgaaaatatcctatcctatcgacccttcctttaatcctccaagtattaccaattatccgccttcccagatcaacattcatacctcatagaaaccaaaatcattttacagcgattccaggtaatgtgttatataaaaaaatatctacaagcgctctttcttcaaaaaaagaaaaaaaaaaaaaacaaaaaaaagagtcgatggacttccagggtaagctatagtgtaacttccagtctctactcttccgaattatttctaagtgtacaccttaaatttacattgtatatatatttttcttaaaatttcattttgcgtttggcgtttgtttgttttacaaaatagcttgaagcgttgccaaacaaacaccaaacaccgaaaaatacattctcgcaagaaattccaccgatccttacatacatatccatatagacaacactgcaacgttgcatttctacatttatcctgtttgcgaaatcaatgaaaagaaaaatcagaggaaaagaaaatgatgagtcactaaataacttagtaaattcatggatcgtttgatgttttttgttgaaagatccatttgtgcaagatatatgtggtatgaaaaactaggttatatattattagttttaaaacactttctataactgttccgaaggtatataatccatccacctttgatctttctgaagcaaaaaatcatggggtttccctaatcgtttcttgatggtcaataaaagcaagtaattcttaaaaagctttaaaagcttttccccccttctatgtttcactcttttggttaatctcttctgtgacaatcttgtttgcccaattaatttataaactctttgcttcgctgtgaggtatttaaaaagaatatcttattttaatgtacacgaaactgtggttcagcttctatatcctattctaaccaccctcttttacctgccctctctttctacgttcgttcttttaattgttaatcagaaagaacaacaatgcccgaagcattcgttcaagttcaaggtcggctaaattataatgtgtttctatgtgtgtgaggttgtgaattttttctttaatcagcattgttcacatgaacgcgcggggtgggtgtgatgaagcggtaatattaatgtttccttcgcgcttgctatttttaaaattttgttctgcatccgtgtaaagtcaataacgatacgatgcgattctgcttgggcaattaaagctaatggttgcataaataatcaagtttgggatttttcgatgagaatttcttcacacgcagaaagtttttgactggtgtgtgagatagtggctcgcaaaccagctttattcgcgatactttagatagagtgcgtcattatgacgggaatttataatcttgcatgacttgaggttgtataaccaaagtatccgttggtagagagagtcgttattagggtcttgatttcacttgattcaatgctgcatcacaactgttgggttactggaaacttcttttgcttaaatgcttcgcactatttgcacattagtaatatgatagaagactagtgtagtagatagatagattagatagttgcctgatgacctgattttaccaaaataaattgaaaatttcgctttcaacgccaaccccctcatatccctccctatttctggttttggcccagttgaaagctgttcgcatggccttgacccaatttgcacaggcacattgcatacatacgcaaaacaggcaaagtcgccagataatatttttgttatttttttgtgtaacctgcaatgggcccaaagcttttatcacatcacgcaaacctcaagcgcaaaaacaaattatttacttgcagtccttgctttttgtttcgtttatgtgtgtgaatgttttgggggaaatttaaacgtttttatatatgtatccttggatccgcattttaatatagtttatgtgcaagaatttattctcaccttaagttggttgtagttggattatgtatcttatttgtacttcttaacctctcttgcgctcattccttttccatatttgttattatccttgaatttagattagatatatcgaatgataggacagaatagagctttttttcttcgtcaaaaacggcttaaagtagaattaaactggacttttgtatataaagcataaacaaatctagaaaacatttaacctaaataaaaacttaattaggaaaagggtttttaagtttgttggattgttaatgcttctgtgttgcgtgtcgcttaattaatgtgctgctttgtgaactttattcaaaaacgattttttttaaatcgatgaaaggatttgaaagtggaaaattttcttaaactacaatgcaaaagtataacaaaatttggatttaaatgtatttccttctagaagctaatgtttgtcagtgagaggttttgcatacacagtttgttctttcatttgtttttggtttcggagtcaatttctctgtgtctcaatctcaaaactctctgtcccctattcgcatttgaaatattggtccattggttgcagactcaatggttgtgcccaaaatcaccgcggtgcgcggtagctcgaagcgtctggccagaagaaaggctaccctagccatcgctacggcgatggccacttccgccagtgcaacgcacatgatgtccaggcgtaagcgcacctcttcatcgtgcaggtaaattttgataggcggattggcgcttggattctttcatgatgaatctgtaacccaaaaaagccgatgatgaaatttccgtttcctctagaaatgccagcagcggtggaaatgctccctccacatccacaagcgcatcatcggctaccaccgcatccatatcgaaatcgaaatgcaaatcgtcagatgcggcgagtgctcccttcgtgtgccagacgtgtggacgtcgctaccaagtccttggcactttgaggcgtcacatgcgcaaagagtgcaatcagccgaagaagtatgtgtgccgcatgtgcgaacgtcgtttccactataatttcaagctgcaagatcactactactatgtgcacaagggcgtccaaaagagggaatagttcagtttataaggataaaagtgtaaccgatgtaaaacacccgtactttaaactcatattagaacacaacacacactcaacataaaactggaataaacttgggttagattttcaatctgtggttcttctgtatctcagatcgtggctaagtgcaagttgagtggaccaggtggagtagttagaagtgcattcgattgtgtgattgaagggatttcagtgttgccagcaaactattttatgtacctaatagacaagacaaacaattcatgtagacgcgagatttaattatttaagaattacaattatcgataacctacctagagacaattttgtttagtgcatttcttaattgggcatgatgtgtcatgacatgactcgtagatgtagactgaatgttagatgttgtagtttagctaatagacttcaatgagtattacattacattctctgatcattggaaactacattgcttaaaactgggaatttgagagtaatctttagcgattgatctagaaattgataaaatttgtaaaacattttcaaactatggctaaacaaaaataattagggaaaatgtacgctattgctataagtatgtttattattccagacagtttcatttcgttaataagtcgcatagacagtcaggtttgatcttgatagtgaagttggcaacactgtgattttcgaagtttgtttgtttgaaatataaagctttgtctgtcgattgctcgctttttccattctgttctctgttttcctggcttttatgtgttttgtttctctatctcctgtttgctcaaacatttaattgcaggtctgctcgaattgagtttgaatcaaatgttttactatgacagcgaaatgccgccgccaccgataccgccacccgtggtcgttgaatcgccgccagcttcgccaccacttgcagtggttacacctgtggtgcaactgcgacgtggaaagctgcgatcgcggagaaggaaggcggcaaacagtagtaacagcaccacgaagaagagcattccaccgccaacggtgcggagcagctcggcggcgaatctggcgagaaacgcggatatgcgggacgatggcaagctccagtgtccacagtgtccgaacgcctacaccaggttatccgcattgaaacggcacctggagttcgagtgcggtatgctggagaacttccggtgtcaggtttgcgatgctggatttaagcgcaaggactcgcttaatcggcattgcaaggtcaagaagcacaataccaaatatttgttttagactgatcaaaaaagccattaaaaacgttaagataacgatgccaatttatgaattaccctgctgggaactcttttcttcaattttgactcgacttctttctcgcgtgtcccatgatcaaccaccatataaagccatatgatatctgtatatgttatatatttttgcttgctcaaaaacagatccacacacttacattttctctccatataagctcccttttttcataaatcacacacccaaacaaacaacacaccaacaaaggggcaatcctttttctcgtgatgaggtatctgtcttttctctcaatcccaacccacctttcaacgtcttgcgccacctgagattaatctaatctttaacctaacgcccgctctccttcccttttattttgccatgctgctgtgcaattgtttttttttatacctatatgcctgtttgaaatttgtttttgtttaatgccgagcagaaattaatttattaatttaccacgaaacaaaaataataatgctttcgaaactaatctggcattttgaaaaactaaaaaataacaaattgcttgttttgccttgaaaaataaacaaactaaacgaaaccaaatcttaaccttcgataatgaagtattgaacgcatgatttaccaaaaaaaaaaaaaataacgtttaattaacgttttaaaaacagaaaatcgaaaggaaaattatagaaaacagaattcgaaactgagaaaatatgaaaataccaaacgaaaaacaaaaacaaatttcaggcctgcagctgatagacgactcatcctcaagccaacagaatcatctaaatggcagcaagctggagctgatggatggcagcagcgatgactatcaccagggatcgggatccttgcatcacttccatgcaccgcaatttgatcattttcaaggattattagccggcggaaatagtgtagttggcggagcaggaaatgggggtcaggaggagagctttacgtgcccacagtgttatagaacttatcgaaggcacggaaccttgcggcggcacctgcgccaggagtgcggcaagggaaagagcatggtgtgctccgtctgcggtcatcgcacgaagcgggcagatcatctgcgccagcatgtacgaaaaaagcatccggagatagccatgcgatcgttgtttaagcgtcagcaaagagctgcagctgcggcagcctcagccgtcgaaggagaggatcagaagcccgagacggaaattgtagatctggtggacatgctggacgatggatctgtggccgctgcggatgaggatcatcagcacgcctatctagtcgaagatgacgatgaggatgaactcccgcagcatcagcaatcacaattgacaacggaggagtcgaccaccagtaactattaccggcagcaactgcggcagcaggcccttctacagcaggctcttcagcaagtggcagctgcagctgcagtggtggccagcggcaactccactacctccaccactgaactgcttaacggggagggattgtaggagggatagcaatttgaactgaggggcgggttctcctctctacctccatttcgagtaaaagacgcgtaaagaacgctatccatcctgtccaatgaaaatctctactactaactaaattaaccaaagagcagcggttgaactttgaccttttggcttgcaaaattttttatttttcctgcatttatatgatgtttaatacatttatttggctgtcgcacaaccaaaatatatgagtatttctttttccagcgctaaatcaaaaagttgagaactaatcaaataatattacaaaaaaaaagtatatatatatattttgtataaaataaaaaaaaaggagaaagctattaactaaaaataaatgcaacgttttttataaaccaaaccacaacaaatgcgtttttcaattgatgcatgaaacgaatacgaaaaagttgagacacagtttcaattgtaatttaatttcttgataattttttggtaaataacattttctcgaacatttcgttggtgccaaagttgattatttttgtgtttacctttaagtttaacttaagttttaactgcggcaaaatgtatatccatgtaatggcggcgtcggttaacctaatccacattatatattacataatacaaagcgtagttataagccaaacaaccaacaacacactgtaaaaaatgatacccaaccaaaccccaatcaaaacaaagaaaaaaaaaatgaaagaaaaaataatagaacagcgaggacacaacacgaacatatccacacaacaccacccgccatatctctatttctcaactcaactactccttactttgactctctctctctctctgtactctctgtaagaatcgttaaacagtctcagcaaatcttagacaaaaacccaatcacaattcttacagatttaaggacgctttactgtaattatgccacggcagttatagcagcggccagtgcggccagcaagaagccggcggagcatcagaccgcagccagcagcacagcaaaccaccagaaccagaacctcaaccatcagaacttgctgcagcagcatcacagcaacagcagtagcaatagcaactgtggtcctgctgctgagatatgcgagccagaagtaacgatacgcagaatgttcaaatgtggaaactctggccaggcggaggccattgtgaaccacttgcaaatgaccggtcaacagcaccagcagctccattgcaacgtcagcaactgcagtggttgtcacatgtctgcggcagcagcctcctttcagttggccaatctgctgaatagcggcatacgttcgtcgtctaccagcaaaccgcaacgtaatcacatttctgccagcggcaacacaagcagcagcagcaacgccaacaccaacaacaacagtagcggcaatagcagcttatccttggcggccaaaaagaccagtgttcaatttcattgcgagttctgcaactttagctgttcgtggcgatacgatttgaagttgcaccttaggcagaagcacggcattcatcagctgaagaaagtctaggatttaggcggaatgtgattccaagatcgagatcaaattggctgttatacatctacataaaacatgcttattctagttaagaaacgttgtttaatctcgctctattgttctgtgtctctgctaagtcaatatctgaagttaaatatatgtgtacgaatatttattgaaatgaaagttgattttttatcaccgatataaatttttaaataatgtattttttttagagcgaatgatgccagaattaccataacgtttggagaccaacaacaccagacctcaagtacaacccctttaggaaaaaatattgaaaaaaaaaaaaacaaaatgtttgataaaaattcaattgtataatttttaaaacaaagttttaaacttttaggtttttattaaatttataaggtttaacctttaaaagttttgtttacaatttctaacaattaaatctgataagtatttgaaattcgttatttaataggtatttttaatcttattttatgtatttttgttatagaaagtattttaaatgtatttattttaattattgttttccttgaaaattgtttagcgtagcctcttcagtagtttatgttgataatgaattagtatcattatgtaaacttgattttagacattgaattgtataatttgtattagttttccttcaacttctcaaaacaaatgcaacaaaattttacatttaagtttagttttaagttaagttctcataaacaaaattgaaagcgaacatttgagtcttgtttatgccaatcgattaccattaagcctaattcttggaccttgtttatgatttttcacacatgtttctttttattttcttttcattttcatttcatacaacccccacaaaacatcaaaaccaaaaaccgatcaaatcgaatcgaaacgactttaatcttcccaaatcacaaataatcaaacccgaaaccaccgacatcatcaccaaaaccacacaaatacacatcattcacatcacatcataacacaccacaccactaactaccgatcgccgggattcgatttggttcgaacccaccagacctgaagtacgactacaagcacagcatttttggcagcgatgatgcggatcaggatcaatacaaggagcgtttccactgcgccgtctgcaacaagagttatctccgcaagcgccatctgcagcgccatatgcgcgatgaatgcattggcattccgccacgattcaattgcgagttttgcagctctcgattccgtcgcaagtaccacatggtgcgccatttggtctccaagcacggtattccgccggcaattgcacagatgacaacgggcagtggttcgcgttcctctatcagcggctcgctagacctaaagtctggcggcggattagctggtcttcagcagatgggtggtggcggcgccggaggcggcggctctaccggtgattgtggggcaagtgtgggcagtgctggatcccataatggctgcgagagtcccataccagagaacctgtcgctgcgcaaggagaactacgaaaacgagaatctttcgggctcgcggtgcacttcgccactgccaccgcacattatgccgatacccacgtatgggttgacaggtgccatcactgcgatctctgccgcagcagccgtggtcgaggagcaagcagcggcagcagcagcagctgcggccatcgctgaggctcaagccaagaacaacaatgaatccggaggaggaagatccgaagtcgatgacgaagacgagacattggccgcacaagccgaggctgtcgcagctctcggcatcaagccggaaccggtgacgcccagcaaggtgcagcacctgatgaacgaggagtggaacatgaagctgggcctacagatcatatcgaattcattgctcaaggagcgattgatgaacactatgccatttgcttataacaacaactaaagctctttctagctatttatattatttattgaaacgtaaagaatctctcaatttttttaatttgtcaagagccaaggctctgcgtatttgcatactgtattcatacgttttcgccccccaagcccaccccttttttacactatgtatttgccctgtacgagaatctcaaacgtagacattccattttgaagataattttaattatgtatttttttgagtcgcccgtagacaaaatgtgtcttaaaatttgtcaatattacagtgttgaatcatccaacggatctttcctaagacgaacgataactaactcgaaacgtcacgaatttctaaacatataagacgctttcagcatgacagggatgggattactttacccaaaaagagtccagcatctaaactatttgttagtcatttaagatgaaaccaaaaaaaagtcaagagagaatatcaaatctttttactacaagttgagtaatttcaatttgatttaatccaaaaaaatgcaaaatactcaactggccacctaacttttctcttgcaaaatggaggaagccatgggaggttgatttattaaatgtaacgcacttattccaaatgatatgccaccaaaatgtacgacctagttaagttattactatactatacatttctagcatgtatacttaattttaaagcctaatttatccaaagtcaaaacgaaacagaaatgagaattatattttaattgaataaattacgaaaacaccaaatacacaaaaaatatactatatttatgtattcaattgcagcaatcgaaagttttatttttgtatagccttttctcattcccaatgtaccatcgtgtcaccacctcatcctttgttcataccccacatgatgatccatcgatgttttcgttttcgtgtatgttttttcttttggttttcatcccgccctcgttcagtgttgtcttttttttttcatccgaaaattgtgcgaatttttcactaacctatttttattactaaatttcttttagatgtctctacaaaccaaactgttgtactaccccactactccatctaccactactactccaatatctactacctactatcacatactactatctatgaagccgaccgaaccgtatccgtatcttgtcctggaaaactcaactgcctgccgcagcgcaacgatctgcaagaaacaaagtctgtcacagtattatataccatacattttttcttatatatacttatgatatatatctttgttctgtgtaaaatcttgcctcgaattgtttttgtctgggtttcaacttgatctacaatacatacacgtacatccggtgcgatatagtgcgtttcgggatggcattacagtaaagtatataactaatttgtatcgattttaatacctatatttgcttgaagtaatgttccgatgcgcactatatcgccctatataagcatgttctcagcatagttcgtgtctattttccactttcttgcttgggttctctctcatgtgtctgctttttgtgtctcaaatgcgtgtgcgttttgtggcgagtgtatgggcgtgtgcgtccttggagctttttgtgtggtttttccaattcctagtcttaatctttctctatttgataatatctttgtgtctccttcaatgaaatacttgcaaaaccaaaataaattacttaacacttgatgttttttcttacacagacttttttctagtatctaaggcggttcaacttgggtttattacgaataatatacttatatatattaattatgggctaaacttttctaattctaagaaatctcgatgtttacaatatttttttttattttcccgtcaaaatagtttaaaattttttgtttttggaatgcttgaaatgttttttaagtcgttaattattatgaatttttatttaatatttatatatatatatatatgattttctcctgattttttttgtagcttagcaaatttgacttgctcaaaaagtacagaaatcgaaatgtgtaaagcagagtgtccaatacagagatatcaaatatacagtcagtcatacacgatcaggaaacgtatcattctatatcaacaatccaaccaaattcaactcgatcactttcacccactcacttacccatccgtcttcgtgtgccccaatctccgccccgcacccgcatctacattgcagatttcgtactaacctggtatcagcacgcctgcgatcagtgcggcaagtcgtacaagactcgcaagagtctcagtcgccatcgacggttcgagtgccgcttcaccaccgaaagacccatcttccagtgccccagctgcaattatgcggccaagaggagcgacaacctaaccaagcacatcaagacccattttgccaaaatgaaaaaggacttcctgccgctggcctttcagatgcaggcctccacgggaatagccaccaaatgggaggccaccgcatagggaggtggccccaaaaacaaaacaaaaaaaaaacgccaatcacattatctccattattaatccagtccttcaagttcagttctatacaaattgagttcttaaaacaaaggccaaccaaccaggacagactgcaatgatctactgagctcgcgcaggagcacactttatgcttatcgaacgaacggcaaagagaaaaacaaattttagctttcacttcgtgttatatgtatggtaaacacgatttgcataaatttggttaatttatgtaaatggcatacaaaggcgggcagaaagcaaccaacctgccctgcttaaaattcaaatcattgcagtcgacttgtgtgttggttcttatttaacattcgtagtttagacctaagttaagcgcaaaaattttcgcaatcataacttatgcttcagctagtctggctttttcctaagttaatttaagtttaaaattggtagtctttagtttatagtccagtaagccaaaaagtccaaagagaaacgtgaacgaaactaagtcagggaggggatgggatgaactgctgagagcagttcggggtcagcgacccgcacactttgcattcctaagaaaagaaaccaaaaaaaccaaaaaccaaaagacaaaaagtgaaacatttttcgatatagtctagtttgtagttaagagaggccatgccaaatcagcgaaattccaaatgaaatgaaatgaaaaaataattaaatcaactaacactaaacttttgtggattaagttcataaaatctaagttcctttgctagctaggattatgactaactaactgatagacaaggatctcaaatgaatacaaatgaaacgcaaccaacagtacaagtacaacaaacaaacaattaactaaaactattaactaaacagccgcaaacacatagttcaaatgtataacacacatatatttacagagcagccaatgaagaaaggaataacttagagcccaagtcttaagcagttactatatattttgtgaaccgttgatgaatgtgaatcgaattttgtgaacacacacacaggagtaaaacaagcgaaaatgatatttagctagcgatctaagtaatttgaacttaaacctatatttatatttataagcaaaatgccactatttttatatgtcagagccgccattactaagtattttttatatgcatatatataaatatgaatatttttgtaattcgaataaatttgtattgatcaagaaaacgtttgtataactaatgggtcgctctctcctcgtctctctgccgtccagtttactaaacatgtttcattgcagaccacccatgtcaagcatcatcatcatatgcatcaacttcagtcaagatcagtcatcatcccacagcgttcattcaaaccaaatcaatacaaaaaaaaaaaaaagaaatcaataatgaaaaaagcaaacccagcaaaaaataaaatcaagccaatctgcaactactgctgctagctctgctcacgcttcaccatgccacgcccacacaaaatacaaaaaaaaaaaaattaaatcaagcaaaccaccccgcaacacacactaactgtaaatatcaccaatgtattactattactatttttttaatttataatactcagtgcaaaagttaacgttaccaaattcattctatttacgaaaataattgtttacgaactctaaaattgtttttcctactgaaatcttgttactttttcaaaacgaaatatgtgctctagttgtgtaagatttgtttatttttttttttttttttgcccaatccaatggaacatgccgacactgatgaaatatatatctctctttcttctccttctatacaaatgctaaacatctaatttgtagctccaagcagctatgtctccaactcgagccaaactccaccgccaattgggggctcatcatcggccagttcggcgcaagccctgatccgcgactattggtacgagctcaagttctccgacctattcaagttcataaatccggatggacgttaccagtgccccagattcaattgcctgaagagctacaaggacgccagctcgctgcaacgacatatcaggtgagtagtatccatgatgtggatatacattataatcgagattttctcctcgatctgtggtcggtcgtctgtctgatgatattgtgatgatatgtgatactgatacctgtctatctctgcctctctctctctctctctctctatatatatttatgcgatgactccgtataccccagatatgaatgtggtggacagaaaaaatttcgctgtctgatgtgcggcaaagcattttcacaaagctcccacctaaagcgacaccttgagagcggtgtctgtgtcaaatattacttatgagataatgttttctttaaaatcaaatagaataagcgttatcccaataggcagaagatcaactgatgatcgaaatgatgatcatgaaaatgaagatgtagaacatgaacaagattatatacacgacacgtatattacacacacacacacacacaaacaaacacacgcaatacagcaagaggataacaaacaatgagaacaaaaggatatatagaacaattagataaaaccaagaacaattacaaataacaaacaacaaaacgaatttattggatgccacatcatttataaaggaaatggataaaaaaaaaaaaccaaccaatctatatatatatagtatatatgatgagaattattgttgaaactgagcattaatgaaacaaacggaatacttagttaatgaacaagtgaaaacgaaatatttaacaagctagaacaacaatatatacacatatattaaatgcagtcagtgaacattttataggattttagtaaaatgtaaaaccacataaaaacctaagaaaaccaacaaaaaaaaaaaaagaaactaaactaagtaatagaacagagaggcaaacaaacaaaagttaaagaacaaaacataaaaaaattaaagaaaaccgaaaacagaaaacaaaacatacacgcaaggaagctaagagcaaacaattttagtcaaactaaccaaaactacgtaattttagttaaaatatataaataatatagaaactaaaccaagcaaaacttagtgaaattaacaaatgagagaaatgcatataatacaatataacaaccgacaaaaggaaagagaacagagcagaacagaaccgaaacagaacaaaattaacagaaatgcatataacaaaacgtactgtgtttatttgttgccaaatatatatctattatatatatttctaatatataatataattaatacgattcttgttatgccacacaaccacgaaattaactaaacctgaaatgcgagtggatgacatcaaaaacaataagagcagagcatgaagatcatcaaaagataactaaatgttattgtttaagttgttattatgccaggtacatagacacaccaacacacacgctgcttacgtacagtgaaacttctggatgaatgaaaccagtgtccagatatagaggccccactgtatgtagccagtaaataatacactttaagtctcatagagtcaactttgtttaggcatcacgagtgtttagcagaggcagatggtcgaaagggattgcaggaagatttgttacatggttccaagaacaaaaaatagtaaagagagtttatatacatatatacaaaacatatacatatgaggaaacaaccacatctacataaaaatatacacatatagaactatatataatgctatattagcaaaaatgttgtctgttgaacaaagagaggatattaaggaaacggaaattgttagtcagtgacgaggattagatgttggtaacatgtactcacatcgccaaaagtaattgtatttgtatgattaggtgcgtgcctgtgtgtgtgtgtgtgtgtgggtgtgggtgtgtgcgtagccttgtgcgagtgtgtgtgccaatcggtcaaaggattttttaccagagaaaaagaaaacaaaaaataaataaagaaatagaacattttgtgccattagaaattctccaccaaaactgaaagtaaaattcaatgctgctttagtgacgatgacgaagacgatgaagccatagaagagatcgaacaatatactcatacatgttatatgtatatgtgaaccaatatgatttgttgttgcattcgaagacgaaacacgattctgttgacaagtgtaatttatagtacatttttgttgtgagttcaaagattgagtctagtgaaatttttgacggcagaagtgacaactaaatgctacgagagtgccattatcaaacaaatttttaatatatatatatataaatgataaattattgaaattatacggaatacatatatatatatatatataccctaagcaggaggcaactaaacataatttctagttaggaacgcagtaaggaaagtgaaaggagcgcagaaaatatattgtttgttgcttgttgattgttaatttttgggttgcagaacataacacctaagcatatatgcaagatacatgtatatgccagtacaataaacaaataaaataaaaatacagaatatagagaacaaacaaagcagcaatagaaacctatatgaactcgaatgaactagacaaattatacacagtataaaggaagctaaaaacgaatgaaaatcaattatagtgaagtactaactgcagtttaagaccgatttgacactaatccaaaacacgcaactgaccgatctgcctaaagaaattgattaattgttagttgaattgaaaagtataataattcattttggcaactatccttgcagcattcggtcggtccgatttgtgaatttagtgtcaattatcggaattagcacatgttcacctcctcccctcccccgtaaataactaaaaccaaaggcaaatttttgattgatttatttcaatttgtttacaaaattttgccacaagtgcaatacttcgaaagtttgttaacaatttgtcttgtgcggctatttgccaaagtcaatttttgaaatgaatagtctaaagaaccattttgtaacccaaataaaaaaaaaaacccaacctccaagcgaacaaggcaaattgtgaaactcttcgaaggaatagaagaaatattgcttttaaattagtaaaaatttaattgagaattattcgctttacttgtatgaataatgttttttgttaaactaatttactaagaccttgttgcgagtagctaaattattattattatttttgctgttaaagtttagataaagggaaatgaaacatggaatgtttcgcaataacttttttgttaaatcgtttttctttaaattagttataacactgttttaatattattattacgtatacaaaaatatatcgtttcacattaatttaaccagagaactctttatgttttaacttttgttatattgttaattaatatttattgactaagagcagaaaaccgtttgcaaaaaaaccataaaaaaattagagttaactatgtaagttacaaaataatgaacaaaatatactccaaagaaaccaaccaaaaatatatatatatatatacacacatatatacaaggacatatacatataccaatatatatatattttagacaaaaactgaacaaagcaaaaacagcaaacagacaagaaaacgttttagtaaaagtgtatttggaacaaagaaattgccacaacagtctaaaaggattatatatatataatcaaaccaaaaacaataattaccagaacaagaacaaccgtaagaaaagtttaattgtaacgaaagttgtttattttttgtagcgtaatatttaacaacaatgaaaccgagtaaattgataaatgatatatacatatatttattgttaacgaaaccacggataaggcgaaattatgaaacaaatttatacaacatgaataataagaaaaacgtaaacagagaaaaagcaagaaaaactttcattgacgaagctgatattgttagtaccttaaaaccatggaataaaacaaaaaccaattaataattattaataattataataacaagcggtaggattaaacaatgagaaaaacacaaaaaataagatttgatgtaaccaaaaccaagctaaggccatttgagattatgttttaatttttcgagaaaccatttaaccccaaaaattgttatttttgcgaaaactgaacaaatggcattatatatggaatcgtttatatacacattgtttgaagaaagtggtaacagaaaaaccaacaacaagaataataaagattgatattgaaatgttgaaaccccaaaaaaaaaaacacagaatcaaggaccttaataattgttactgggcattgtgggggtcgccattccttgtttgccgcaactaatccatttccctacttacagatgaactatctcgaagggtcaagagtcaggtcaatggtttgttcctaatgaaaattgaaaccattgctaccgttacgccatagtagacggtactacctgcaactgtgggccaagtcattgcctcgaattaaaagcaacttctagattatattttcaattaaaacaaaaaaaaaaaaaaaaaaaattatttaaaaaaaaaaaagagaatgaatggtaagattggttatctcattttgttctagcttagattgtaactttcctctagctaccgatgtaactttctgctacagtaactatctatcgcttcgcaattgaactggaagttggttatacaagaacatgcatacatatatcatacacacagcattcttcatcatcagtccccatgtgatttttgtttaactatgaattcgcgcccattaaatgtgcatgtattgtatataagaaattcgctaacctatttcgtttctttctcgcaactcttttagaaaactcctggacgatatccgtgaaatcggtcacctcgctgaacaatgtctcgccatcgaacaactcgcacatttgtccacgctgcgagaaggcctacacgtacaaaaagaatctctccaggcatcttcgatacgagtgtggtcagctgcccacggagaagtgccgacattgttcctacgtggcgcgctacaagcatagtcttaatatgcacgtcaagacgcagcatccggagcaaatcagtgatacattcgcgggttcttcgggatctagcgatggggtcagggatagacggggccgatcactagttcgtggtctcttcgattcggctaagggggaaaagttccttgattaccttaataactagtatttagatccgatctcgggcgaaggtaagttctgctggaagggggggggggttactgaagagagtaagagaccagagaccacttctaatgataataaaaatgccttttgtaaccaaaattgaaacgtgtcattattgaattcttctgtagtccttaagttagttaagcctttttaggggcgcggtttttattcctttttttggctgtggtattttgtttgtccttggttatcatttaattgtgctgtacagcaaacacaacccaccaacacacacctatacataaagctttaaatttaagaaaatagcttaagaactaaaacgaaaacggaacccgaaatttgtttgcttgttttcatcaactttagttgtattcaaaaaaaaaaaaaaaaaaagttcaaaaggatactattagtgacaggagctgagcttaactacttccactaagcggtaaactcttgcaacccaacctcttactaaccactattcgttcaactctgcagcatccaagcaggacaagggcgagcagaccgaaggagcacaggatgaattcgaactggacgactgtttgctggagagcaacgacatagtcatcacccagaacaaggatggattcgtgttgcacgtaaagaagctgggtaacattacggctgccaagctggaggagaaccaggcggtggcacaacaacagggccaagcggcagtgactgtcaccgggccggctggacaacccacgcccacaatcacggaactcttgaatgccgccgccgcttcgcactcggaacccaaacccacactgaccactctgaccagtacgcccattaaattgccgtcatcggaatgcggtaagtccatatttgtaatagacaagcaaagctagaaaagtgacacaatatttatacaaatgaatgatagtttttataaattgaaaaactagagttttcttaaagttaaattgaaaatttggaaataaataaatgtaatatattctctctataaaatacgttaataaacgattgtattgtattgtattatgtattatgattttaactaataagaccttttgtacttttttccaattccagaacttatcaacattaaaaagattataccggcaaccacaacaattgccacacatcatccgcacacgagttcgacaatcatacatccccatcacatcattcagcatgtgtcccaggaaccgcaccaccaggagcaccatcagcagcatcagactattcacattgaggaggtgccgcagacttcgcaacagcaccaccagcagcagcatcaccaccagcttcagacggtccaaccgacccacacccaagtacaaagcataatcacagctcatccgggccagactataaacctggtgggtctgcgcaatgtgcagttggccgattcgaagcccatagcctcgaggatacgatattctcgtggaaagatcatcgggccgacggtacaaaacctgcagatcgtggaaacccatgagcccatccagcatcaacatcacgagctgtcggatggcaccaagtatgagattagcgagattgatctgaacaatcccaatgcatcggcggcaatcataagtgacttagtgaagtatgccgagatcgatgatatcgagctgcccgacggcactaagattggcatcggctttgcgccctcggagattactgagcatatgcagacctccggcggagagacgcacatcactacaattgagcacgagccgcaggaactgcaaacggtccatcagcacgaacagacgcagcagacgcatcacatacatgccggccaactgcagacgcatcatatccagaccgtggtgcagtccagcagtggccagcagcagcacgatcagcagcagcatcatcagcaccatagcattgagctgcaggacgacgatggtgtggagacaatcacacccgaagagcttggtatgcacgattcgagcaagagctacaccattctcaccactcgtcccatgaaggaggagtcggagcacgatccttcgggcatgacctacgaactgtcgctgagcgactcgtctctgggtccatgcgatgatccagagtcgcggtatgtgtgccgccattgcggaaagaaatatcgctggaagtcgacgctgcgtcgccacgagaacgtcgagtgtggtggcaaggagccgtgtcatccgtgcccgtactgcagctacaaggccaagcagcggggtaatctcggagtgcatgtgcgcaaacatcatccggagaagccgcagctagagagcaagcgaggccgcaaggtctaggcgaaagttgggaggattgtgagtacacaactgttgggtgtaaagaagtaaccatttttgaggttaagaccagtttcattattattacaactattttgtatcattttataaacgtgtacaccctattaagcttaaagttcttatttgttgattatttttattaagtttataagttttgacttccactcggttctcaaaggttcaatttttcaaacaaacaagcattgtgcgcactcaattacatttttatcaggctttaactttaatgtcttcatatttagtagaattggttatgtatgtcctttaattcatcgtaattttcaaaattacaaaaatcgaagccccaacaatgtcgacaaaatgaaaacaaaaactaatgtgcaagtattttcatggaaataacacaaaaaaaatataggatcaactatattaatggaaaatagattaacattaagaataattaaaaacttatttctgtatgtatgtgtgtgtgctctcaaaaaaatatgaaaatatatataaaaaatcttgattcaaatctaagttatgtagaaaaatcttaactgaagtcctgaaatttttttaattttttactgcaattcaacgttggtgcacataaatttcatgtaacctatttaaacaaaacctatcgacatacaaaaattgaagaaaattgtaaacttatctatattggaggcttgcaaaaataattttgtaagaatgcgttttcaaatctttatatatatatgatatatgaatagcattcaaaaaatatgagtgtaaggaagttatttttctgtaaattgcaaaaacttaacaatctactcgaacttagtaaaattgattgtacatcggaatagctgagtaaagtgtgaacattttgaaacatatttccgcagaaaaaataaaatataacaaaaatctaagcaaatgtattagaacaacaaatatacatacatattatgtctttttgcagttttttgtgtgtaaatcaattatttgattgaaattaaacatttattatgaatacttattctatagaaattatattttgaaaactagttgtaaaaacaaaaggtcaaaataaaatactataaaaaccacaaattcaaatttgaagccttgatctttgtgctaggtagaataatgttttgtaaaaagttcatactaacatatttctctttccaggtgaccgatgagacatcattcagccagagactgctccgagttagagttagctagctaacacttaagatcatcactttccctttccgagcatacctaatatatttctcttttcttttagattgaccctgggaccgggacgtggattggaactcgcgaatcctgtgccagacatccgcattgagctaaccttaagtaaaaacgtgccacatgccaaattgtaaagggaaacaattgccattccaatactttattattattaagagcccgaaatctaaacgttcgtttctgtatgccactaaaaagtaaccagacccgaattgaacccgaacctgaacctgaacctgaatccatattccccagccgtgtttatcgatgtgttcaagcaaaatcaaaacagcaactacaaaacccacccaagcagcactctccagctacagttcaattaatttagttacccactttttagttttttaaatttatttttaaaataaatatgtttacaccctgcactaattggccttaatttgctcaacgttttattgaaagagagagagagagagttttcttttatcttatcttattacctgtatatatgtttattaatttgtactctaattttgaatcatgccacgccatcctaacgcttacttccttactatgtttttatacacgtgtatattcatccattaaacgctttgactaatttatattatttgctttgcgcgtccacctcatccagctcatccccagccaactagccaactactccaatctcatttgtgtgtgtcactctatgttggttatctgcccagcttgatttaacagctatattcctaagtgttaagttggttttttttttcgattttaatgagttttttttgcagttgtccttgtgtccagtcaaaagtaattctatttatttttcgttcttcttttcttttgtttttcttttctcgtttttattttcatatgttgtgcgctgcccccaaacaaacaaataaactaaacaaactccacaaatacaacacaaatccacgcttgaaattgtgataaatgaaacgaaaccaaatgaaatgataacgtagatctgagtattacgcgtatagcgggactcacctggaacgaatggaatgcccgcctggccatgccactggtgaccctacgcgaaggtgtccagccgctggtctttcccaccgatctgtcggtggataagcagcagggagccgcaggtctgaccgccaaggatgtgaacgtcagtggccgaaagacgcccaccgatggggggggatgcaagagtgagccacgggctgcctcaacgcctgccaggacacacagcagtagcaatcacagcagcaatggaaatggcagtggaaagcccacaaagaccagtagcggtggaaaattgaatcatcttaccgaagaggaggccaccgccctgatgctgaaagccgtagccgagaaacaggcagccgcagcggccggcaccgagttgagtttcggtgaggatcaggccagctcggggaacgggaatagcagcgactatccggccactctgagtggagccgttacctttgcggatgttggcggcccagctggactatgccacatcaacatcctgaacagcatcagcgcaatgaacaatctgattagcggcagtacggcggctggcgttggcataaccaccggatcaggtcaatcgccctcaaatagtggccacaacaacagcgctggcggcggtagcagcgtgctgggcggtgcggacaacggtgctggacacccgtgtcccgtctgcgggagagtctacaagctgaagtcctcgctccgcaaccatcagaagtgggagtgcggcaaggagccgcagttccagtgcccattctgcgtctaccgggccaagcagaagatgcacattggccggcacatggaacgcatgcacaaggagaaattcaagctggaggatgtgaagaactttgccggatccagcggcttagatggcgacagcagtggagccacagcgacagcggcatccgtggtagcagctgcagctgcgctggtcagcggcgtggagttgcatccccacttctcgtagagaaaccaacactctattgaagaagacttgtataaaaagttaaagttgatcagttattagtgttgagaaaaggcgaccaactaaacgaacataatcagggataataaggacgaaagaaaattacaagaaaatatatatttaatcacacaccaagctctcgggaaaacggaatcagtgtgccaaattaagcttaaaacaaaacaaaagaaatcttaaaaaaaaaagcgaatgagtaaaaacaaaatgaaatagttttgtaagatgcctggatgtttcgaaaaagataatacttgttcgaatggaccgaaaacaatttgttgcaaagcacaaaaatttacgccatttcacataaaatatttttttgttattgttattaattgtttacacgagaccgatttgaaaatctataatttctatttttcatgcaaacagcaaagtgatcagtaaaatgattttacacaaaaacaattttagatattgcaacattccacaaatcgtaaaaatgaaagacaaatattgtacaatgaaacggttaagaattattcattaatagcataggcttagcatgaggaatataaatatatataaatatatatatatat

SEQ ID NO: 27020 - DNA, 2763 bp, DROSOPHILA
acacccgcagtcgggaagcagaagcagcagcaactgtaacacaaatccgttagctctctctttacgcgagagcgtgattagtgtagggaaagagcaaagttgaaaaattaacaagaagcagaaactcgctaggaaatttaaaaaaataactgcacttcgctgttgaaaatttgcatacaacataactgctgacacactaaacaaaactgaaaaaagaaccaagggcgaaagctgtttattttgtttaggcacctaagtttggccaaattataatcaaaaaacgagtggcgaaaaaaacagcaagtcagagagagcgctcgacgttcggccccaaggtcgtgggcccaaacccccaggatccatttccaacaaccccatccaaccacccgagaaaccagaatggatgacgatcagcagttttgtttgcggtggaacaaccaccagagcacactgatcagcgtgttcgacacgttgctggagaacgagactctagtcgattgcacgctagccgccgagggcaaatttctcaaggcccacaaggtggtgctgtcagcatgcagtccctactttgctaccttactacaagaacagtacgacaaacatcccatctttatactcaaggatgtcaagtaccaagagctgcgcgccatgatggactacatgtaccgcggcgaggtcaatatctcgcaggatcagctggccgctctgctcaaggccgccgaatcgcttcagatcaagggcctttcggacaatcgcactggcggcggagtagctcccaagccagagtcctccggccatcatcgcggcggtaagctgagcggtgcctacacactggagcaaactaagcgggctcgactggccaccggcggagcgatggatacgtctggcgatgtgtccggttcgcgcgagggctcctcgagtccgtcgcgtcgtcgccgaaaagtccgacgtcgcagcatggagaatgatgcccacgacaactcaaactcgtccgtgttacaagccgccgcctcgaatcagtcaatcctccagcagacaggggccggtttggccgtctccgctttggtcaccacccagttgtccagcggaccggcagccggaaccagcagccaagcgtcgtcgacccaacaacagcagccattgaccagcaccaacgttaccaaaaagactgaaagcgctaaactaacatcctcgacagccgccccagcgagcggagcatctgcgtcagcggctgtacaacaggcccatctgcatcagcagcaggcgcagaccacaagcgatgccattaacaccgagaatgtacaagcccagagccaaggtggcgcccaaggcgtccaaggcgatgacgaggacattgatgagggtagtgccgttggcggaccaaactcggccaccggacccaatcccgcctccgcctctgcatccgccgtccatgccggagttgtggtaaagcagctggccagcgttgtggacaaatcgtcgtcgaatcacaaacataagatcaaagacaacagcgtgtcatcagtgggctccgaaatggttattgaacccaaagccgaatacgatgacgatgcgcacgatgagaatgttgaggatttgacactggacgaggaggacatgacaatggaggagctggaccagacggccggcaccagccagggtggcgaaggatctagtcaaacatatgcaacatggcagcacgacagatctcaggatgaacttggactaatggcacaggatgcacagcaacgggatccccaagatctgagtattacgcgtatagcgggactcacctggaacgaatggaatgcccgcctggccatgccactggtgaccctacgcgaaggtgtccagccgctggtctttcccaccgatctgtcggtggataagcagcagggagccgcaggtctgaccgccaaggatgtgaacgtcagtggccgaaagacgcccaccgatggggggggatgcaagagtgagccacgggctgcctcaacgcctgccaggacacacagcagtagcaatcacagcagcaatggaaatggcagtggaaagcccacaaagaccagtagcggtggaaaattgaatcatcttaccgaagaggaggccaccgccctgatgctgaaagccgtagccgagaaacaggcagccgcagcggccggcaccgagttgagtttcggtgaggatcaggccagctcggggaacgggaatagcagcgactatccggccactctgagtggagccgttacctttgcggatgttggcggcccagctggactatgccacatcaacatcctgaacagcatcagcgcaatgaacaatctgattagcggcagtacggcggctggcgttggcataaccaccggatcaggtcaatcgccctcaaatagtggccacaacaacagcgctggcggcggtagcagcgtgctgggcggtgcggacaacggtgctggacacccgtgtcccgtctgcgggagagtctacaagctgaagtcctcgctccgcaaccatcagaagtgggagtgcggcaaggagccgcagttccagtgcccattctgcgtctaccgggccaagcagaagatgcacattggccggcacatggaacgcatgcacaaggagaaattcaagctggaggatgtgaagaactttgccggatccagcggcttagatggcgacagcagtggagccacagcgacagcggcatccgtggtagcagctgcagctgcgctggtcagcggcgtggagttgcatccccacttctcgtag

SEQ ID NO: 27021 - protein, 787 aa, DROSOPHILA; identical to SEQ ID NO: 1350

SEQ ID NO: 27022 - DNA, 39814 bp, DROSOPHILA
cttgacacctttctacttccccagtcgggaattttaattgcctcgcaaaaaataatgacaggtgtctggtgaattatcttcttcagcgctaatagcatttattttatttgtagtaaaattacctaaattagctttttatgtacatttacaaattttaagttctgcatctgcatggtgagatcatttcagttgccgtgtaagcttcttaaaaaaaactgtgtatatatgaatgtatatattctttcatatatgtatatgtatataaatttataatcacataaatatttatgtacttatgtaaatattacataaatgtatgtacataagtatgttcctcactgctttgtaatctctaaaaattgtagaacctacattgtaaattatgtatgaccttgacatttcataattttttagaaacatttccacttggtttataagaattcgttaaaaattatgttatgtatgtacatacacacatttctatgtacatatgtacatagtacatcatgtggcttaaatctcgtattatgccatgctctcattatgcttattataactcttatacatacaaaaagtattataaaagtgtttcccacaaattccacgttttatttgacgatctaaatacatagctttttacatagaactccatgtgccatatttccttatgtgctaagcaaaaaaaaaacacattttctttgccttttcatttagcgcgacttccttttgccacaaccccttcttcttctttcttttcttcccctcaattcccgcgcaaaacgcttttttccaacgagacagttgcaaaaagcaatcaactgtatcgtggagtgtccccatctcgctcgcactcacttgttctagcgcacgaacgatcttcggtttttcgaatgcagcagaaagaacaacaaaagcaaaaacttcgtgctcacacacacacgcaaagcctatttcttttttcgacttttattcgaacttttttgcagcgatttttcagtaacaaacggcaactctcaggaataaaatcgtcgtcgctccgctcgttaaattctcgttgcttttccacccacataaaaaatcaggataaattgttagtagtctaaaaaacagtgcggattgcataaattcaagcggagcaccgattggaaaaacacccacggaaaaaactatgtgatgttaaatacgtttttgtgtcgagtgcataatttgttgtaattaaagttcaactgcaaatgcaaaaagacgaaatatataataatttataggtgtttgtgagtgtttgcgccccctctcctgtgcaacgtgtgggaaagagagagagggagtgagaaagagggaacgtgaccgagttgccatgaaaactccaatggaaattcaggtgagcgattgtcaatcgacgtgatgttatgcggggaccatcatctctatacgttcacctttcatatgcacactgtagccgtcgaaaagatctgtagaatttatgattttgccacagaaacgacactcctcgcatcaattagtattggttagaacatttggcatgcgtgtagaatttcgcacagaaatgttaattttccagctgaaaacccgatgaaaccgttaaaaattaaggtacatatttaggtacacataatttgtacaccgaaattagagagaaaacgcgcggcgatgaagtcatgctggaagccaaaaataaatcaacgccgatcataaaaacgtttggagagtgcacaaaatataatttgcgctttttagtgggaaatgcattgcacacacaagccgagaccatctttcatctccctcgcacacccttaaacaactgcaacgagagatggagagaggtgtcggagtgggggagagagagagcttgctcggcaacggtaattttaccatttcgaacattatggcttcgctttgctgcgaaaaaaacaagcaaagctaaagcaacaacaaaatctcgccccatggtggaaaacaaaaacaataccaatgcgaatgatattttcgaactccgccaaatatgtgcaagcagagttgtcagcctcgttcgttgtcacttacagtatatgaggttctattgaacaactttattaattagtacgtacgactcacatctcactgtctatgccaaatactatttaccacgtagagaccctaaacaatttttgtgatattcatattcaatactttctccaattatatttaacattgtcttgagattagcaaaaacgttatcgtgtttttatagacaggcttttcaagtagtgtagttagtaaatttgacgtccgttggaaacgtatttccttcttccttgatgtggaacttaaattaggtggcaaccagataatgaaaagcgtgtcctccttctgcatcatcctaatttgtcgatcttttgtcgtgaattggcaactctgtgcgccaagcatacaaaaagcacacgtctgaagaggggtggcaaacaggcgacgtcaacttatttttcgaactcacactctcattcgcactcacactcttcgggtttcgcttcggcttcgtttccaactctctcggcgctcttcggggtctctgcttatgggaacctttcgttttttcgagcaccagcggaaagtcgcgtcagtcgtcagtttttcttcagtggcttcgcgcgtccgcaattttcagtgtgtggtgcgttgttgctgctgcctactcttttctttctgctctccacggcagcgggaaaggaaaatacatacacatgcatacagggccccatcacatacagtaaaaataaattcaactttattgcttttccccccgtcgcgttatcgtgtgtgtgtgtattagtattatatatattttactatatatatacatatatggattggaaaagcaacaccaaaatttgatatgtgcaaagtttattgacgactacgtgctgcctgtgattctatttcggtgtgtatataaaattgatcaataatgttttaaagtaccgcttaataatatacaataagaacttgcatttgaactgtacctggcaattatctgcctgagattgtgtgtgtttttgcatatcgaatcgatacttccagtggtgtttctatcgatttttccctatgctcacttcacgggagaaagcttttcaccaatgtacgaaaagagacaggcacagacagagcaggagagggagagctttcccacaaaatgcaacgctgaagtaaatgacgggcggttttcattaattttcacacacgcacacactgccagtggctcactttccatgcaaatgaggtcaagtgttgcagtgggaaatgttttctacaagtacacgtgtatgtgtgcgcgagtaggaaagttatataagcttttcattaccgattgcgacgagggaaagcttgataaaaaaaactatgattagtaaacacgaagattgccaagagcgagttcaattaattgctttctattataaactcctacaaaaaagcacgtttttcatttcgatagattcccaaagtcttggtggccgccatcttggtttttcccccacacataaaatattttgttcaatgctaggctctctcgctcttttggctccccttttctttctctcccgctcattttgtcatactccctcgtcagtttttatgtttgttcacgaaaaacaaaaacaacaagcgtgaaattttctctctgcacttttcacacacacttagaaaagtgggagaaccagacggctcagcatgaggcaaggaggatgatgaggaagggagagagagaacagtcgccacatatttttgtttccactttgtgctacacttctgctacgccgcttttgttgttttcttttcgacacgtttacacatttccatttttcatattttcgtgtcgcctaatcttttttatgggactgcgcgacgttgctaaatttcacttgtgacttttgcaaaagtttcatttgtttacattctacgcacatgtgcagaataataacaataataaatgagatataaaaaagcttttgcgcaacaagtgtagaaaagcaaaaactgtatttttctctttggtttcttgccttaattctttgtttacaatttaaacttgtacacttctttcaagtcatcaactttttttccttttaaaacaccatgaccttgcatcgaatttctgacctacacacgcacgtgcaaaaaaagtttaatatgtgtcgcacttttctattatccactattcttaatgttcttgtcttacagtaaacagcaaaaatatagaaaaaataaaacgaaggcggggaaaaataatgagcggccgttatcgcaacctgctctttggccgacttttatttttgttagttttgatttacttattcgctttgtggccattagcaaaaaagttcattgaacttttctgcgttttattttacggtttattgttgattattttcggtggctcacttttttcactttcacttgaactggccagtgtatttaacaagtttttgtgtggctatatccaaattataaaactaatatggcactttaaaggaggtgtttctagtagttggtttcattaggaaagtcttaaattgaatttgatttaatgttgatagttaagtgtcataggtcataaataaattgaagtattagcttgtaacataactgttcgataaccattgagaaatggatctgctttttatcgttaacttgcataactggcagttgtagataatgcccttcaaagaaatctcaagaaaaaccaacaaagccctagagatctagaaaagaagaataatcgacatcatcggcgggacagatctccatcggtgcccatgatagatatggatagccccacgaaaacctaaagcatcgacttcctccgctcccacgcaaatgtacaatacaatactctgagatacatttacagatacagatacattcgcgcataacaagcccttaacattcactttaaatagcttttcgagaaaacaagtttttgtggttgacgtttttttttttttttttttttttttttgttgttgttatacatttttcgctgctttaatggcaaaacgacattttctgcggccgaacagaagcgagcgaagcggaaaagtaaaaaaaagaaagaagcgtggaaatggaaaatgatatgtttcaactctcagatgcaaattatcgttattcgtaaatattatgtataaaggttgcaagaactttgatcacacgatcttttagtaatacactatttctgatagatatgctatatgatgaacaatgcgtttaggaaccaacatgtgacttacatggaaaacaactgcgatccagctggcaaaaaacgtagcttctttctatgaaattataataactaatcgtattttgcgtggtttactacctaccagctcgactcagaatggctggcacacttgacttggcttttctcaatctttgcttgcaagcctgtttgctgctaaatgtgcaatgtgaagaacaagaaaggcgacgggctaaaagggtgtaaaaataaataaaatgagcgacagacgacggacgcctacatacgtgggttttcagaggtgttttttcccccagttttgcgttttttgggcttcgagccgccagagtttcaatggtgtgtgtgtgtgtgtttctgcgttgctattcagcaacattttcagctgccagaaattaaattattgaaagtcagtgcgagaagtcgagtcgtcgtcgagtttatttttacgtcgtaaatatacaaattttatgtctcacaaacgcagcacacacatgtctatgtggcgtgtgtgtatgcgttcgagcagaaaaaagattccactttatgcaaatcttgtgggggaagttttatatttgttcttggcctccactcactctttttttcctcgctctctcccgcttcctcctcccccctctttcttattcttaagttatttccattttaaatttgtttttctggcggctgcccagtgtgtgtatgtgtgtgtgcgcgtgtgtgtgtgttggcgatttttctggcagcgatgtgaaatgaaatgaaatgagtttcttaaactggtttttctgccaagtgatcggatcggatctcggatctctaaaccaacaaacaaaactcgacttgccagccgagaacggggcgaccacccgctcctccgtttcgttttttcgaaatggcacagttcttgtacattctgtcgaaccggtttttcttttgacttttgcacacacaaacacccatacacagacacacaacttacacacatactacccagaacagaagtcttgaaaccagccccattatggtttccaagttcagagcgctctctccatctctctggcgctggccaagaattttcattactctaaaacagtggagggctcgggctccagactttggcggcacttcctgtgtgcccaaacgcaagggacgacagttgtgatccaacatctgccggccggcaggacgcggcaaaatggagggaggaagggagactatgactgcatatacacaagcgaacataatcaggagaggggggatcggcttagtttaggggttgattgcaaccccaaaaaaggccgggaccggcctacaggaccctctccctcatccttctcctaacttagcgtaaaccggtctgcttcggttctccccgtggctcaccttttgccgtctggcgcgtgcttagaaaaaggggaccgctatcgcccgacatcctttatattattattatcccgctccccatcccacccgacatcgccgcatcccattttcatttccatctggcactcgaaaagtctgttggcatggaggcaagaattaatgaagcctagctgggccaagccaaatggctgaattctaaaacaagtttacgacaaaaggatggaaatgctaatctctggtacccattccaatcttaattcattgtaaaccgatctgcgcttacatagaaacttacgctacatgctgcagaaaaaaaacccattaatctgacatctgacattgatcgccgataattaaagcagcaacccaatcaaattgcgaaaaatataacattagtttttcgtactacagcggttgcaatattaaaacaagttgagtttttcgctaacaacgtttcgtaaaatgaaaattttgaacgtagtttgatagtagatctcaacacaaggaaatatgaagcaactagcttataaaaagtgtgaaacgaactattcgttctatttgcgatccagcagttgctaaaacaaatattagatgagtttttcgctaacaacgtttcgtaatgtaacaaattttgaacgtagtttgatagtagatctcatcacaagataaattcttttttaaattcttttttaaatgatttaaaatgttatttgttagaagcagcagctcgcccataaaacgtgtggaaaatgcattaaatattctccaaacaatcctggcggttgctaaaccaaagtcctgttgagtttttcgctaacaacgtttcgtaaagtgcaaattttgaacgtagtttgatagtagatctcagcacagaatttctcgtatattgaaagtttttagagcattgaaaattataattattataatatgttttaaacaagaatcgtgatctcaagctcttgttcaacatattagcgatatgcaacagcagttacacagtgtcttggacttatttttgccagacattttcgaatgcagttgccagatgaaaacccagttgagattttcgctaacaatgctccgtaaaacacagttttggacatcgtttgatagtagacctcaacacagtctctcagtctcttgtcttggtctccaatcaccaagtgctcattactccacccccatttatagtacatcatttgtgggttctctcgtgggaaaaccgaaccccaaagaagtgcgagtgcctttgggcccaactgtacttttccgcacacgcacacaaacacactggctacatagctcgctctcgctctgttcggtcacaggatcccaattcataatcctccaccatctgcgcaaaaataaaaccttgcaatgtgcaaagagcgcacgtcattcgtttccaaaaagggagaggaagcgggagagcgagagagatcctttttcgcctccctgcagtttttacctacttctctttgtgttcgacttatgtatttcttttcgtagtagtgtgtgtgtctgtggaaaacccctcgaatgcatcattattggggtacggctggatgttgcttttcaccgcttctcatcagtgattcattcagagaaaaatgcaggtcaaatgatattttcacttaccatatgagttcccttaaaatgaaagctcgagtttatgtattctgaaatttgtttaatagcagatgtaaatttatcgtcatcaaattgaaatgatcatcattatccttagtagtttttcttcatgtgtattttgtgcgcatgccttgcaccttccttccatatgggccatgtgttgtgtgtgtgtgtataactgaatctcgaaaaactgatccctccgcctaacggtaaatgactggattcgcttaccctgggggtgattctcactgtctcttttccccacgactgtctagtttttttgcctggatctggcgaaaagtaaaaaaaaaatgaaactggaaaacacaaagggaaatgaaaaagggagcctcttgtcacgtagacatttttgtatagccatctccctcgctctctgccgcggagaacagttagttttcagtattaggtatgtacttctccaaaagtggacctttgtatattatattatctttttggagtttctaaagatgtcgaataacatcttatgaacaagaaacaccacgaaatgaacgcaaaaaatcaaagtatgaacattttccagtcaattttcgctacctgtctgtgtttttgaaagtgtttgtgtgtgtatttcccgttatttcgctttggcacgattattaccgctgcagttctcctttttcctttgagctccttttccctctgccgctgtcggcgtctctgcttgcctgccctctcactcgctccttttgcctacttggcaatttcataacgtgcccccaaacgagagagagcgagagagttcgacgctcaactctcgctcgctcgctccatccctctcgctctggcagcaacttcgtttgctggtcggccgtgctgttagcgagagataaagagagcgcaaaatgagcgccagcagcgaggcgtcgttttcgagggtcgctcagtcaccgtcacatttgcgtcgtttcattcggtttcgtgcgctcggggattttgtttggttctctgctctgtgcggcagatcgcgaggcaacgcgtgcggtttgctggctaaattctacatatacacattcaacatccgacggccgaagcggagctagaataggaaaaccaacctttgcagtgctaattatttacaacacaacagtaagtgtgtggtgtgtggaaataaagcagcataatcgcgagcgggagaggttgtgaaatagcgcccatatctatatgatgggtgcctttgttggctggtgtgcgtgtgtgtttgtgagcttctaatgaaaaacgttctatttttaaatgcgcacaccataaaaaactgaaacgattgctccacacttcaactttaaaaattatcagtcaacgagtgccagtgtgttggtgtttatgatgacggggggaaaatgaaaatcatcataaatattcgtctgtgtctacttgtgaaattttccacaacgaagaaaaaggaaacgagaaaaaaaaaacccagacaccacaaatatatgtgtttgcgctgcagcgacgccgactgcgaaacttcccctctttatgtttcatgcttcgtttttttttcttccatttcattttttcggtcgtcacgaagtctcttcggcttttatcgtgtccatcgatctccaacactaaacacccgcagtcgggaagcagaagcagcagcaactgtaacacaaatccgttagctctctctttacgcgagagcgtgattagtgtagggaaagagcaaagttgaaaaattaacaagaagcagaaactcgctaggaaatttaaaaaaataactgcacttcgctgttgaaaatttgcatacaagtatgtcgctgtgggtgtttatttgaggatgtatgtgtgtatgtgcaaaggctaagcaacaataataatctagctgaaatttcaagcgcgcaaaagagatgaaagatattgttattgctgcgctgaaattaaacatgaacttgaccttgggccgcattgcgagttttttgcgttactaattttgttttctgtcttctttctctttgcagcataactgctgacacactaaacaaaactgaaaaaagaaccaagggcgaaagctgtttattttgtttaggcacctaagtttggccaaattataatcaaaaaacgagtggcgaaaaaaacagcaagtcagagagagcgctcgacgttcggccccaaggtcgtgggcccaaacccccaggatccatttccaacaaccccatccaaccacccgagaaaccagaatggatgacgatcagcagttttgtttgcggtggaacaaccaccagagcacactgatcagcgtgttcgacacgttgctggagaacgagactctagtcgattgcacgctagccgccgagggcaaatttctcaaggcccacaaggtggtgctgtcagcatgcagtccctactttgctgtaagtgttaccaaattcatagtttcggaaaactctgttaacactaaaaatacacttttttcagaccttactacaagaacagtacgacaaacatcccatctttatactcaaggatgtcaagtaccaagagctgcgcgccatgatggactacatgtaccgcggcgaggtcaatatctcgcaggatcagctggccgctctgctcaaggccgccgaatcgcttcagatcaagggcctttcggacaatcgcactggcggcggagtagctcccaagccagagtcctccggccatcatcgcggcggtaagctgagcggtgcctacacactggagcaaactaagcgggctcgactggccaccggcggagcgatggatacgtctggcgatgtgtccggttcgcgcgagggctcctcgagtccgtcgcgtcgtcgccgaaaagtccgacgtcgcagcatggagaatggtgagttgtcaagcgattaggattatcttacatatttgccgaatataaaaaaaagttccaatgcgggaatgttcttcaaacgaaattagcgttaatcaaaaatcttcaatttggcacaattaataaattgaaattgctttgctaataatatatttatgcaacacaacaaaatttcctcctaagtacaaacttatttattaaaattgttcttatttttttgcagatgcccacgacaactcaaactcgtccgtgttacaagccgccgcctcgaatcagtcaatcctccagcagacaggggccggtttggccgtctccgctttggtcaccacccagttgtccagcggaccggcagccggaaccagcagccaagcgtcgtcgacccaacaacagcagccattgaccagcaccaacgttaccaaaaagactgaaagcgctaaactaacatcctcgacagccgccccagcgagcggagcatctgcgtcagcggctgtacaacaggcccatctgcatcagcagcaggcgcagaccacaagcgatgccattaacaccgagaatgtacaagcccagagccaaggtggcgcccaaggcgtccaaggcgatgacgaggacattgatgagggtagtgccgttggcggaccaaactcggccaccggacccaatcccgcctccgcctctgcatccgccgtccatgccggagttgtggtaaagcagctggccagcgttgtggacaaatcgtcgtcgaatcacaaacataagatcaaagacaacagcgtgtcatcagtgggctccgaaatggttattgaacccaaagccgaatacgatgacgatgcgcacgatgagaatgttgaggatttgacactggacgaggaggacatgacaatggaggagctggaccagacggccggcaccagccagggtggcgaaggatctagtcaaagtgagtttgcattctaatcttcttgtttccttacaactaatggttggtttttttcaaatagcatatgcaacatggcagcacgacagatctcaggatgaacttggactaatggcacaggatgcacagcaacgggatccccaaggtgagtgtttgttgcctctgaaatcgataatatgagctatgaacaaatgaaaaagcaaaaagtatagcttagcctagaagtattagatgagatgttttttcgaatcagcgagcacgacaaacaacaagcttaaattcaaatgcagattaaagattgaaatccaacttttcaaggtcacaactccatttttttcacacaaacatttaaatatacaaatttatttttgcccattttaatgtacactacaacaaaagtcgtgctccgaaaaaaagctctaaaacgttgaagaagaaaaaagatgaaaaagtcgtagaatttgttcaaatatgattttcaacaagatagcagacgaaaaaagcaagcaacaagaaaaagtacaaatacaaacccaaaataacaagatttgtgagcgagagtttggcgcagagaaaaaaaaaacaatatgaaaaacagcaaaattaataacgaagagcaacaatttacgactcttatttgagtttttttttaatgagagcatttgaaatgctggttttgataattttttgtttttgcctgcgtcgctcatttcgccacagataaattaacccgaaacaagaataatttgtgcaagttgaaagtattacttaaaaactctttctttacttaatatgattttttacgaaactaatatttttttaattatgacacacataattcgtataactagtaatctttttttgtacatatctattataattaatttttaacacacacacacacttttgaaaagaaaatgagaaacatttaccactcacacaccacaaacatatataattgctatataccacaaaacccaaccaccaaccatcccctaacattctcattttatcattatctatatatatgtatgattccatgtatgatcatttgttgttgaattttcgtaatacgtttcattacaattggtgtttgattaactcttaattttgctttattttatcttaccgtatatataaatcgcataattctacattcccaacatttttagttgctcgccctatctatcttccttccccacctgtattcccctctttccgacattatgccgttagctgcagagtaatgaaacaggaaatataaattgaaagtatttttcataataattcataaaccatggtcacactgactcacccacaaacacacaaccacccacactgcagctttgacctaggcagaaatctcgaagaaatgcccttatcttttaagttagcgtttaaacttacgtatcaacagtgttctatttgtgtgcgttgtgatctctctcgctcgctattttcccctctgtaagctgtttgtgtgcgtgtgtcattgtgtgtatagtgcgtgtgtgtgagtgtgcagggctccgtccacatgtattttcccttcacaaagaaagctctctcacagtacagtcgcgtcaaaagattgcaaagtttggccacacttccagcatttctagcaaaactcgattatgtttgttcgccttaactttgtttgcattttcaaagcatatcacaccacacccgagaactttcgcaaacaaacacatttaatctttcatttgtcatactatactttgtgccattccattttgattttcctctactttagaactctcagcgcgtgctaatgttttttacacatattttttactttacatattattacgaaaatacgcatgcagttttaaattgtattttagtactatctctatatatacatatatattttgctttattttggttgacgggactttttttgattgtttatttttcttacggatttgtttttagttttaaagctagattgtaagcttttccgatgcaagtaacgcgcgcgaaactttcttacgcgtttttacattttgtaagtttgggaattctttttcccatgacttcagatgtacgtcgttgttaaaaactttaaaaaaccctttattaagttaagtgaaaagtgaaaaaataagctagaggaccgcacggatggaacctggtactgaaggatcgccgcttttggaggaggaccagctgccgaaggtctcaagtcgttgccaaaacaaagcacgtaaccatccaagatggtgaggtacacttgcagctttgggtaacttgacgagatccaactgtagtcaaccatccaactgcgtcacggaaatctcaggtgcgtgcccaggtgagtatgctccgcccaacggtatcggttgggcgaagtgaaatacaagaatgaagtaaatttattattttaagttcatttttgtttgactccgaaaatatcctatcctatcgacccttcctttaatcctccaagtattaccaattatccgccttcccagatcaacattcatacctcatagaaaccaaaatcattttacagcgattccaggtaatgtgttatataaaaaaatatctacaagcgctctttcttcaaaaaaagaaaaaaaaaaaaaacaaaaaaaagagtcgatggacttccagggtaagctatagtgtaacttccagtctctactcttccgaattatttctaagtgtacaccttaaatttacattgtatatatatttttcttaaaatttcattttgcgtttggcgtttgtttgttttacaaaatagcttgaagcgttgccaaacaaacaccaaacaccgaaaaatacattctcgcaagaaattccaccgatccttacatacatatccatatagacaacactgcaacgttgcatttctacatttatcctgtttgcgaaatcaatgaaaagaaaaatcagaggaaaagaaaatgatgagtcactaaataacttagtaaattcatggatcgtttgatgttttttgttgaaagatccatttgtgcaagatatatgtggtatgaaaaactaggttatatattattagttttaaaacactttctataactgttccgaaggtatataatccatccacctttgatctttctgaagcaaaaaatcatggggtttccctaatcgtttcttgatggtcaataaaagcaagtaattcttaaaaagctttaaaagcttttccccccttctatgtttcactcttttggttaatctcttctgtgacaatcttgtttgcccaattaatttataaactctttgcttcgctgtgaggtatttaaaaagaatatcttattttaatgtacacgaaactgtggttcagcttctatatcctattctaaccaccctcttttacctgccctctctttctacgttcgttcttttaattgttaatcagaaagaacaacaatgcccgaagcattcgttcaagttcaaggtcggctaaattataatgtgtttctatgtgtgtgaggttgtgaattttttctttaatcagcattgttcacatgaacgcgcggggtgggtgtgatgaagcggtaatattaatgtttccttcgcgcttgctatttttaaaattttgttctgcatccgtgtaaagtcaataacgatacgatgcgattctgcttgggcaattaaagctaatggttgcataaataatcaagtttgggatttttcgatgagaatttcttcacacgcagaaagtttttgactggtgtgtgagatagtggctcgcaaaccagctttattcgcgatactttagatagagtgcgtcattatgacgggaatttataatcttgcatgacttgaggttgtataaccaaagtatccgttggtagagagagtcgttattagggtcttgatttcacttgattcaatgctgcatcacaactgttgggttactggaaacttcttttgcttaaatgcttcgcactatttgcacattagtaatatgatagaagactagtgtagtagatagatagattagatagttgcctgatgacctgattttaccaaaataaattgaaaatttcgctttcaacgccaaccccctcatatccctccctatttctggttttggcccagttgaaagctgttcgcatggccttgacccaatttgcacaggcacattgcatacatacgcaaaacaggcaaagtcgccagataatatttttgttatttttttgtgtaacctgcaatgggcccaaagcttttatcacatcacgcaaacctcaagcgcaaaaacaaattatttacttgcagtccttgctttttgtttcgtttatgtgtgtgaatgttttgggggaaatttaaacgtttttatatatgtatccttggatccgcattttaatatagtttatgtgcaagaatttattctcaccttaagttggttgtagttggattatgtatcttatttgtacttcttaacctctcttgcgctcattccttttccatatttgttattatccttgaatttagattagatatatcgaatgataggacagaatagagctttttttcttcgtcaaaaacggcttaaagtagaattaaactggacttttgtatataaagcataaacaaatctagaaaacatttaacctaaataaaaacttaattaggaaaagggtttttaagtttgttggattgttaatgcttctgtgttgcgtgtcgcttaattaatgtgctgctttgtgaactttattcaaaaacgattttttttaaatcgatgaaaggatttgaaagtggaaaattttcttaaactacaatgcaaaagtataacaaaatttggatttaaatgtatttccttctagaagctaatgtttgtcagtgagaggttttgcatacacagtttgttctttcatttgtttttggtttcggagtcaatttctctgtgtctcaatctcaaaactctctgtcccctattcgcatttgaaatattggtccattggttgcagactcaatggttgtgcccaaaatcaccgcggtgcgcggtagctcgaagcgtctggccagaagaaaggctaccctagccatcgctacggcgatggccacttccgccagtgcaacgcacatgatgtccaggcgtaagcgcacctcttcatcgtgcaggtaaattttgataggcggattggcgcttggattctttcatgatgaatctgtaacccaaaaaagccgatgatgaaatttccgtttcctctagaaatgccagcagcggtggaaatgctccctccacatccacaagcgcatcatcggctaccaccgcatccatatcgaaatcgaaatgcaaatcgtcagatgcggcgagtgctcccttcgtgtgccagacgtgtggacgtcgctaccaagtccttggcactttgaggcgtcacatgcgcaaagagtgcaatcagccgaagaagtatgtgtgccgcatgtgcgaacgtcgtttccactataatttcaagctgcaagatcactactactatgtgcacaagggcgtccaaaagagggaatagttcagtttataaggataaaagtgtaaccgatgtaaaacacccgtactttaaactcatattagaacacaacacacactcaacataaaactggaataaacttgggttagattttcaatctgtggttcttctgtatctcagatcgtggctaagtgcaagttgagtggaccaggtggagtagttagaagtgcattcgattgtgtgattgaagggatttcagtgttgccagcaaactattttatgtacctaatagacaagacaaacaattcatgtagacgcgagatttaattatttaagaattacaattatcgataacctacctagagacaattttgtttagtgcatttcttaattgggcatgatgtgtcatgacatgactcgtagatgtagactgaatgttagatgttgtagtttagctaatagacttcaatgagtattacattacattctctgatcattggaaactacattgcttaaaactgggaatttgagagtaatctttagcgattgatctagaaattgataaaatttgtaaaacattttcaaactatggctaaacaaaaataattagggaaaatgtacgctattgctataagtatgtttattattccagacagtttcatttcgttaataagtcgcatagacagtcaggtttgatcttgatagtgaagttggcaacactgtgattttcgaagtttgtttgtttgaaatataaagctttgtctgtcgattgctcgctttttccattctgttctctgttttcctggcttttatgtgttttgtttctctatctcctgtttgctcaaacatttaattgcaggtctgctcgaattgagtttgaatcaaatgttttactatgacagcgaaatgccgccgccaccgataccgccacccgtggtcgttgaatcgccgccagcttcgccaccacttgcagtggttacacctgtggtgcaactgcgacgtggaaagctgcgatcgcggagaaggaaggcggcaaacagtagtaacagcaccacgaagaagagcattccaccgccaacggtgcggagcagctcggcggcgaatctggcgagaaacgcggatatgcgggacgatggcaagctccagtgtccacagtgtccgaacgcctacaccaggttatccgcattgaaacggcacctggagttcgagtgcggtatgctggagaacttccggtgtcaggtttgcgatgctggatttaagcgcaaggactcgcttaatcggcattgcaaggtcaagaagcacaataccaaatatttgttttagactgatcaaaaaagccattaaaaacgttaagataacgatgccaatttatgaattaccctgctgggaactcttttcttcaattttgactcgacttctttctcgcgtgtcccatgatcaaccaccatataaagccatatgatatctgtatatgttatatatttttgcttgctcaaaaacagatccacacacttacattttctctccatataagctcccttttttcataaatcacacacccaaacaaacaacacaccaacaaaggggcaatcctttttctcgtgatgaggtatctgtcttttctctcaatcccaacccacctttcaacgtcttgcgccacctgagattaatctaatctttaacctaacgcccgctctccttcccttttattttgccatgctgctgtgcaattgtttttttttatacctatatgcctgtttgaaatttgtttttgtttaatgccgagcagaaattaatttattaatttaccacgaaacaaaaataataatgctttcgaaactaatctggcattttgaaaaactaaaaaataacaaattgcttgttttgccttgaaaaataaacaaactaaacgaaaccaaatcttaaccttcgataatgaagtattgaacgcatgatttaccaaaaaaaaaaaaaataacgtttaattaacgttttaaaaacagaaaatcgaaaggaaaattatagaaaacagaattcgaaactgagaaaatatgaaaataccaaacgaaaaacaaaaacaaatttcaggcctgcagctgatagacgactcatcctcaagccaacagaatcatctaaatggcagcaagctggagctgatggatggcagcagcgatgactatcaccagggatcgggatccttgcatcacttccatgcaccgcaatttgatcattttcaaggattattagccggcggaaatagtgtagttggcggagcaggaaatgggggtcaggaggagagctttacgtgcccacagtgttatagaacttatcgaaggcacggaaccttgcggcggcacctgcgccaggagtgcggcaagggaaagagcatggtgtgctccgtctgcggtcatcgcacgaagcgggcagatcatctgcgccagcatgtacgaaaaaagcatccggagatagccatgcgatcgttgtttaagcgtcagcaaagagctgcagctgcggcagcctcagccgtcgaaggagaggatcagaagcccgagacggaaattgtagatctggtggacatgctggacgatggatctgtggccgctgcggatgaggatcatcagcacgcctatctagtcgaagatgacgatgaggatgaactcccgcagcatcagcaatcacaattgacaacggaggagtcgaccaccagtaactattaccggcagcaactgcggcagcaggcccttctacagcaggctcttcagcaagtggcagctgcagctgcagtggtggccagcggcaactccactacctccaccactgaactgcttaacggggagggattgtaggagggatagcaatttgaactgaggggcgggttctcctctctacctccatttcgagtaaaagacgcgtaaagaacgctatccatcctgtccaatgaaaatctctactactaactaaattaaccaaagagcagcggttgaactttgaccttttggcttgcaaaattttttatttttcctgcatttatatgatgtttaatacatttatttggctgtcgcacaaccaaaatatatgagtatttctttttccagcgctaaatcaaaaagttgagaactaatcaaataatattacaaaaaaaaagtatatatatatattttgtataaaataaaaaaaaaggagaaagctattaactaaaaataaatgcaacgttttttataaaccaaaccacaacaaatgcgtttttcaattgatgcatgaaacgaatacgaaaaagttgagacacagtttcaattgtaatttaatttcttgataattttttggtaaataacattttctcgaacatttcgttggtgccaaagttgattatttttgtgtttacctttaagtttaacttaagttttaactgcggcaaaatgtatatccatgtaatggcggcgtcggttaacctaatccacattatatattacataatacaaagcgtagttataagccaaacaaccaacaacacactgtaaaaaatgatacccaaccaaaccccaatcaaaacaaagaaaaaaaaaatgaaagaaaaaataatagaacagcgaggacacaacacgaacatatccacacaacaccacccgccatatctctatttctcaactcaactactccttactttgactctctctctctctctgtactctctgtaagaatcgttaaacagtctcagcaaatcttagacaaaaacccaatcacaattcttacagatttaaggacgctttactgtaattatgccacggcagttatagcagcggccagtgcggccagcaagaagccggcggagcatcagaccgcagccagcagcacagcaaaccaccagaaccagaacctcaaccatcagaacttgctgcagcagcatcacagcaacagcagtagcaatagcaactgtggtcctgctgctgagatatgcgagccagaagtaacgatacgcagaatgttcaaatgtggaaactctggccaggcggaggccattgtgaaccacttgcaaatgaccggtcaacagcaccagcagctccattgcaacgtcagcaactgcagtggttgtcacatgtctgcggcagcagcctcctttcagttggccaatctgctgaatagcggcatacgttcgtcgtctaccagcaaaccgcaacgtaatcacatttctgccagcggcaacacaagcagcagcagcaacgccaacaccaacaacaacagtagcggcaatagcagcttatccttggcggccaaaaagaccagtgttcaatttcattgcgagttctgcaactttagctgttcgtggcgatacgatttgaagttgcaccttaggcagaagcacggcattcatcagctgaagaaagtctaggatttaggcggaatgtgattccaagatcgagatcaaattggctgttatacatctacataaaacatgcttattctagttaagaaacgttgtttaatctcgctctattgttctgtgtctctgctaagtcaatatctgaagttaaatatatgtgtacgaatatttattgaaatgaaagttgattttttatcaccgatataaatttttaaataatgtattttttttagagcgaatgatgccagaattaccataacgtttggagaccaacaacaccagacctcaagtacaacccctttaggaaaaaatattgaaaaaaaaaaaaacaaaatgtttgataaaaattcaattgtataatttttaaaacaaagttttaaacttttaggtttttattaaatttataaggtttaacctttaaaagttttgtttacaatttctaacaattaaatctgataagtatttgaaattcgttatttaataggtatttttaatcttattttatgtatttttgttatagaaagtattttaaatgtatttattttaattattgttttccttgaaaattgtttagcgtagcctcttcagtagtttatgttgataatgaattagtatcattatgtaaacttgattttagacattgaattgtataatttgtattagttttccttcaacttctcaaaacaaatgcaacaaaattttacatttaagtttagttttaagttaagttctcataaacaaaattgaaagcgaacatttgagtcttgtttatgccaatcgattaccattaagcctaattcttggaccttgtttatgatttttcacacatgtttctttttattttcttttcattttcatttcatacaacccccacaaaacatcaaaaccaaaaaccgatcaaatcgaatcgaaacgactttaatcttcccaaatcacaaataatcaaacccgaaaccaccgacatcatcaccaaaaccacacaaatacacatcattcacatcacatcataacacaccacaccactaactaccgatcgccgggattcgatttggttcgaacccaccagacctgaagtacgactacaagcacagcatttttggcagcgatgatgcggatcaggatcaatacaaggagcgtttccactgcgccgtctgcaacaagagttatctccgcaagcgccatctgcagcgccatatgcgcgatgaatgcattggcattccgccacgattcaattgcgagttttgcagctctcgattccgtcgcaagtaccacatggtgcgccatttggtctccaagcacggtattccgccggcaattgcacagatgacaacgggcagtggttcgcgttcctctatcagcggctcgctagacctaaagtctggcggcggattagctggtcttcagcagatgggtggtggcggcgccggaggcggcggctctaccggtgattgtggggcaagtgtgggcagtgctggatcccataatggctgcgagagtcccataccagagaacctgtcgctgcgcaaggagaactacgaaaacgagaatctttcgggctcgcggtgcacttcgccactgccaccgcacattatgccgatacccacgtatgggttgacaggtgccatcactgcgatctctgccgcagcagccgtggtcgaggagcaagcagcggcagcagcagcagctgcggccatcgctgaggctcaagccaagaacaacaatgaatccggaggaggaagatccgaagtcgatgacgaagacgagacattggccgcacaagccgaggctgtcgcagctctcggcatcaagccggaaccggtgacgcccagcaaggtgcagcacctgatgaacgaggagtggaacatgaagctgggcctacagatcatatcgaattcattgctcaaggagcgattgatgaacactatgccatttgcttataacaacaactaaagctctttctagctatttatattatttattgaaacgtaaagaatctctcaatttttttaatttgtcaagagccaaggctctgcgtatttgcatactgtattcatacgttttcgccccccaagcccaccccttttttacactatgtatttgccctgtacgagaatctcaaacgtagacattccattttgaagataattttaattatgtatttttttgagtcgcccgtagacaaaatgtgtcttaaaatttgtcaatattacagtgttgaatcatccaacggatctttcctaagacgaacgataactaactcgaaacgtcacgaatttctaaacatataagacgctttcagcatgacagggatgggattactttacccaaaaagagtccagcatctaaactatttgttagtcatttaagatgaaaccaaaaaaaagtcaagagagaatatcaaatctttttactacaagttgagtaatttcaatttgatttaatccaaaaaaatgcaaaatactcaactggccacctaacttttctcttgcaaaatggaggaagccatgggaggttgatttattaaatgtaacgcacttattccaaatgatatgccaccaaaatgtacgacctagttaagttattactatactatacatttctagcatgtatacttaattttaaagcctaatttatccaaagtcaaaacgaaacagaaatgagaattatattttaattgaataaattacgaaaacaccaaatacacaaaaaatatactatatttatgtattcaattgcagcaatcgaaagttttatttttgtatagccttttctcattcccaatgtaccatcgtgtcaccacctcatcctttgttcataccccacatgatgatccatcgatgttttcgttttcgtgtatgttttttcttttggttttcatcccgccctcgttcagtgttgtcttttttttttcatccgaaaattgtgcgaatttttcactaacctatttttattactaaatttcttttagatgtctctacaaaccaaactgttgtactaccccactactccatctaccactactactccaatatctactacctactatcacatactactatctatgaagccgaccgaaccgtatccgtatcttgtcctggaaaactcaactgcctgccgcagcgcaacgatctgcaagaaacaaagtctgtcacagtattatataccatacattttttcttatatatacttatgatatatatctttgttctgtgtaaaatcttgcctcgaattgtttttgtctgggtttcaacttgatctacaatacatacacgtacatccggtgcgatatagtgcgtttcgggatggcattacagtaaagtatataactaatttgtatcgattttaatacctatatttgcttgaagtaatgttccgatgcgcactatatcgccctatataagcatgttctcagcatagttcgtgtctattttccactttcttgcttgggttctctctcatgtgtctgctttttgtgtctcaaatgcgtgtgcgttttgtggcgagtgtatgggcgtgtgcgtccttggagctttttgtgtggtttttccaattcctagtcttaatctttctctatttgataatatctttgtgtctccttcaatgaaatacttgcaaaaccaaaataaattacttaacacttgatgttttttcttacacagacttttttctagtatctaaggcggttcaacttgggtttattacgaataatatacttatatatattaattatgggctaaacttttctaattctaagaaatctcgatgtttacaatatttttttttattttcccgtcaaaatagtttaaaattttttgtttttggaatgcttgaaatgttttttaagtcgttaattattatgaatttttatttaatatttatatatatatatatatgattttctcctgattttttttgtagcttagcaaatttgacttgctcaaaaagtacagaaatcgaaatgtgtaaagcagagtgtccaatacagagatatcaaatatacagtcagtcatacacgatcaggaaacgtatcattctatatcaacaatccaaccaaattcaactcgatcactttcacccactcacttacccatccgtcttcgtgtgccccaatctccgccccgcacccgcatctacattgcagatttcgtactaacctggtatcagcacgcctgcgatcagtgcggcaagtcgtacaagactcgcaagagtctcagtcgccatcgacggttcgagtgccgcttcaccaccgaaagacccatcttccagtgccccagctgcaattatgcggccaagaggagcgacaacctaaccaagcacatcaagacccattttgccaaaatgaaaaaggacttcctgccgctggcctttcagatgcaggcctccacgggaatagccaccaaatgggaggccaccgcatagggaggtggccccaaaaacaaaacaaaaaaaaaacgccaatcacattatctccattattaatccagtccttcaagttcagttctatacaaattgagttcttaaaacaaaggccaaccaaccaggacagactgcaatgatctactgagctcgcgcaggagcacactttatgcttatcgaacgaacggcaaagagaaaaacaaattttagctttcacttcgtgttatatgtatggtaaacacgatttgcataaatttggttaatttatgtaaatggcatacaaaggcgggcagaaagcaaccaacctgccctgcttaaaattcaaatcattgcagtcgacttgtgtgttggttcttatttaacattcgtagtttagacctaagttaagcgcaaaaattttcgcaatcataacttatgcttcagctagtctggctttttcctaagttaatttaagtttaaaattggtagtctttagtttatagtccagtaagccaaaaagtccaaagagaaacgtgaacgaaactaagtcagggaggggatgggatgaactgctgagagcagttcggggtcagcgacccgcacactttgcattcctaagaaaagaaaccaaaaaaaccaaaaaccaaaagacaaaaagtgaaacatttttcgatatagtctagtttgtagttaagagaggccatgccaaatcagcgaaattccaaatgaaatgaaatgaaaaaataattaaatcaactaacactaaacttttgtggattaagttcataaaatctaagttcctttgctagctaggattatgactaactaactgatagacaaggatctcaaatgaatacaaatgaaacgcaaccaacagtacaagtacaacaaacaaacaattaactaaaactattaactaaacagccgcaaacacatagttcaaatgtataacacacatatatttacagagcagccaatgaagaaaggaataacttagagcccaagtcttaagcagttactatatattttgtgaaccgttgatgaatgtgaatcgaattttgtgaacacacacacaggagtaaaacaagcgaaaatgatatttagctagcgatctaagtaatttgaacttaaacctatatttatatttataagcaaaatgccactatttttatatgtcagagccgccattactaagtattttttatatgcatatatataaatatgaatatttttgtaattcgaataaatttgtattgatcaagaaaacgtttgtataactaatgggtcgctctctcctcgtctctctgccgtccagtttactaaacatgtttcattgcagaccacccatgtcaagcatcatcatcatatgcatcaacttcagtcaagatcagtcatcatcccacagcgttcattcaaaccaaatcaatacaaaaaaaaaaaaaagaaatcaataatgaaaaaagcaaacccagcaaaaaataaaatcaagccaatctgcaactactgctgctagctctgctcacgcttcaccatgccacgcccacacaaaatacaaaaaaaaaaaaattaaatcaagcaaaccaccccgcaacacacactaactgtaaatatcaccaatgtattactattactatttttttaatttataatactcagtgcaaaagttaacgttaccaaattcattctatttacgaaaataattgtttacgaactctaaaattgtttttcctactgaaatcttgttactttttcaaaacgaaatatgtgctctagttgtgtaagatttgtttatttttttttttttttttgcccaatccaatggaacatgccgacactgatgaaatatatatctctctttcttctccttctatacaaatgctaaacatctaatttgtagctccaagcagctatgtctccaactcgagccaaactccaccgccaattgggggctcatcatcggccagttcggcgcaagccctgatccgcgactattggtacgagctcaagttctccgacctattcaagttcataaatccggatggacgttaccagtgccccagattcaattgcctgaagagctacaaggacgccagctcgctgcaacgacatatcaggtgagtagtatccatgatgtggatatacattataatcgagattttctcctcgatctgtggtcggtcgtctgtctgatgatattgtgatgatatgtgatactgatacctgtctatctctgcctctctctctctctctctctctatatatatttatgcgatgactccgtataccccagatatgaatgtggtggacagaaaaaatttcgctgtctgatgtgcggcaaagcattttcacaaagctcccacctaaagcgacaccttgagagcggtgtctgtgtcaaatattacttatgagataatgttttctttaaaatcaaatagaataagcgttatcccaataggcagaagatcaactgatgatcgaaatgatgatcatgaaaatgaagatgtagaacatgaacaagattatatacacgacacgtatattacacacacacacacacacaaacaaacacacgcaatacagcaagaggataacaaacaatgagaacaaaaggatatatagaacaattagataaaaccaagaacaattacaaataacaaacaacaaaacgaatttattggatgccacatcatttataaaggaaatggataaaaaaaaaaaaccaaccaatctatatatatatagtatatatgatgagaattattgttgaaactgagcattaatgaaacaaacggaatacttagttaatgaacaagtgaaaacgaaatatttaacaagctagaacaacaatatatacacatatattaaatgcagtcagtgaacattttataggattttagtaaaatgtaaaaccacataaaaacctaagaaaaccaacaaaaaaaaaaaaagaaactaaactaagtaatagaacagagaggcaaacaaacaaaagttaaagaacaaaacataaaaaaattaaagaaaaccgaaaacagaaaacaaaacatacacgcaaggaagctaagagcaaacaattttagtcaaactaaccaaaactacgtaattttagttaaaatatataaataatatagaaactaaaccaagcaaaacttagtgaaattaacaaatgagagaaatgcatataatacaatataacaaccgacaaaaggaaagagaacagagcagaacagaaccgaaacagaacaaaattaacagaaatgcatataacaaaacgtactgtgtttatttgttgccaaatatatatctattatatatatttctaatatataatataattaatacgattcttgttatgccacacaaccacgaaattaactaaacctgaaatgcgagtggatgacatcaaaaacaataagagcagagcatgaagatcatcaaaagataactaaatgttattgtttaagttgttattatgccaggtacatagacacaccaacacacacgctgcttacgtacagtgaaacttctggatgaatgaaaccagtgtccagatatagaggccccactgtatgtagccagtaaataatacactttaagtctcatagagtcaactttgtttaggcatcacgagtgtttagcagaggcagatggtcgaaagggattgcaggaagatttgttacatggttccaagaacaaaaaatagtaaagagagtttatatacatatatacaaaacatatacatatgaggaaacaaccacatctacataaaaatatacacatatagaactatatataatgctatattagcaaaaatgttgtctgttgaacaaagagaggatattaaggaaacggaaattgttagtcagtgacgaggattagatgttggtaacatgtactcacatcgccaaaagtaattgtatttgtatgattaggtgcgtgcctgtgtgtgtgtgtgtgtgtgggtgtgggtgtgtgcgtagccttgtgcgagtgtgtgtgccaatcggtcaaaggattttttaccagagaaaaagaaaacaaaaaataaataaagaaatagaacattttgtgccattagaaattctccaccaaaactgaaagtaaaattcaatgctgctttagtgacgatgacgaagacgatgaagccatagaagagatcgaacaatatactcatacatgttatatgtatatgtgaaccaatatgatttgttgttgcattcgaagacgaaacacgattctgttgacaagtgtaatttatagtacatttttgttgtgagttcaaagattgagtctagtgaaatttttgacggcagaagtgacaactaaatgctacgagagtgccattatcaaacaaatttttaatatatatatatataaatgataaattattgaaattatacggaatacatatatatatatatatataccctaagcaggaggcaactaaacataatttctagttaggaacgcagtaaggaaagtgaaaggagcgcagaaaatatattgtttgttgcttgttgattgttaatttttgggttgcagaacataacacctaagcatatatgcaagatacatgtatatgccagtacaataaacaaataaaataaaaatacagaatatagagaacaaacaaagcagcaatagaaacctatatgaactcgaatgaactagacaaattatacacagtataaaggaagctaaaaacgaatgaaaatcaattatagtgaagtactaactgcagtttaagaccgatttgacactaatccaaaacacgcaactgaccgatctgcctaaagaaattgattaattgttagttgaattgaaaagtataataattcattttggcaactatccttgcagcattcggtcggtccgatttgtgaatttagtgtcaattatcggaattagcacatgttcacctcctcccctcccccgtaaataactaaaaccaaaggcaaatttttgattgatttatttcaatttgtttacaaaattttgccacaagtgcaatacttcgaaagtttgttaacaatttgtcttgtgcggctatttgccaaagtcaatttttgaaatgaatagtctaaagaaccattttgtaacccaaataaaaaaaaaaacccaacctccaagcgaacaaggcaaattgtgaaactcttcgaaggaatagaagaaatattgcttttaaattagtaaaaatttaattgagaattattcgctttacttgtatgaataatgttttttgttaaactaatttactaagaccttgttgcgagtagctaaattattattattatttttgctgttaaagtttagataaagggaaatgaaacatggaatgtttcgcaataacttttttgttaaatcgtttttctttaaattagttataacactgttttaatattattattacgtatacaaaaatatatcgtttcacattaatttaaccagagaactctttatgttttaacttttgttatattgttaattaatatttattgactaagagcagaaaaccgtttgcaaaaaaaccataaaaaaattagagttaactatgtaagttacaaaataatgaacaaaatatactccaaagaaaccaaccaaaaatatatatatatatatacacacatatatacaaggacatatacatataccaatatatatatattttagacaaaaactgaacaaagcaaaaacagcaaacagacaagaaaacgttttagtaaaagtgtatttggaacaaagaaattgccacaacagtctaaaaggattatatatatataatcaaaccaaaaacaataattaccagaacaagaacaaccgtaagaaaagtttaattgtaacgaaagttgtttattttttgtagcgtaatatttaacaacaatgaaaccgagtaaattgataaatgatatatacatatatttattgttaacgaaaccacggataaggcgaaattatgaaacaaatttatacaacatgaataataagaaaaacgtaaacagagaaaaagcaagaaaaactttcattgacgaagctgatattgttagtaccttaaaaccatggaataaaacaaaaaccaattaataattattaataattataataacaagcggtaggattaaacaatgagaaaaacacaaaaaataagatttgatgtaaccaaaaccaagctaaggccatttgagattatgttttaatttttcgagaaaccatttaaccccaaaaattgttatttttgcgaaaactgaacaaatggcattatatatggaatcgtttatatacacattgtttgaagaaagtggtaacagaaaaaccaacaacaagaataataaagattgatattgaaatgttgaaaccccaaaaaaaaaaacacagaatcaaggaccttaataattgttactgggcattgtgggggtcgccattccttgtttgccgcaactaatccatttccctacttacagatgaactatctcgaagggtcaagagtcaggtcaatggtttgttcctaatgaaaattgaaaccattgctaccgttacgccatagtagacggtactacctgcaactgtgggccaagtcattgcctcgaattaaaagcaacttctagattatattttcaattaaaacaaaaaaaaaaaaaaaaaaaattatttaaaaaaaaaaaagagaatgaatggtaagattggttatctcattttgttctagcttagattgtaactttcctctagctaccgatgtaactttctgctacagtaactatctatcgcttcgcaattgaactggaagttggttatacaagaacatgcatacatatatcatacacacagcattcttcatcatcagtccccatgtgatttttgtttaactatgaattcgcgcccattaaatgtgcatgtattgtatataagaaattcgctaacctatttcgtttctttctcgcaactcttttagaaaactcctggacgatatccgtgaaatcggtcacctcgctgaacaatgtctcgccatcgaacaactcgcacatttgtccacgctgcgagaaggcctacacgtacaaaaagaatctctccaggcatcttcgatacgagtgtggtcagctgcccacggagaagtgccgacattgttcctacgtggcgcgctacaagcatagtcttaatatgcacgtcaagacgcagcatccggagcaaatcagtgatacattcgcgggttcttcgggatctagcgatggggtcagggatagacggggccgatcactagttcgtggtctcttcgattcggctaagggggaaaagttccttgattaccttaataactagtatttagatccgatctcgggcgaaggtaagttctgctggaagggggggggggttactgaagagagtaagagaccagagaccacttctaatgataataaaaatgccttttgtaaccaaaattgaaacgtgtcattattgaattcttctgtagtccttaagttagttaagcctttttaggggcgcggtttttattcctttttttggctgtggtattttgtttgtccttggttatcatttaattgtgctgtacagcaaacacaacccaccaacacacacctatacataaagctttaaatttaagaaaatagcttaagaactaaaacgaaaacggaacccgaaatttgtttgcttgttttcatcaactttagttgtattcaaaaaaaaaaaaaaaaaaagttcaaaaggatactattagtgacaggagctgagcttaactacttccactaagcggtaaactcttgcaacccaacctcttactaaccactattcgttcaactctgcagcatccaagcaggacaagggcgagcagaccgaaggagcacaggatgaattcgaactggacgactgtttgctggagagcaacgacatagtcatcacccagaacaaggatggattcgtgttgcacgtaaagaagctgggtaacattacggctgccaagctggaggagaaccaggcggtggcacaacaacagggccaagcggcagtgactgtcaccgggccggctggacaacccacgcccacaatcacggaactcttgaatgccgccgccgcttcgcactcggaacccaaacccacactgaccactctgaccagtacgcccattaaattgccgtcatcggaatgcggtaagtccatatttgtaatagacaagcaaagctagaaaagtgacacaatatttatacaaatgaatgatagtttttataaattgaaaaactagagttttcttaaagttaaattgaaaatttggaaataaataaatgtaatatattctctctataaaatacgttaataaacgattgtattgtattgtattatgtattatgattttaactaataagaccttttgtacttttttccaattccagaacttatcaacattaaaaagattataccggcaaccacaacaattgccacacatcatccgcacacgagttcgacaatcatacatccccatcacatcattcagcatgtgtcccaggaaccgcaccaccaggagcaccatcagcagcatcagactattcacattgaggaggtgccgcagacttcgcaacagcaccaccagcagcagcatcaccaccagcttcagacggtccaaccgacccacacccaagtacaaagcataatcacagctcatccgggccagactataaacctggtgggtctgcgcaatgtgcagttggccgattcgaagcccatagcctcgaggatacgatattctcgtggaaagatcatcgggccgacggtacaaaacctgcagatcgtggaaacccatgagcccatccagcatcaacatcacgagctgtcggatggcaccaagtatgagattagcgagattgatctgaacaatcccaatgcatcggcggcaatcataagtgacttagtgaagtatgccgagatcgatgatatcgagctgcccgacggcactaagattggcatcggctttgcgccctcggagattactgagcatatgcagacctccggcggagagacgcacatcactacaattgagcacgagccgcaggaactgcaaacggtccatcagcacgaacagacgcagcagacgcatcacatacatgccggccaactgcagacgcatcatatccagaccgtggtgcagtccagcagtggccagcagcagcacgatcagcagcagcatcatcagcaccatagcattgagctgcaggacgacgatggtgtggagacaatcacacccgaagagcttggtatgcacgattcgagcaagagctacaccattctcaccactcgtcccatgaaggaggagtcggagcacgatccttcgggcatgacctacgaactgtcgctgagcgactcgtctctgggtccatgcgatgatccagagtcgcggtatgtgtgccgccattgcggaaagaaatatcgctggaagtcgacgctgcgtcgccacgagaacgtcgagtgtggtggcaaggagccgtgtcatccgtgcccgtactgcagctacaaggccaagcagcggggtaatctcggagtgcatgtgcgcaaacatcatccggagaagccgcagctagagagcaagcgaggccgcaaggtctaggcgaaagttgggaggattgtgagtacacaactgttgggtgtaaagaagtaaccatttttgaggttaagaccagtttcattattattacaactattttgtatcattttataaacgtgtacaccctattaagcttaaagttcttatttgttgattatttttattaagtttataagttttgacttccactcggttctcaaaggttcaatttttcaaacaaacaagcattgtgcgcactcaattacatttttatcaggctttaactttaatgtcttcatatttagtagaattggttatgtatgtcctttaattcatcgtaattttcaaaattacaaaaatcgaagccccaacaatgtcgacaaaatgaaaacaaaaactaatgtgcaagtattttcatggaaataacacaaaaaaaatataggatcaactatattaatggaaaatagattaacattaagaataattaaaaacttatttctgtatgtatgtgtgtgtgctctcaaaaaaatatgaaaatatatataaaaaatcttgattcaaatctaagttatgtagaaaaatcttaactgaagtcctgaaatttttttaattttttactgcaattcaacgttggtgcacataaatttcatgtaacctatttaaacaaaacctatcgacatacaaaaattgaagaaaattgtaaacttatctatattggaggcttgcaaaaataattttgtaagaatgcgttttcaaatctttatatatatatgatatatgaatagcattcaaaaaatatgagtgtaaggaagttatttttctgtaaattgcaaaaacttaacaatctactcgaacttagtaaaattgattgtacatcggaatagctgagtaaagtgtgaacattttgaaacatatttccgcagaaaaaataaaatataacaaaaatctaagcaaatgtattagaacaacaaatatacatacatattatgtctttttgcagttttttgtgtgtaaatcaattatttgattgaaattaaacatttattatgaatacttattctatagaaattatattttgaaaactagttgtaaaaacaaaaggtcaaaataaaatactataaaaaccacaaattcaaatttgaagccttgatctttgtgctaggtagaataatgttttgtaaaaagttcatactaacatatttctctttccaggtgaccgatgagacatcattcagccagagactgctccgagttagagttagctagctaacacttaagatcatcactttccctttccgagcatacctaatatatttctcttttcttttagattgaccctgggaccgggacgtggattggaactcgcgaatcctgtgccagacatccgcattgagctaaccttaagtaaaaacgtgccacatgccaaattgtaaagggaaacaattgccattccaatactttattattattaagagcccgaaatctaaacgttcgtttctgtatgccactaaaaagtaaccagacccgaattgaacccgaacctgaacctgaacctgaatccatattccccagccgtgtttatcgatgtgttcaagcaaaatcaaaacagcaactacaaaacccacccaagcagcactctccagctacagttcaattaatttagttacccactttttagttttttaaatttatttttaaaataaatatgtttacaccctgcactaattggccttaatttgctcaacgttttattgaaagagagagagagagagttttcttttatcttatcttattacctgtatatatgtttattaatttgtactctaattttgaatcatgccacgccatcctaacgcttacttccttactatgtttttatacacgtgtatattcatccattaaacgctttgactaatttatattatttgctttgcgcgtccacctcatccagctcatccccagccaactagccaactactccaatctcatttgtgtgtgtcactctatgttggttatctgcccagcttgatttaacagctatattcctaagtgttaagttggttttttttttcgattttaatgagttttttttgcagttgtccttgtgtccagtcaaaagtaattctatttatttttcgttcttcttttcttttgtttttcttttctcgtttttattttcatatgttgtgcgctgcccccaaacaaacaaataaactaaacaaactccacaaatacaacacaaatccacgcttgaaattgtgataaatgaaacgaaaccaaatgaaatgataacgtagatctgagtattacgcgtatagcgggactcacctggaacgaatggaatgcccgcctggccatgccactggtgaccctacgcgaaggtgtccagccgctggtctttcccaccgatctgtcggtggataagcagcagggagccgcaggtctgaccgccaaggatgtgaacgtcagtggccgaaagacgcccaccgatggggggggatgcaagagtgagccacgggctgcctcaacgcctgccaggacacacagcagtagcaatcacagcagcaatggaaatggcagtggaaagcccacaaagaccagtagcggtggaaaattgaatcatcttaccgaagaggaggccaccgccctgatgctgaaagccgtagccgagaaacaggcagccgcagcggccggcaccgagttgagtttcggtgaggatcaggccagctcggggaacgggaatagcagcgactatccggccactctgagtggagccgttacctttgcggatgttggcggcccagctggactatgccacatcaacatcctgaacagcatcagcgcaatgaacaatctgattagcggcagtacggcggctggcgttggcataaccaccggatcaggtcaatcgccctcaaatagtggccacaacaacagcgctggcggcggtagcagcgtgctgggcggtgcggacaacggtgctggacacccgtgtcccgtctgcgggagagtctacaagctgaagtcctcgctccgcaaccatcagaagtgggagtgcggcaaggagccgcagttccagtgcccattctgcgtctaccgggccaagcagaagatgcacattggccggcacatggaacgcatgcacaaggagaaattcaagctggaggatgtgaagaactttgccggatccagcggcttagatggcgacagcagtggagccacagcgacagcggcatccgtggtagcagctgcagctgcgctggtcagcggcgtggagttgcatccccacttctcgtagagaaaccaacactctattgaagaagacttgtataaaaagttaaagttgatcagttattagtgttgagaaaaggcgaccaactaaacgaacataatcagggataataaggacgaaagaaaattacaagaaaatatatatttaatcacacaccaagctctcgggaaaacggaatcagtgtgccaaattaagcttaaaacaaaacaaaagaaatcttaaaaaaaaaagcgaatgagtaaaaacaaaatgaaatagttttgtaagatgcctggatgtttcgaaaaagataatacttgttcgaatggaccgaaaacaatttgttgcaaagcacaaaaatttacgccatttcacataaaatatttttttgttattgttattaattgtttacacgagaccgatttgaaaatctataatttctatttttcatgcaaacagcaaagtgatcagtaaaatgattttacacaaaaacaattttagatattgcaacattccacaaatcgtaaaaatgaaagacaaatattgtacaatgaaacggttaagaattattcattaatagcataggcttagcatgaggaatataaatatatataaatatatatatatat

SEQ ID NO: 27023 - DNA, 2961 bp, DROSOPHILA
caaacggcaactctcaggaataaaatcgtcgtcgctccgctcgttaaattctcgttgcttttccacccacataaaaaatcaggataaattgttagtagtctaaaaaacagtgcggattgcataaattcaagcggagcaccgattggaaaaacacccacggaaaaaactatgtgatgttaaatacgtttttgtgtcgagtgcataatttgttgtaattaaagttcaactgcaaatgcaaaaagacgaaatatataataatttataggtgtttgtgagtgtttgcgccccctctcctgtgcaacgtgtgggaaagagagagagggagtgagaaagagggaacgtgaccgagttgccatgaaaactccaatggaaattcagcataactgctgacacactaaacaaaactgaaaaaagaaccaagggcgaaagctgtttattttgtttaggcacctaagtttggccaaattataatcaaaaaacgagtggcgaaaaaaacagcaagtcagagagagcgctcgacgttcggccccaaggtcgtgggcccaaacccccaggatccatttccaacaaccccatccaaccacccgagaaaccagaatggatgacgatcagcagttttgtttgcggtggaacaaccaccagagcacactgatcagcgtgttcgacacgttgctggagaacgagactctagtcgattgcacgctagccgccgagggcaaatttctcaaggcccacaaggtggtgctgtcagcatgcagtccctactttgctaccttactacaagaacagtacgacaaacatcccatctttatactcaaggatgtcaagtaccaagagctgcgcgccatgatggactacatgtaccgcggcgaggtcaatatctcgcaggatcagctggccgctctgctcaaggccgccgaatcgcttcagatcaagggcctttcggacaatcgcactggcggcggagtagctcccaagccagagtcctccggccatcatcgcggcggtaagctgagcggtgcctacacactggagcaaactaagcgggctcgactggccaccggcggagcgatggatacgtctggcgatgtgtccggttcgcgcgagggctcctcgagtccgtcgcgtcgtcgccgaaaagtccgacgtcgcagcatggagaatgatgcccacgacaactcaaactcgtccgtgttacaagccgccgcctcgaatcagtcaatcctccagcagacaggggccggtttggccgtctccgctttggtcaccacccagttgtccagcggaccggcagccggaaccagcagccaagcgtcgtcgacccaacaacagcagccattgaccagcaccaacgttaccaaaaagactgaaagcgctaaactaacatcctcgacagccgccccagcgagcggagcatctgcgtcagcggctgtacaacaggcccatctgcatcagcagcaggcgcagaccacaagcgatgccattaacaccgagaatgtacaagcccagagccaaggtggcgcccaaggcgtccaaggcgatgacgaggacattgatgagggtagtgccgttggcggaccaaactcggccaccggacccaatcccgcctccgcctctgcatccgccgtccatgccggagttgtggtaaagcagctggccagcgttgtggacaaatcgtcgtcgaatcacaaacataagatcaaagacaacagcgtgtcatcagtgggctccgaaatggttattgaacccaaagccgaatacgatgacgatgcgcacgatgagaatgttgaggatttgacactggacgaggaggacatgacaatggaggagctggaccagacggccggcaccagccagggtggcgaaggatctagtcaaacatatgcaacatggcagcacgacagatctcaggatgaacttggactaatggcacaggatgcacagcaacgggatccccaagatctgagtattacgcgtatagcgggactcacctggaacgaatggaatgcccgcctggccatgccactggtgaccctacgcgaaggtgtccagccgctggtctttcccaccgatctgtcggtggataagcagcagggagccgcaggtctgaccgccaaggatgtgaacgtcagtggccgaaagacgcccaccgatggggggggatgcaagagtgagccacgggctgcctcaacgcctgccaggacacacagcagtagcaatcacagcagcaatggaaatggcagtggaaagcccacaaagaccagtagcggtggaaaattgaatcatcttaccgaagaggaggccaccgccctgatgctgaaagccgtagccgagaaacaggcagccgcagcggccggcaccgagttgagtttcggtgaggatcaggccagctcggggaacgggaatagcagcgactatccggccactctgagtggagccgttacctttgcggatgttggcggcccagctggactatgccacatcaacatcctgaacagcatcagcgcaatgaacaatctgattagcggcagtacggcggctggcgttggcataaccaccggatcaggtcaatcgccctcaaatagtggccacaacaacagcgctggcggcggtagcagcgtgctgggcggtgcggacaacggtgctggacacccgtgtcccgtctgcgggagagtctacaagctgaagtcctcgctccgcaaccatcagaagtgggagtgcggcaaggagccgcagttccagtgcccattctgcgtctaccgggccaagcagaagatgcacattggccggcacatggaacgcatgcacaaggagaaattcaagctggaggatgtgaagaactttgccggatccagcggcttagatggcgacagcagtggagccacagcgacagcggcatccgtggtagcagctgcagctgcgctggtcagcggcgtggagttgcatccccacttctcgtag

SEQ ID NO: 27024 - protein, 787 aa, DROSOPHILA; identical to SEQ ID NO: 1350

SEQ ID NO: 27025 - DNA, 38189 bp, DROSOPHILA
acacataatttgtacaccgaaattagagagaaaacgcgcggcgatgaagtcatgctggaagccaaaaataaatcaacgccgatcataaaaacgtttggagagtgcacaaaatataatttgcgctttttagtgggaaatgcattgcacacacaagccgagaccatctttcatctccctcgcacacccttaaacaactgcaacgagagatggagagaggtgtcggagtgggggagagagagagcttgctcggcaacggtaattttaccatttcgaacattatggcttcgctttgctgcgaaaaaaacaagcaaagctaaagcaacaacaaaatctcgccccatggtggaaaacaaaaacaataccaatgcgaatgatattttcgaactccgccaaatatgtgcaagcagagttgtcagcctcgttcgttgtcacttacagtatatgaggttctattgaacaactttattaattagtacgtacgactcacatctcactgtctatgccaaatactatttaccacgtagagaccctaaacaatttttgtgatattcatattcaatactttctccaattatatttaacattgtcttgagattagcaaaaacgttatcgtgtttttatagacaggcttttcaagtagtgtagttagtaaatttgacgtccgttggaaacgtatttccttcttccttgatgtggaacttaaattaggtggcaaccagataatgaaaagcgtgtcctccttctgcatcatcctaatttgtcgatcttttgtcgtgaattggcaactctgtgcgccaagcatacaaaaagcacacgtctgaagaggggtggcaaacaggcgacgtcaacttatttttcgaactcacactctcattcgcactcacactcttcgggtttcgcttcggcttcgtttccaactctctcggcgctcttcggggtctctgcttatgggaacctttcgttttttcgagcaccagcggaaagtcgcgtcagtcgtcagtttttcttcagtggcttcgcgcgtccgcaattttcagtgtgtggtgcgttgttgctgctgcctactcttttctttctgctctccacggcagcgggaaaggaaaatacatacacatgcatacagggccccatcacatacagtaaaaataaattcaactttattgcttttccccccgtcgcgttatcgtgtgtgtgtgtattagtattatatatattttactatatatatacatatatggattggaaaagcaacaccaaaatttgatatgtgcaaagtttattgacgactacgtgctgcctgtgattctatttcggtgtgtatataaaattgatcaataatgttttaaagtaccgcttaataatatacaataagaacttgcatttgaactgtacctggcaattatctgcctgagattgtgtgtgtttttgcatatcgaatcgatacttccagtggtgtttctatcgatttttccctatgctcacttcacgggagaaagcttttcaccaatgtacgaaaagagacaggcacagacagagcaggagagggagagctttcccacaaaatgcaacgctgaagtaaatgacgggcggttttcattaattttcacacacgcacacactgccagtggctcactttccatgcaaatgaggtcaagtgttgcagtgggaaatgttttctacaagtacacgtgtatgtgtgcgcgagtaggaaagttatataagcttttcattaccgattgcgacgagggaaagcttgataaaaaaaactatgattagtaaacacgaagattgccaagagcgagttcaattaattgctttctattataaactcctacaaaaaagcacgtttttcatttcgatagattcccaaagtcttggtggccgccatcttggtttttcccccacacataaaatattttgttcaatgctaggctctctcgctcttttggctccccttttctttctctcccgctcattttgtcatactccctcgtcagtttttatgtttgttcacgaaaaacaaaaacaacaagcgtgaaattttctctctgcacttttcacacacacttagaaaagtgggagaaccagacggctcagcatgaggcaaggaggatgatgaggaagggagagagagaacagtcgccacatatttttgtttccactttgtgctacacttctgctacgccgcttttgttgttttcttttcgacacgtttacacatttccatttttcatattttcgtgtcgcctaatcttttttatgggactgcgcgacgttgctaaatttcacttgtgacttttgcaaaagtttcatttgtttacattctacgcacatgtgcagaataataacaataataaatgagatataaaaaagcttttgcgcaacaagtgtagaaaagcaaaaactgtatttttctctttggtttcttgccttaattctttgtttacaatttaaacttgtacacttctttcaagtcatcaactttttttccttttaaaacaccatgaccttgcatcgaatttctgacctacacacgcacgtgcaaaaaaagtttaatatgtgtcgcacttttctattatccactattcttaatgttcttgtcttacagtaaacagcaaaaatatagaaaaaataaaacgaaggcggggaaaaataatgagcggccgttatcgcaacctgctctttggccgacttttatttttgttagttttgatttacttattcgctttgtggccattagcaaaaaagttcattgaacttttctgcgttttattttacggtttattgttgattattttcggtggctcacttttttcactttcacttgaactggccagtgtatttaacaagtttttgtgtggctatatccaaattataaaactaatatggcactttaaaggaggtgtttctagtagttggtttcattaggaaagtcttaaattgaatttgatttaatgttgatagttaagtgtcataggtcataaataaattgaagtattagcttgtaacataactgttcgataaccattgagaaatggatctgctttttatcgttaacttgcataactggcagttgtagataatgcccttcaaagaaatctcaagaaaaaccaacaaagccctagagatctagaaaagaagaataatcgacatcatcggcgggacagatctccatcggtgcccatgatagatatggatagccccacgaaaacctaaagcatcgacttcctccgctcccacgcaaatgtacaatacaatactctgagatacatttacagatacagatacattcgcgcataacaagcccttaacattcactttaaatagcttttcgagaaaacaagtttttgtggttgacgtttttttttttttttttttttttttttgttgttgttatacatttttcgctgctttaatggcaaaacgacattttctgcggccgaacagaagcgagcgaagcggaaaagtaaaaaaaagaaagaagcgtggaaatggaaaatgatatgtttcaactctcagatgcaaattatcgttattcgtaaatattatgtataaaggttgcaagaactttgatcacacgatcttttagtaatacactatttctgatagatatgctatatgatgaacaatgcgtttaggaaccaacatgtgacttacatggaaaacaactgcgatccagctggcaaaaaacgtagcttctttctatgaaattataataactaatcgtattttgcgtggtttactacctaccagctcgactcagaatggctggcacacttgacttggcttttctcaatctttgcttgcaagcctgtttgctgctaaatgtgcaatgtgaagaacaagaaaggcgacgggctaaaagggtgtaaaaataaataaaatgagcgacagacgacggacgcctacatacgtgggttttcagaggtgttttttcccccagttttgcgttttttgggcttcgagccgccagagtttcaatggtgtgtgtgtgtgtgtttctgcgttgctattcagcaacattttcagctgccagaaattaaattattgaaagtcagtgcgagaagtcgagtcgtcgtcgagtttatttttacgtcgtaaatatacaaattttatgtctcacaaacgcagcacacacatgtctatgtggcgtgtgtgtatgcgttcgagcagaaaaaagattccactttatgcaaatcttgtgggggaagttttatatttgttcttggcctccactcactctttttttcctcgctctctcccgcttcctcctcccccctctttcttattcttaagttatttccattttaaatttgtttttctggcggctgcccagtgtgtgtatgtgtgtgtgcgcgtgtgtgtgtgttggcgatttttctggcagcgatgtgaaatgaaatgaaatgagtttcttaaactggtttttctgccaagtgatcggatcggatctcggatctctaaaccaacaaacaaaactcgacttgccagccgagaacggggcgaccacccgctcctccgtttcgttttttcgaaatggcacagttcttgtacattctgtcgaaccggtttttcttttgacttttgcacacacaaacacccatacacagacacacaacttacacacatactacccagaacagaagtcttgaaaccagccccattatggtttccaagttcagagcgctctctccatctctctggcgctggccaagaattttcattactctaaaacagtggagggctcgggctccagactttggcggcacttcctgtgtgcccaaacgcaagggacgacagttgtgatccaacatctgccggccggcaggacgcggcaaaatggagggaggaagggagactatgactgcatatacacaagcgaacataatcaggagaggggggatcggcttagtttaggggttgattgcaaccccaaaaaaggccgggaccggcctacaggaccctctccctcatccttctcctaacttagcgtaaaccggtctgcttcggttctccccgtggctcaccttttgccgtctggcgcgtgcttagaaaaaggggaccgctatcgcccgacatcctttatattattattatcccgctccccatcccacccgacatcgccgcatcccattttcatttccatctggcactcgaaaagtctgttggcatggaggcaagaattaatgaagcctagctgggccaagccaaatggctgaattctaaaacaagtttacgacaaaaggatggaaatgctaatctctggtacccattccaatcttaattcattgtaaaccgatctgcgcttacatagaaacttacgctacatgctgcagaaaaaaaacccattaatctgacatctgacattgatcgccgataattaaagcagcaacccaatcaaattgcgaaaaatataacattagtttttcgtactacagcggttgcaatattaaaacaagttgagtttttcgctaacaacgtttcgtaaaatgaaaattttgaacgtagtttgatagtagatctcaacacaaggaaatatgaagcaactagcttataaaaagtgtgaaacgaactattcgttctatttgcgatccagcagttgctaaaacaaatattagatgagtttttcgctaacaacgtttcgtaatgtaacaaattttgaacgtagtttgatagtagatctcatcacaagataaattcttttttaaattcttttttaaatgatttaaaatgttatttgttagaagcagcagctcgcccataaaacgtgtggaaaatgcattaaatattctccaaacaatcctggcggttgctaaaccaaagtcctgttgagtttttcgctaacaacgtttcgtaaagtgcaaattttgaacgtagtttgatagtagatctcagcacagaatttctcgtatattgaaagtttttagagcattgaaaattataattattataatatgttttaaacaagaatcgtgatctcaagctcttgttcaacatattagcgatatgcaacagcagttacacagtgtcttggacttatttttgccagacattttcgaatgcagttgccagatgaaaacccagttgagattttcgctaacaatgctccgtaaaacacagttttggacatcgtttgatagtagacctcaacacagtctctcagtctcttgtcttggtctccaatcaccaagtgctcattactccacccccatttatagtacatcatttgtgggttctctcgtgggaaaaccgaaccccaaagaagtgcgagtgcctttgggcccaactgtacttttccgcacacgcacacaaacacactggctacatagctcgctctcgctctgttcggtcacaggatcccaattcataatcctccaccatctgcgcaaaaataaaaccttgcaatgtgcaaagagcgcacgtcattcgtttccaaaaagggagaggaagcgggagagcgagagagatcctttttcgcctccctgcagtttttacctacttctctttgtgttcgacttatgtatttcttttcgtagtagtgtgtgtgtctgtggaaaacccctcgaatgcatcattattggggtacggctggatgttgcttttcaccgcttctcatcagtgattcattcagagaaaaatgcaggtcaaatgatattttcacttaccatatgagttcccttaaaatgaaagctcgagtttatgtattctgaaatttgtttaatagcagatgtaaatttatcgtcatcaaattgaaatgatcatcattatccttagtagtttttcttcatgtgtattttgtgcgcatgccttgcaccttccttccatatgggccatgtgttgtgtgtgtgtgtataactgaatctcgaaaaactgatccctccgcctaacggtaaatgactggattcgcttaccctgggggtgattctcactgtctcttttccccacgactgtctagtttttttgcctggatctggcgaaaagtaaaaaaaaaatgaaactggaaaacacaaagggaaatgaaaaagggagcctcttgtcacgtagacatttttgtatagccatctccctcgctctctgccgcggagaacagttagttttcagtattaggtatgtacttctccaaaagtggacctttgtatattatattatctttttggagtttctaaagatgtcgaataacatcttatgaacaagaaacaccacgaaatgaacgcaaaaaatcaaagtatgaacattttccagtcaattttcgctacctgtctgtgtttttgaaagtgtttgtgtgtgtatttcccgttatttcgctttggcacgattattaccgctgcagttctcctttttcctttgagctccttttccctctgccgctgtcggcgtctctgcttgcctgccctctcactcgctccttttgcctacttggcaatttcataacgtgcccccaaacgagagagagcgagagagttcgacgctcaactctcgctcgctcgctccatccctctcgctctggcagcaacttcgtttgctggtcggccgtgctgttagcgagagataaagagagcgcaaaatgagcgccagcagcgaggcgtcgttttcgagggtcgctcagtcaccgtcacatttgcgtcgtttcattcggtttcgtgcgctcggggattttgtttggttctctgctctgtgcggcagatcgcgaggcaacgcgtgcggtttgctggctaaattctacatatacacattcaacatccgacggccgaagcggagctagaataggaaaaccaacctttgcagtgctaattatttacaacacaacagtaagtgtgtggtgtgtggaaataaagcagcataatcgcgagcgggagaggttgtgaaatagcgcccatatctatatgatgggtgcctttgttggctggtgtgcgtgtgtgtttgtgagcttctaatgaaaaacgttctatttttaaatgcgcacaccataaaaaactgaaacgattgctccacacttcaactttaaaaattatcagtcaacgagtgccagtgtgttggtgtttatgatgacggggggaaaatgaaaatcatcataaatattcgtctgtgtctacttgtgaaattttccacaacgaagaaaaaggaaacgagaaaaaaaaaacccagacaccacaaatatatgtgtttgcgctgcagcgacgccgactgcgaaacttcccctctttatgtttcatgcttcgtttttttttcttccatttcattttttcggtcgtcacgaagtctcttcggcttttatcgtgtccatcgatctccaacactaaacacccgcagtcgggaagcagaagcagcagcaactgtaacacaaatccgttagctctctctttacgcgagagcgtgattagtgtagggaaagagcaaagttgaaaaattaacaagaagcagaaactcgctaggaaatttaaaaaaataactgcacttcgctgttgaaaatttgcatacaagtatgtcgctgtgggtgtttatttgaggatgtatgtgtgtatgtgcaaaggctaagcaacaataataatctagctgaaatttcaagcgcgcaaaagagatgaaagatattgttattgctgcgctgaaattaaacatgaacttgaccttgggccgcattgcgagttttttgcgttactaattttgttttctgtcttctttctctttgcagcataactgctgacacactaaacaaaactgaaaaaagaaccaagggcgaaagctgtttattttgtttaggcacctaagtttggccaaattataatcaaaaaacgagtggcgaaaaaaacagcaagtcagagagagcgctcgacgttcggccccaaggtcgtgggcccaaacccccaggatccatttccaacaaccccatccaaccacccgagaaaccagaatggatgacgatcagcagttttgtttgcggtggaacaaccaccagagcacactgatcagcgtgttcgacacgttgctggagaacgagactctagtcgattgcacgctagccgccgagggcaaatttctcaaggcccacaaggtggtgctgtcagcatgcagtccctactttgctgtaagtgttaccaaattcatagtttcggaaaactctgttaacactaaaaatacacttttttcagaccttactacaagaacagtacgacaaacatcccatctttatactcaaggatgtcaagtaccaagagctgcgcgccatgatggactacatgtaccgcggcgaggtcaatatctcgcaggatcagctggccgctctgctcaaggccgccgaatcgcttcagatcaagggcctttcggacaatcgcactggcggcggagtagctcccaagccagagtcctccggccatcatcgcggcggtaagctgagcggtgcctacacactggagcaaactaagcgggctcgactggccaccggcggagcgatggatacgtctggcgatgtgtccggttcgcgcgagggctcctcgagtccgtcgcgtcgtcgccgaaaagtccgacgtcgcagcatggagaatggtgagttgtcaagcgattaggattatcttacatatttgccgaatataaaaaaaagttccaatgcgggaatgttcttcaaacgaaattagcgttaatcaaaaatcttcaatttggcacaattaataaattgaaattgctttgctaataatatatttatgcaacacaacaaaatttcctcctaagtacaaacttatttattaaaattgttcttatttttttgcagatgcccacgacaactcaaactcgtccgtgttacaagccgccgcctcgaatcagtcaatcctccagcagacaggggccggtttggccgtctccgctttggtcaccacccagttgtccagcggaccggcagccggaaccagcagccaagcgtcgtcgacccaacaacagcagccattgaccagcaccaacgttaccaaaaagactgaaagcgctaaactaacatcctcgacagccgccccagcgagcggagcatctgcgtcagcggctgtacaacaggcccatctgcatcagcagcaggcgcagaccacaagcgatgccattaacaccgagaatgtacaagcccagagccaaggtggcgcccaaggcgtccaaggcgatgacgaggacattgatgagggtagtgccgttggcggaccaaactcggccaccggacccaatcccgcctccgcctctgcatccgccgtccatgccggagttgtggtaaagcagctggccagcgttgtggacaaatcgtcgtcgaatcacaaacataagatcaaagacaacagcgtgtcatcagtgggctccgaaatggttattgaacccaaagccgaatacgatgacgatgcgcacgatgagaatgttgaggatttgacactggacgaggaggacatgacaatggaggagctggaccagacggccggcaccagccagggtggcgaaggatctagtcaaagtgagtttgcattctaatcttcttgtttccttacaactaatggttggtttttttcaaatagcatatgcaacatggcagcacgacagatctcaggatgaacttggactaatggcacaggatgcacagcaacgggatccccaaggtgagtgtttgttgcctctgaaatcgataatatgagctatgaacaaatgaaaaagcaaaaagtatagcttagcctagaagtattagatgagatgttttttcgaatcagcgagcacgacaaacaacaagcttaaattcaaatgcagattaaagattgaaatccaacttttcaaggtcacaactccatttttttcacacaaacatttaaatatacaaatttatttttgcccattttaatgtacactacaacaaaagtcgtgctccgaaaaaaagctctaaaacgttgaagaagaaaaaagatgaaaaagtcgtagaatttgttcaaatatgattttcaacaagatagcagacgaaaaaagcaagcaacaagaaaaagtacaaatacaaacccaaaataacaagatttgtgagcgagagtttggcgcagagaaaaaaaaaacaatatgaaaaacagcaaaattaataacgaagagcaacaatttacgactcttatttgagtttttttttaatgagagcatttgaaatgctggttttgataattttttgtttttgcctgcgtcgctcatttcgccacagataaattaacccgaaacaagaataatttgtgcaagttgaaagtattacttaaaaactctttctttacttaatatgattttttacgaaactaatatttttttaattatgacacacataattcgtataactagtaatctttttttgtacatatctattataattaatttttaacacacacacacacttttgaaaagaaaatgagaaacatttaccactcacacaccacaaacatatataattgctatataccacaaaacccaaccaccaaccatcccctaacattctcattttatcattatctatatatatgtatgattccatgtatgatcatttgttgttgaattttcgtaatacgtttcattacaattggtgtttgattaactcttaattttgctttattttatcttaccgtatatataaatcgcataattctacattcccaacatttttagttgctcgccctatctatcttccttccccacctgtattcccctctttccgacattatgccgttagctgcagagtaatgaaacaggaaatataaattgaaagtatttttcataataattcataaaccatggtcacactgactcacccacaaacacacaaccacccacactgcagctttgacctaggcagaaatctcgaagaaatgcccttatcttttaagttagcgtttaaacttacgtatcaacagtgttctatttgtgtgcgttgtgatctctctcgctcgctattttcccctctgtaagctgtttgtgtgcgtgtgtcattgtgtgtatagtgcgtgtgtgtgagtgtgcagggctccgtccacatgtattttcccttcacaaagaaagctctctcacagtacagtcgcgtcaaaagattgcaaagtttggccacacttccagcatttctagcaaaactcgattatgtttgttcgccttaactttgtttgcattttcaaagcatatcacaccacacccgagaactttcgcaaacaaacacatttaatctttcatttgtcatactatactttgtgccattccattttgattttcctctactttagaactctcagcgcgtgctaatgttttttacacatattttttactttacatattattacgaaaatacgcatgcagttttaaattgtattttagtactatctctatatatacatatatattttgctttattttggttgacgggactttttttgattgtttatttttcttacggatttgtttttagttttaaagctagattgtaagcttttccgatgcaagtaacgcgcgcgaaactttcttacgcgtttttacattttgtaagtttgggaattctttttcccatgacttcagatgtacgtcgttgttaaaaactttaaaaaaccctttattaagttaagtgaaaagtgaaaaaataagctagaggaccgcacggatggaacctggtactgaaggatcgccgcttttggaggaggaccagctgccgaaggtctcaagtcgttgccaaaacaaagcacgtaaccatccaagatggtgaggtacacttgcagctttgggtaacttgacgagatccaactgtagtcaaccatccaactgcgtcacggaaatctcaggtgcgtgcccaggtgagtatgctccgcccaacggtatcggttgggcgaagtgaaatacaagaatgaagtaaatttattattttaagttcatttttgtttgactccgaaaatatcctatcctatcgacccttcctttaatcctccaagtattaccaattatccgccttcccagatcaacattcatacctcatagaaaccaaaatcattttacagcgattccaggtaatgtgttatataaaaaaatatctacaagcgctctttcttcaaaaaaagaaaaaaaaaaaaaacaaaaaaaagagtcgatggacttccagggtaagctatagtgtaacttccagtctctactcttccgaattatttctaagtgtacaccttaaatttacattgtatatatatttttcttaaaatttcattttgcgtttggcgtttgtttgttttacaaaatagcttgaagcgttgccaaacaaacaccaaacaccgaaaaatacattctcgcaagaaattccaccgatccttacatacatatccatatagacaacactgcaacgttgcatttctacatttatcctgtttgcgaaatcaatgaaaagaaaaatcagaggaaaagaaaatgatgagtcactaaataacttagtaaattcatggatcgtttgatgttttttgttgaaagatccatttgtgcaagatatatgtggtatgaaaaactaggttatatattattagttttaaaacactttctataactgttccgaaggtatataatccatccacctttgatctttctgaagcaaaaaatcatggggtttccctaatcgtttcttgatggtcaataaaagcaagtaattcttaaaaagctttaaaagcttttccccccttctatgtttcactcttttggttaatctcttctgtgacaatcttgtttgcccaattaatttataaactctttgcttcgctgtgaggtatttaaaaagaatatcttattttaatgtacacgaaactgtggttcagcttctatatcctattctaaccaccctcttttacctgccctctctttctacgttcgttcttttaattgttaatcagaaagaacaacaatgcccgaagcattcgttcaagttcaaggtcggctaaattataatgtgtttctatgtgtgtgaggttgtgaattttttctttaatcagcattgttcacatgaacgcgcggggtgggtgtgatgaagcggtaatattaatgtttccttcgcgcttgctatttttaaaattttgttctgcatccgtgtaaagtcaataacgatacgatgcgattctgcttgggcaattaaagctaatggttgcataaataatcaagtttgggatttttcgatgagaatttcttcacacgcagaaagtttttgactggtgtgtgagatagtggctcgcaaaccagctttattcgcgatactttagatagagtgcgtcattatgacgggaatttataatcttgcatgacttgaggttgtataaccaaagtatccgttggtagagagagtcgttattagggtcttgatttcacttgattcaatgctgcatcacaactgttgggttactggaaacttcttttgcttaaatgcttcgcactatttgcacattagtaatatgatagaagactagtgtagtagatagatagattagatagttgcctgatgacctgattttaccaaaataaattgaaaatttcgctttcaacgccaaccccctcatatccctccctatttctggttttggcccagttgaaagctgttcgcatggccttgacccaatttgcacaggcacattgcatacatacgcaaaacaggcaaagtcgccagataatatttttgttatttttttgtgtaacctgcaatgggcccaaagcttttatcacatcacgcaaacctcaagcgcaaaaacaaattatttacttgcagtccttgctttttgtttcgtttatgtgtgtgaatgttttgggggaaatttaaacgtttttatatatgtatccttggatccgcattttaatatagtttatgtgcaagaatttattctcaccttaagttggttgtagttggattatgtatcttatttgtacttcttaacctctcttgcgctcattccttttccatatttgttattatccttgaatttagattagatatatcgaatgataggacagaatagagctttttttcttcgtcaaaaacggcttaaagtagaattaaactggacttttgtatataaagcataaacaaatctagaaaacatttaacctaaataaaaacttaattaggaaaagggtttttaagtttgttggattgttaatgcttctgtgttgcgtgtcgcttaattaatgtgctgctttgtgaactttattcaaaaacgattttttttaaatcgatgaaaggatttgaaagtggaaaattttcttaaactacaatgcaaaagtataacaaaatttggatttaaatgtatttccttctagaagctaatgtttgtcagtgagaggttttgcatacacagtttgttctttcatttgtttttggtttcggagtcaatttctctgtgtctcaatctcaaaactctctgtcccctattcgcatttgaaatattggtccattggttgcagactcaatggttgtgcccaaaatcaccgcggtgcgcggtagctcgaagcgtctggccagaagaaaggctaccctagccatcgctacggcgatggccacttccgccagtgcaacgcacatgatgtccaggcgtaagcgcacctcttcatcgtgcaggtaaattttgataggcggattggcgcttggattctttcatgatgaatctgtaacccaaaaaagccgatgatgaaatttccgtttcctctagaaatgccagcagcggtggaaatgctccctccacatccacaagcgcatcatcggctaccaccgcatccatatcgaaatcgaaatgcaaatcgtcagatgcggcgagtgctcccttcgtgtgccagacgtgtggacgtcgctaccaagtccttggcactttgaggcgtcacatgcgcaaagagtgcaatcagccgaagaagtatgtgtgccgcatgtgcgaacgtcgtttccactataatttcaagctgcaagatcactactactatgtgcacaagggcgtccaaaagagggaatagttcagtttataaggataaaagtgtaaccgatgtaaaacacccgtactttaaactcatattagaacacaacacacactcaacataaaactggaataaacttgggttagattttcaatctgtggttcttctgtatctcagatcgtggctaagtgcaagttgagtggaccaggtggagtagttagaagtgcattcgattgtgtgattgaagggatttcagtgttgccagcaaactattttatgtacctaatagacaagacaaacaattcatgtagacgcgagatttaattatttaagaattacaattatcgataacctacctagagacaattttgtttagtgcatttcttaattgggcatgatgtgtcatgacatgactcgtagatgtagactgaatgttagatgttgtagtttagctaatagacttcaatgagtattacattacattctctgatcattggaaactacattgcttaaaactgggaatttgagagtaatctttagcgattgatctagaaattgataaaatttgtaaaacattttcaaactatggctaaacaaaaataattagggaaaatgtacgctattgctataagtatgtttattattccagacagtttcatttcgttaataagtcgcatagacagtcaggtttgatcttgatagtgaagttggcaacactgtgattttcgaagtttgtttgtttgaaatataaagctttgtctgtcgattgctcgctttttccattctgttctctgttttcctggcttttatgtgttttgtttctctatctcctgtttgctcaaacatttaattgcaggtctgctcgaattgagtttgaatcaaatgttttactatgacagcgaaatgccgccgccaccgataccgccacccgtggtcgttgaatcgccgccagcttcgccaccacttgcagtggttacacctgtggtgcaactgcgacgtggaaagctgcgatcgcggagaaggaaggcggcaaacagtagtaacagcaccacgaagaagagcattccaccgccaacggtgcggagcagctcggcggcgaatctggcgagaaacgcggatatgcgggacgatggcaagctccagtgtccacagtgtccgaacgcctacaccaggttatccgcattgaaacggcacctggagttcgagtgcggtatgctggagaacttccggtgtcaggtttgcgatgctggatttaagcgcaaggactcgcttaatcggcattgcaaggtcaagaagcacaataccaaatatttgttttagactgatcaaaaaagccattaaaaacgttaagataacgatgccaatttatgaattaccctgctgggaactcttttcttcaattttgactcgacttctttctcgcgtgtcccatgatcaaccaccatataaagccatatgatatctgtatatgttatatatttttgcttgctcaaaaacagatccacacacttacattttctctccatataagctcccttttttcataaatcacacacccaaacaaacaacacaccaacaaaggggcaatcctttttctcgtgatgaggtatctgtcttttctctcaatcccaacccacctttcaacgtcttgcgccacctgagattaatctaatctttaacctaacgcccgctctccttcccttttattttgccatgctgctgtgcaattgtttttttttatacctatatgcctgtttgaaatttgtttttgtttaatgccgagcagaaattaatttattaatttaccacgaaacaaaaataataatgctttcgaaactaatctggcattttgaaaaactaaaaaataacaaattgcttgttttgccttgaaaaataaacaaactaaacgaaaccaaatcttaaccttcgataatgaagtattgaacgcatgatttaccaaaaaaaaaaaaaataacgtttaattaacgttttaaaaacagaaaatcgaaaggaaaattatagaaaacagaattcgaaactgagaaaatatgaaaataccaaacgaaaaacaaaaacaaatttcaggcctgcagctgatagacgactcatcctcaagccaacagaatcatctaaatggcagcaagctggagctgatggatggcagcagcgatgactatcaccagggatcgggatccttgcatcacttccatgcaccgcaatttgatcattttcaaggattattagccggcggaaatagtgtagttggcggagcaggaaatgggggtcaggaggagagctttacgtgcccacagtgttatagaacttatcgaaggcacggaaccttgcggcggcacctgcgccaggagtgcggcaagggaaagagcatggtgtgctccgtctgcggtcatcgcacgaagcgggcagatcatctgcgccagcatgtacgaaaaaagcatccggagatagccatgcgatcgttgtttaagcgtcagcaaagagctgcagctgcggcagcctcagccgtcgaaggagaggatcagaagcccgagacggaaattgtagatctggtggacatgctggacgatggatctgtggccgctgcggatgaggatcatcagcacgcctatctagtcgaagatgacgatgaggatgaactcccgcagcatcagcaatcacaattgacaacggaggagtcgaccaccagtaactattaccggcagcaactgcggcagcaggcccttctacagcaggctcttcagcaagtggcagctgcagctgcagtggtggccagcggcaactccactacctccaccactgaactgcttaacggggagggattgtaggagggatagcaatttgaactgaggggcgggttctcctctctacctccatttcgagtaaaagacgcgtaaagaacgctatccatcctgtccaatgaaaatctctactactaactaaattaaccaaagagcagcggttgaactttgaccttttggcttgcaaaattttttatttttcctgcatttatatgatgtttaatacatttatttggctgtcgcacaaccaaaatatatgagtatttctttttccagcgctaaatcaaaaagttgagaactaatcaaataatattacaaaaaaaaagtatatatatatattttgtataaaataaaaaaaaaggagaaagctattaactaaaaataaatgcaacgttttttataaaccaaaccacaacaaatgcgtttttcaattgatgcatgaaacgaatacgaaaaagttgagacacagtttcaattgtaatttaatttcttgataattttttggtaaataacattttctcgaacatttcgttggtgccaaagttgattatttttgtgtttacctttaagtttaacttaagttttaactgcggcaaaatgtatatccatgtaatggcggcgtcggttaacctaatccacattatatattacataatacaaagcgtagttataagccaaacaaccaacaacacactgtaaaaaatgatacccaaccaaaccccaatcaaaacaaagaaaaaaaaaatgaaagaaaaaataatagaacagcgaggacacaacacgaacatatccacacaacaccacccgccatatctctatttctcaactcaactactccttactttgactctctctctctctctgtactctctgtaagaatcgttaaacagtctcagcaaatcttagacaaaaacccaatcacaattcttacagatttaaggacgctttactgtaattatgccacggcagttatagcagcggccagtgcggccagcaagaagccggcggagcatcagaccgcagccagcagcacagcaaaccaccagaaccagaacctcaaccatcagaacttgctgcagcagcatcacagcaacagcagtagcaatagcaactgtggtcctgctgctgagatatgcgagccagaagtaacgatacgcagaatgttcaaatgtggaaactctggccaggcggaggccattgtgaaccacttgcaaatgaccggtcaacagcaccagcagctccattgcaacgtcagcaactgcagtggttgtcacatgtctgcggcagcagcctcctttcagttggccaatctgctgaatagcggcatacgttcgtcgtctaccagcaaaccgcaacgtaatcacatttctgccagcggcaacacaagcagcagcagcaacgccaacaccaacaacaacagtagcggcaatagcagcttatccttggcggccaaaaagaccagtgttcaatttcattgcgagttctgcaactttagctgttcgtggcgatacgatttgaagttgcaccttaggcagaagcacggcattcatcagctgaagaaagtctaggatttaggcggaatgtgattccaagatcgagatcaaattggctgttatacatctacataaaacatgcttattctagttaagaaacgttgtttaatctcgctctattgttctgtgtctctgctaagtcaatatctgaagttaaatatatgtgtacgaatatttattgaaatgaaagttgattttttatcaccgatataaatttttaaataatgtattttttttagagcgaatgatgccagaattaccataacgtttggagaccaacaacaccagacctcaagtacaacccctttaggaaaaaatattgaaaaaaaaaaaaacaaaatgtttgataaaaattcaattgtataatttttaaaacaaagttttaaacttttaggtttttattaaatttataaggtttaacctttaaaagttttgtttacaatttctaacaattaaatctgataagtatttgaaattcgttatttaataggtatttttaatcttattttatgtatttttgttatagaaagtattttaaatgtatttattttaattattgttttccttgaaaattgtttagcgtagcctcttcagtagtttatgttgataatgaattagtatcattatgtaaacttgattttagacattgaattgtataatttgtattagttttccttcaacttctcaaaacaaatgcaacaaaattttacatttaagtttagttttaagttaagttctcataaacaaaattgaaagcgaacatttgagtcttgtttatgccaatcgattaccattaagcctaattcttggaccttgtttatgatttttcacacatgtttctttttattttcttttcattttcatttcatacaacccccacaaaacatcaaaaccaaaaaccgatcaaatcgaatcgaaacgactttaatcttcccaaatcacaaataatcaaacccgaaaccaccgacatcatcaccaaaaccacacaaatacacatcattcacatcacatcataacacaccacaccactaactaccgatcgccgggattcgatttggttcgaacccaccagacctgaagtacgactacaagcacagcatttttggcagcgatgatgcggatcaggatcaatacaaggagcgtttccactgcgccgtctgcaacaagagttatctccgcaagcgccatctgcagcgccatatgcgcgatgaatgcattggcattccgccacgattcaattgcgagttttgcagctctcgattccgtcgcaagtaccacatggtgcgccatttggtctccaagcacggtattccgccggcaattgcacagatgacaacgggcagtggttcgcgttcctctatcagcggctcgctagacctaaagtctggcggcggattagctggtcttcagcagatgggtggtggcggcgccggaggcggcggctctaccggtgattgtggggcaagtgtgggcagtgctggatcccataatggctgcgagagtcccataccagagaacctgtcgctgcgcaaggagaactacgaaaacgagaatctttcgggctcgcggtgcacttcgccactgccaccgcacattatgccgatacccacgtatgggttgacaggtgccatcactgcgatctctgccgcagcagccgtggtcgaggagcaagcagcggcagcagcagcagctgcggccatcgctgaggctcaagccaagaacaacaatgaatccggaggaggaagatccgaagtcgatgacgaagacgagacattggccgcacaagccgaggctgtcgcagctctcggcatcaagccggaaccggtgacgcccagcaaggtgcagcacctgatgaacgaggagtggaacatgaagctgggcctacagatcatatcgaattcattgctcaaggagcgattgatgaacactatgccatttgcttataacaacaactaaagctctttctagctatttatattatttattgaaacgtaaagaatctctcaatttttttaatttgtcaagagccaaggctctgcgtatttgcatactgtattcatacgttttcgccccccaagcccaccccttttttacactatgtatttgccctgtacgagaatctcaaacgtagacattccattttgaagataattttaattatgtatttttttgagtcgcccgtagacaaaatgtgtcttaaaatttgtcaatattacagtgttgaatcatccaacggatctttcctaagacgaacgataactaactcgaaacgtcacgaatttctaaacatataagacgctttcagcatgacagggatgggattactttacccaaaaagagtccagcatctaaactatttgttagtcatttaagatgaaaccaaaaaaaagtcaagagagaatatcaaatctttttactacaagttgagtaatttcaatttgatttaatccaaaaaaatgcaaaatactcaactggccacctaacttttctcttgcaaaatggaggaagccatgggaggttgatttattaaatgtaacgcacttattccaaatgatatgccaccaaaatgtacgacctagttaagttattactatactatacatttctagcatgtatacttaattttaaagcctaatttatccaaagtcaaaacgaaacagaaatgagaattatattttaattgaataaattacgaaaacaccaaatacacaaaaaatatactatatttatgtattcaattgcagcaatcgaaagttttatttttgtatagccttttctcattcccaatgtaccatcgtgtcaccacctcatcctttgttcataccccacatgatgatccatcgatgttttcgttttcgtgtatgttttttcttttggttttcatcccgccctcgttcagtgttgtcttttttttttcatccgaaaattgtgcgaatttttcactaacctatttttattactaaatttcttttagatgtctctacaaaccaaactgttgtactaccccactactccatctaccactactactccaatatctactacctactatcacatactactatctatgaagccgaccgaaccgtatccgtatcttgtcctggaaaactcaactgcctgccgcagcgcaacgatctgcaagaaacaaagtctgtcacagtattatataccatacattttttcttatatatacttatgatatatatctttgttctgtgtaaaatcttgcctcgaattgtttttgtctgggtttcaacttgatctacaatacatacacgtacatccggtgcgatatagtgcgtttcgggatggcattacagtaaagtatataactaatttgtatcgattttaatacctatatttgcttgaagtaatgttccgatgcgcactatatcgccctatataagcatgttctcagcatagttcgtgtctattttccactttcttgcttgggttctctctcatgtgtctgctttttgtgtctcaaatgcgtgtgcgttttgtggcgagtgtatgggcgtgtgcgtccttggagctttttgtgtggtttttccaattcctagtcttaatctttctctatttgataatatctttgtgtctccttcaatgaaatacttgcaaaaccaaaataaattacttaacacttgatgttttttcttacacagacttttttctagtatctaaggcggttcaacttgggtttattacgaataatatacttatatatattaattatgggctaaacttttctaattctaagaaatctcgatgtttacaatatttttttttattttcccgtcaaaatagtttaaaattttttgtttttggaatgcttgaaatgttttttaagtcgttaattattatgaatttttatttaatatttatatatatatatatatgattttctcctgattttttttgtagcttagcaaatttgacttgctcaaaaagtacagaaatcgaaatgtgtaaagcagagtgtccaatacagagatatcaaatatacagtcagtcatacacgatcaggaaacgtatcattctatatcaacaatccaaccaaattcaactcgatcactttcacccactcacttacccatccgtcttcgtgtgccccaatctccgccccgcacccgcatctacattgcagatttcgtactaacctggtatcagcacgcctgcgatcagtgcggcaagtcgtacaagactcgcaagagtctcagtcgccatcgacggttcgagtgccgcttcaccaccgaaagacccatcttccagtgccccagctgcaattatgcggccaagaggagcgacaacctaaccaagcacatcaagacccattttgccaaaatgaaaaaggacttcctgccgctggcctttcagatgcaggcctccacgggaatagccaccaaatgggaggccaccgcatagggaggtggccccaaaaacaaaacaaaaaaaaaacgccaatcacattatctccattattaatccagtccttcaagttcagttctatacaaattgagttcttaaaacaaaggccaaccaaccaggacagactgcaatgatctactgagctcgcgcaggagcacactttatgcttatcgaacgaacggcaaagagaaaaacaaattttagctttcacttcgtgttatatgtatggtaaacacgatttgcataaatttggttaatttatgtaaatggcatacaaaggcgggcagaaagcaaccaacctgccctgcttaaaattcaaatcattgcagtcgacttgtgtgttggttcttatttaacattcgtagtttagacctaagttaagcgcaaaaattttcgcaatcataacttatgcttcagctagtctggctttttcctaagttaatttaagtttaaaattggtagtctttagtttatagtccagtaagccaaaaagtccaaagagaaacgtgaacgaaactaagtcagggaggggatgggatgaactgctgagagcagttcggggtcagcgacccgcacactttgcattcctaagaaaagaaaccaaaaaaaccaaaaaccaaaagacaaaaagtgaaacatttttcgatatagtctagtttgtagttaagagaggccatgccaaatcagcgaaattccaaatgaaatgaaatgaaaaaataattaaatcaactaacactaaacttttgtggattaagttcataaaatctaagttcctttgctagctaggattatgactaactaactgatagacaaggatctcaaatgaatacaaatgaaacgcaaccaacagtacaagtacaacaaacaaacaattaactaaaactattaactaaacagccgcaaacacatagttcaaatgtataacacacatatatttacagagcagccaatgaagaaaggaataacttagagcccaagtcttaagcagttactatatattttgtgaaccgttgatgaatgtgaatcgaattttgtgaacacacacacaggagtaaaacaagcgaaaatgatatttagctagcgatctaagtaatttgaacttaaacctatatttatatttataagcaaaatgccactatttttatatgtcagagccgccattactaagtattttttatatgcatatatataaatatgaatatttttgtaattcgaataaatttgtattgatcaagaaaacgtttgtataactaatgggtcgctctctcctcgtctctctgccgtccagtttactaaacatgtttcattgcagaccacccatgtcaagcatcatcatcatatgcatcaacttcagtcaagatcagtcatcatcccacagcgttcattcaaaccaaatcaatacaaaaaaaaaaaaaagaaatcaataatgaaaaaagcaaacccagcaaaaaataaaatcaagccaatctgcaactactgctgctagctctgctcacgcttcaccatgccacgcccacacaaaatacaaaaaaaaaaaaattaaatcaagcaaaccaccccgcaacacacactaactgtaaatatcaccaatgtattactattactatttttttaatttataatactcagtgcaaaagttaacgttaccaaattcattctatttacgaaaataattgtttacgaactctaaaattgtttttcctactgaaatcttgttactttttcaaaacgaaatatgtgctctagttgtgtaagatttgtttatttttttttttttttttgcccaatccaatggaacatgccgacactgatgaaatatatatctctctttcttctccttctatacaaatgctaaacatctaatttgtagctccaagcagctatgtctccaactcgagccaaactccaccgccaattgggggctcatcatcggccagttcggcgcaagccctgatccgcgactattggtacgagctcaagttctccgacctattcaagttcataaatccggatggacgttaccagtgccccagattcaattgcctgaagagctacaaggacgccagctcgctgcaacgacatatcaggtgagtagtatccatgatgtggatatacattataatcgagattttctcctcgatctgtggtcggtcgtctgtctgatgatattgtgatgatatgtgatactgatacctgtctatctctgcctctctctctctctctctctctatatatatttatgcgatgactccgtataccccagatatgaatgtggtggacagaaaaaatttcgctgtctgatgtgcggcaaagcattttcacaaagctcccacctaaagcgacaccttgagagcggtgtctgtgtcaaatattacttatgagataatgttttctttaaaatcaaatagaataagcgttatcccaataggcagaagatcaactgatgatcgaaatgatgatcatgaaaatgaagatgtagaacatgaacaagattatatacacgacacgtatattacacacacacacacacacaaacaaacacacgcaatacagcaagaggataacaaacaatgagaacaaaaggatatatagaacaattagataaaaccaagaacaattacaaataacaaacaacaaaacgaatttattggatgccacatcatttataaaggaaatggataaaaaaaaaaaaccaaccaatctatatatatatagtatatatgatgagaattattgttgaaactgagcattaatgaaacaaacggaatacttagttaatgaacaagtgaaaacgaaatatttaacaagctagaacaacaatatatacacatatattaaatgcagtcagtgaacattttataggattttagtaaaatgtaaaaccacataaaaacctaagaaaaccaacaaaaaaaaaaaaagaaactaaactaagtaatagaacagagaggcaaacaaacaaaagttaaagaacaaaacataaaaaaattaaagaaaaccgaaaacagaaaacaaaacatacacgcaaggaagctaagagcaaacaattttagtcaaactaaccaaaactacgtaattttagttaaaatatataaataatatagaaactaaaccaagcaaaacttagtgaaattaacaaatgagagaaatgcatataatacaatataacaaccgacaaaaggaaagagaacagagcagaacagaaccgaaacagaacaaaattaacagaaatgcatataacaaaacgtactgtgtttatttgttgccaaatatatatctattatatatatttctaatatataatataattaatacgattcttgttatgccacacaaccacgaaattaactaaacctgaaatgcgagtggatgacatcaaaaacaataagagcagagcatgaagatcatcaaaagataactaaatgttattgtttaagttgttattatgccaggtacatagacacaccaacacacacgctgcttacgtacagtgaaacttctggatgaatgaaaccagtgtccagatatagaggccccactgtatgtagccagtaaataatacactttaagtctcatagagtcaactttgtttaggcatcacgagtgtttagcagaggcagatggtcgaaagggattgcaggaagatttgttacatggttccaagaacaaaaaatagtaaagagagtttatatacatatatacaaaacatatacatatgaggaaacaaccacatctacataaaaatatacacatatagaactatatataatgctatattagcaaaaatgttgtctgttgaacaaagagaggatattaaggaaacggaaattgttagtcagtgacgaggattagatgttggtaacatgtactcacatcgccaaaagtaattgtatttgtatgattaggtgcgtgcctgtgtgtgtgtgtgtgtgtgggtgtgggtgtgtgcgtagccttgtgcgagtgtgtgtgccaatcggtcaaaggattttttaccagagaaaaagaaaacaaaaaataaataaagaaatagaacattttgtgccattagaaattctccaccaaaactgaaagtaaaattcaatgctgctttagtgacgatgacgaagacgatgaagccatagaagagatcgaacaatatactcatacatgttatatgtatatgtgaaccaatatgatttgttgttgcattcgaagacgaaacacgattctgttgacaagtgtaatttatagtacatttttgttgtgagttcaaagattgagtctagtgaaatttttgacggcagaagtgacaactaaatgctacgagagtgccattatcaaacaaatttttaatatatatatatataaatgataaattattgaaattatacggaatacatatatatatatatatataccctaagcaggaggcaactaaacataatttctagttaggaacgcagtaaggaaagtgaaaggagcgcagaaaatatattgtttgttgcttgttgattgttaatttttgggttgcagaacataacacctaagcatatatgcaagatacatgtatatgccagtacaataaacaaataaaataaaaatacagaatatagagaacaaacaaagcagcaatagaaacctatatgaactcgaatgaactagacaaattatacacagtataaaggaagctaaaaacgaatgaaaatcaattatagtgaagtactaactgcagtttaagaccgatttgacactaatccaaaacacgcaactgaccgatctgcctaaagaaattgattaattgttagttgaattgaaaagtataataattcattttggcaactatccttgcagcattcggtcggtccgatttgtgaatttagtgtcaattatcggaattagcacatgttcacctcctcccctcccccgtaaataactaaaaccaaaggcaaatttttgattgatttatttcaatttgtttacaaaattttgccacaagtgcaatacttcgaaagtttgttaacaatttgtcttgtgcggctatttgccaaagtcaatttttgaaatgaatagtctaaagaaccattttgtaacccaaataaaaaaaaaaacccaacctccaagcgaacaaggcaaattgtgaaactcttcgaaggaatagaagaaatattgcttttaaattagtaaaaatttaattgagaattattcgctttacttgtatgaataatgttttttgttaaactaatttactaagaccttgttgcgagtagctaaattattattattatttttgctgttaaagtttagataaagggaaatgaaacatggaatgtttcgcaataacttttttgttaaatcgtttttctttaaattagttataacactgttttaatattattattacgtatacaaaaatatatcgtttcacattaatttaaccagagaactctttatgttttaacttttgttatattgttaattaatatttattgactaagagcagaaaaccgtttgcaaaaaaaccataaaaaaattagagttaactatgtaagttacaaaataatgaacaaaatatactccaaagaaaccaaccaaaaatatatatatatatatacacacatatatacaaggacatatacatataccaatatatatatattttagacaaaaactgaacaaagcaaaaacagcaaacagacaagaaaacgttttagtaaaagtgtatttggaacaaagaaattgccacaacagtctaaaaggattatatatatataatcaaaccaaaaacaataattaccagaacaagaacaaccgtaagaaaagtttaattgtaacgaaagttgtttattttttgtagcgtaatatttaacaacaatgaaaccgagtaaattgataaatgatatatacatatatttattgttaacgaaaccacggataaggcgaaattatgaaacaaatttatacaacatgaataataagaaaaacgtaaacagagaaaaagcaagaaaaactttcattgacgaagctgatattgttagtaccttaaaaccatggaataaaacaaaaaccaattaataattattaataattataataacaagcggtaggattaaacaatgagaaaaacacaaaaaataagatttgatgtaaccaaaaccaagctaaggccatttgagattatgttttaatttttcgagaaaccatttaaccccaaaaattgttatttttgcgaaaactgaacaaatggcattatatatggaatcgtttatatacacattgtttgaagaaagtggtaacagaaaaaccaacaacaagaataataaagattgatattgaaatgttgaaaccccaaaaaaaaaaacacagaatcaaggaccttaataattgttactgggcattgtgggggtcgccattccttgtttgccgcaactaatccatttccctacttacagatgaactatctcgaagggtcaagagtcaggtcaatggtttgttcctaatgaaaattgaaaccattgctaccgttacgccatagtagacggtactacctgcaactgtgggccaagtcattgcctcgaattaaaagcaacttctagattatattttcaattaaaacaaaaaaaaaaaaaaaaaaaattatttaaaaaaaaaaaagagaatgaatggtaagattggttatctcattttgttctagcttagattgtaactttcctctagctaccgatgtaactttctgctacagtaactatctatcgcttcgcaattgaactggaagttggttatacaagaacatgcatacatatatcatacacacagcattcttcatcatcagtccccatgtgatttttgtttaactatgaattcgcgcccattaaatgtgcatgtattgtatataagaaattcgctaacctatttcgtttctttctcgcaactcttttagaaaactcctggacgatatccgtgaaatcggtcacctcgctgaacaatgtctcgccatcgaacaactcgcacatttgtccacgctgcgagaaggcctacacgtacaaaaagaatctctccaggcatcttcgatacgagtgtggtcagctgcccacggagaagtgccgacattgttcctacgtggcgcgctacaagcatagtcttaatatgcacgtcaagacgcagcatccggagcaaatcagtgatacattcgcgggttcttcgggatctagcgatggggtcagggatagacggggccgatcactagttcgtggtctcttcgattcggctaagggggaaaagttccttgattaccttaataactagtatttagatccgatctcgggcgaaggtaagttctgctggaagggggggggggttactgaagagagtaagagaccagagaccacttctaatgataataaaaatgccttttgtaaccaaaattgaaacgtgtcattattgaattcttctgtagtccttaagttagttaagcctttttaggggcgcggtttttattcctttttttggctgtggtattttgtttgtccttggttatcatttaattgtgctgtacagcaaacacaacccaccaacacacacctatacataaagctttaaatttaagaaaatagcttaagaactaaaacgaaaacggaacccgaaatttgtttgcttgttttcatcaactttagttgtattcaaaaaaaaaaaaaaaaaaagttcaaaaggatactattagtgacaggagctgagcttaactacttccactaagcggtaaactcttgcaacccaacctcttactaaccactattcgttcaactctgcagcatccaagcaggacaagggcgagcagaccgaaggagcacaggatgaattcgaactggacgactgtttgctggagagcaacgacatagtcatcacccagaacaaggatggattcgtgttgcacgtaaagaagctgggtaacattacggctgccaagctggaggagaaccaggcggtggcacaacaacagggccaagcggcagtgactgtcaccgggccggctggacaacccacgcccacaatcacggaactcttgaatgccgccgccgcttcgcactcggaacccaaacccacactgaccactctgaccagtacgcccattaaattgccgtcatcggaatgcggtaagtccatatttgtaatagacaagcaaagctagaaaagtgacacaatatttatacaaatgaatgatagtttttataaattgaaaaactagagttttcttaaagttaaattgaaaatttggaaataaataaatgtaatatattctctctataaaatacgttaataaacgattgtattgtattgtattatgtattatgattttaactaataagaccttttgtacttttttccaattccagaacttatcaacattaaaaagattataccggcaaccacaacaattgccacacatcatccgcacacgagttcgacaatcatacatccccatcacatcattcagcatgtgtcccaggaaccgcaccaccaggagcaccatcagcagcatcagactattcacattgaggaggtgccgcagacttcgcaacagcaccaccagcagcagcatcaccaccagcttcagacggtccaaccgacccacacccaagtacaaagcataatcacagctcatccgggccagactataaacctggtgggtctgcgcaatgtgcagttggccgattcgaagcccatagcctcgaggatacgatattctcgtggaaagatcatcgggccgacggtacaaaacctgcagatcgtggaaacccatgagcccatccagcatcaacatcacgagctgtcggatggcaccaagtatgagattagcgagattgatctgaacaatcccaatgcatcggcggcaatcataagtgacttagtgaagtatgccgagatcgatgatatcgagctgcccgacggcactaagattggcatcggctttgcgccctcggagattactgagcatatgcagacctccggcggagagacgcacatcactacaattgagcacgagccgcaggaactgcaaacggtccatcagcacgaacagacgcagcagacgcatcacatacatgccggccaactgcagacgcatcatatccagaccgtggtgcagtccagcagtggccagcagcagcacgatcagcagcagcatcatcagcaccatagcattgagctgcaggacgacgatggtgtggagacaatcacacccgaagagcttggtatgcacgattcgagcaagagctacaccattctcaccactcgtcccatgaaggaggagtcggagcacgatccttcgggcatgacctacgaactgtcgctgagcgactcgtctctgggtccatgcgatgatccagagtcgcggtatgtgtgccgccattgcggaaagaaatatcgctggaagtcgacgctgcgtcgccacgagaacgtcgagtgtggtggcaaggagccgtgtcatccgtgcccgtactgcagctacaaggccaagcagcggggtaatctcggagtgcatgtgcgcaaacatcatccggagaagccgcagctagagagcaagcgaggccgcaaggtctaggcgaaagttgggaggattgtgagtacacaactgttgggtgtaaagaagtaaccatttttgaggttaagaccagtttcattattattacaactattttgtatcattttataaacgtgtacaccctattaagcttaaagttcttatttgttgattatttttattaagtttataagttttgacttccactcggttctcaaaggttcaatttttcaaacaaacaagcattgtgcgcactcaattacatttttatcaggctttaactttaatgtcttcatatttagtagaattggttatgtatgtcctttaattcatcgtaattttcaaaattacaaaaatcgaagccccaacaatgtcgacaaaatgaaaacaaaaactaatgtgcaagtattttcatggaaataacacaaaaaaaatataggatcaactatattaatggaaaatagattaacattaagaataattaaaaacttatttctgtatgtatgtgtgtgtgctctcaaaaaaatatgaaaatatatataaaaaatcttgattcaaatctaagttatgtagaaaaatcttaactgaagtcctgaaatttttttaattttttactgcaattcaacgttggtgcacataaatttcatgtaacctatttaaacaaaacctatcgacatacaaaaattgaagaaaattgtaaacttatctatattggaggcttgcaaaaataattttgtaagaatgcgttttcaaatctttatatatatatgatatatgaatagcattcaaaaaatatgagtgtaaggaagttatttttctgtaaattgcaaaaacttaacaatctactcgaacttagtaaaattgattgtacatcggaatagctgagtaaagtgtgaacattttgaaacatatttccgcagaaaaaataaaatataacaaaaatctaagcaaatgtattagaacaacaaatatacatacatattatgtctttttgcagttttttgtgtgtaaatcaattatttgattgaaattaaacatttattatgaatacttattctatagaaattatattttgaaaactagttgtaaaaacaaaaggtcaaaataaaatactataaaaaccacaaattcaaatttgaagccttgatctttgtgctaggtagaataatgttttgtaaaaagttcatactaacatatttctctttccaggtgaccgatgagacatcattcagccagagactgctccgagttagagttagctagctaacacttaagatcatcactttccctttccgagcatacctaatatatttctcttttcttttagattgaccctgggaccgggacgtggattggaactcgcgaatcctgtgccagacatccgcattgagctaaccttaagtaaaaacgtgccacatgccaaattgtaaagggaaacaattgccattccaatactttattattattaagagcccgaaatctaaacgttcgtttctgtatgccactaaaaagtaaccagacccgaattgaacccgaacctgaacctgaacctgaatccatattccccagccgtgtttatcgatgtgttcaagcaaaatcaaaacagcaactacaaaacccacccaagcagcactctccagctacagttcaattaatttagttacccactttttagttttttaaatttatttttaaaataaatatgtttacaccctgcactaattggccttaatttgctcaacgttttattgaaagagagagagagagagttttcttttatcttatcttattacctgtatatatgtttattaatttgtactctaattttgaatcatgccacgccatcctaacgcttacttccttactatgtttttatacacgtgtatattcatccattaaacgctttgactaatttatattatttgctttgcgcgtccacctcatccagctcatccccagccaactagccaactactccaatctcatttgtgtgtgtcactctatgttggttatctgcccagcttgatttaacagctatattcctaagtgttaagttggttttttttttcgattttaatgagttttttttgcagttgtccttgtgtccagtcaaaagtaattctatttatttttcgttcttcttttcttttgtttttcttttctcgtttttattttcatatgttgtgcgctgcccccaaacaaacaaataaactaaacaaactccacaaatacaacacaaatccacgcttgaaattgtgataaatgaaacgaaaccaaatgaaatgataacgtagatctgagtattacgcgtatagcgggactcacctggaacgaatggaatgcccgcctggccatgccactggtgaccctacgcgaaggtgtccagccgctggtctttcccaccgatctgtcggtggataagcagcagggagccgcaggtctgaccgccaaggatgtgaacgtcagtggccgaaagacgcccaccgatggggggggatgcaagagtgagccacgggctgcctcaacgcctgccaggacacacagcagtagcaatcacagcagcaatggaaatggcagtggaaagcccacaaagaccagtagcggtggaaaattgaatcatcttaccgaagaggaggccaccgccctgatgctgaaagccgtagccgagaaacaggcagccgcagcggccggcaccgagttgagtttcggtgaggatcaggccagctcggggaacgggaatagcagcgactatccggccactctgagtggagccgttacctttgcggatgttggcggcccagctggactatgccacatcaacatcctgaacagcatcagcgcaatgaacaatctgattagcggcagtacggcggctggcgttggcataaccaccggatcaggtcaatcgccctcaaatagtggccacaacaacagcgctggcggcggtagcagcgtgctgggcggtgcggacaacggtgctggacacccgtgtcccgtctgcgggagagtctacaagctgaagtcctcgctccgcaaccatcagaagtgggagtgcggcaaggagccgcagttccagtgcccattctgcgtctaccgggccaagcagaagatgcacattggccggcacatggaacgcatgcacaaggagaaattcaagctggaggatgtgaagaactttgccggatccagcggcttagatggcgacagcagtggagccacagcgacagcggcatccgtggtagcagctgcagctgcgctggtcagcggcgtggagttgcatccccacttctcgtagagaaaccaacactctattgaagaagacttgtataaaaagttaaagttgatcagttattagtgttgagaaaaggcgaccaactaaacgaacataatcagggataataaggacgaaagaaaattacaagaaaatatatatttaatcacacaccaagctctcgggaaaacggaatcagtgtgccaaattaagcttaaaacaaaacaaaagaaatcttaaaaaaaaaagcgaatgagtaaaaacaaaatgaaatagttttgtaagatgcctggatgtttcgaaaaagataatacttgttcgaatggaccgaaaacaatttgttgcaaagcacaaaaatttacgccatttcacataaaatatttttttgttattgttattaattgtttacacgagaccgatttgaaaatctataatttctatttttcatgcaaacagcaaagtgatcagtaaaatgattttacacaaaaacaattttagatattgcaacattccacaaatcgtaaaaatgaaagacaaatattgtacaatgaaacggttaagaattattcattaatagcataggcttagcatgaggaatataaatatatataaatatatatatatat

SEQ ID NO: 27026 - DNA, 2896 bp, DROSOPHILA
tttttcttcagtggcttcgcgcgtccgcaattttcagtgtgtggtgcgttgttgctgctgcctactcttttctttctgctctccacggcagcgggaaaggaaaatacatacacatgcatacagggccccatcacatacagtaaaaataaattcaactttattgcttttccccccgtcgcgttatcgtgtgtgtgtgtattagtattatatatattttactatatatatacatatatggattggaaaagcaacaccaaaatttgatatgtgcaaagtttattgacgactacgtgctgcctgtgattctatttcgcataactgctgacacactaaacaaaactgaaaaaagaaccaagggcgaaagctgtttattttgtttaggcacctaagtttggccaaattataatcaaaaaacgagtggcgaaaaaaacagcaagtcagagagagcgctcgacgttcggccccaaggtcgtgggcccaaacccccaggatccatttccaacaaccccatccaaccacccgagaaaccagaatggatgacgatcagcagttttgtttgcggtggaacaaccaccagagcacactgatcagcgtgttcgacacgttgctggagaacgagactctagtcgattgcacgctagccgccgagggcaaatttctcaaggcccacaaggtggtgctgtcagcatgcagtccctactttgctaccttactacaagaacagtacgacaaacatcccatctttatactcaaggatgtcaagtaccaagagctgcgcgccatgatggactacatgtaccgcggcgaggtcaatatctcgcaggatcagctggccgctctgctcaaggccgccgaatcgcttcagatcaagggcctttcggacaatcgcactggcggcggagtagctcccaagccagagtcctccggccatcatcgcggcggtaagctgagcggtgcctacacactggagcaaactaagcgggctcgactggccaccggcggagcgatggatacgtctggcgatgtgtccggttcgcgcgagggctcctcgagtccgtcgcgtcgtcgccgaaaagtccgacgtcgcagcatggagaatgatgcccacgacaactcaaactcgtccgtgttacaagccgccgcctcgaatcagtcaatcctccagcagacaggggccggtttggccgtctccgctttggtcaccacccagttgtccagcggaccggcagccggaaccagcagccaagcgtcgtcgacccaacaacagcagccattgaccagcaccaacgttaccaaaaagactgaaagcgctaaactaacatcctcgacagccgccccagcgagcggagcatctgcgtcagcggctgtacaacaggcccatctgcatcagcagcaggcgcagaccacaagcgatgccattaacaccgagaatgtacaagcccagagccaaggtggcgcccaaggcgtccaaggcgatgacgaggacattgatgagggtagtgccgttggcggaccaaactcggccaccggacccaatcccgcctccgcctctgcatccgccgtccatgccggagttgtggtaaagcagctggccagcgttgtggacaaatcgtcgtcgaatcacaaacataagatcaaagacaacagcgtgtcatcagtgggctccgaaatggttattgaacccaaagccgaatacgatgacgatgcgcacgatgagaatgttgaggatttgacactggacgaggaggacatgacaatggaggagctggaccagacggccggcaccagccagggtggcgaaggatctagtcaaacatatgcaacatggcagcacgacagatctcaggatgaacttggactaatggcacaggatgcacagcaacgggatccccaagatctgagtattacgcgtatagcgggactcacctggaacgaatggaatgcccgcctggccatgccactggtgaccctacgcgaaggtgtccagccgctggtctttcccaccgatctgtcggtggataagcagcagggagccgcaggtctgaccgccaaggatgtgaacgtcagtggccgaaagacgcccaccgatggggggggatgcaagagtgagccacgggctgcctcaacgcctgccaggacacacagcagtagcaatcacagcagcaatggaaatggcagtggaaagcccacaaagaccagtagcggtggaaaattgaatcatcttaccgaagaggaggccaccgccctgatgctgaaagccgtagccgagaaacaggcagccgcagcggccggcaccgagttgagtttcggtgaggatcaggccagctcggggaacgggaatagcagcgactatccggccactctgagtggagccgttacctttgcggatgttggcggcccagctggactatgccacatcaacatcctgaacagcatcagcgcaatgaacaatctgattagcggcagtacggcggctggcgttggcataaccaccggatcaggtcaatcgccctcaaatagtggccacaacaacagcgctggcggcggtagcagcgtgctgggcggtgcggacaacggtgctggacacccgtgtcccgtctgcgggagagtctacaagctgaagtcctcgctccgcaaccatcagaagtgggagtgcggcaaggagccgcagttccagtgcccattctgcgtctaccgggccaagcagaagatgcacattggccggcacatggaacgcatgcacaaggagaaattcaagctggaggatgtgaagaactttgccggatccagcggcttagatggcgacagcagtggagccacagcgacagcggcatccgtggtagcagctgcagctgcgctggtcagcggcgtggagttgcatccccacttctcgtag

SEQ ID NO: 27027 - protein, 787 aa, DROSOPHILA; identical to SEQ ID NO: 1350

SEQ ID NO: 27028 - DNA, 5284 bp, DROSOPHILA
ttcagagaaaaatgcaggtcaaatgatattttcacttaccatatgagttcccttaaaatgaaagctcgagtttatgtattctgaaatttgtttaatagcagatgtaaatttatcgtcatcaaattgaaatgatcatcattatccttagtagtttttcttcatgtgtattttgtgcgcatgccttgcaccttccttccatatgggccatgtgttgtgtgtgtgtgtataactgaatctcgaaaaactgatccctccgcctaacggtaaatgactggattcgcttaccctgggggtgattctcactgtctcttttccccacgactgtctagtttttttgcctggatctggcgaaaagtaaaaaaaaaatgaaactggaaaacacaaagggaaatgaaaaagggagcctcttgtcacgtagacatttttgtatagccatctccctcgctctctgccgcggagaacagttagttttcagtattaggtatgtacttctccaaaagtggacctttgtatattatattatctttttggagtttctaaagatgtcgaataacatcttatgaacaagaaacaccacgaaatgaacgcaaaaaatcaaagtatgaacattttccagtcaattttcgctacctgtctgtgtttttgaaagtgtttgtgtgtgtatttcccgttatttcgctttggcacgattattaccgctgcagttctcctttttcctttgagctccttttccctctgccgctgtcggcgtctctgcttgcctgccctctcactcgctccttttgcctacttggcaatttcataacgtgcccccaaacgagagagagcgagagagttcgacgctcaactctcgctcgctcgctccatccctctcgctctggcagcaacttcgtttgctggtcggccgtgctgttagcgagagataaagagagcgcaaaatgagcgccagcagcgaggcgtcgttttcgagggtcgctcagtcaccgtcacatttgcgtcgtttcattcggtttcgtgcgctcggggattttgtttggttctctgctctgtgcggcagatcgcgaggcaacgcgtgcggtttgctggctaaattctacatatacacattcaacatccgacggccgaagcggagctagaataggaaaaccaacctttgcagtgctaattatttacaacacaacagtaagtgtgtggtgtgtggaaataaagcagcataatcgcgagcgggagaggttgtgaaatagcgcccatatctatatgatgggtgcctttgttggctggtgtgcgtgtgtgtttgtgagcttctaatgaaaaacgttctatttttaaatgcgcacaccataaaaaactgaaacgattgctccacacttcaactttaaaaattatcagtcaacgagtgccagtgtgttggtgtttatgatgacggggggaaaatgaaaatcatcataaatattcgtctgtgtctacttgtgaaattttccacaacgaagaaaaaggaaacgagaaaaaaaaaacccagacaccacaaatatatgtgtttgcgctgcagcgacgccgactgcgaaacttcccctctttatgtttcatgcttcgtttttttttcttccatttcattttttcggtcgtcacgaagtctcttcggcttttatcgtgtccatcgatctccaacactaaacacccgcagtcgggaagcagaagcagcagcaactgtaacacaaatccgttagctctctctttacgcgagagcgtgattagtgtagggaaagagcaaagttgaaaaattaacaagaagcagaaactcgctaggaaatttaaaaaaataactgcacttcgctgttgaaaatttgcatacaagtatgtcgctgtgggtgtttatttgaggatgtatgtgtgtatgtgcaaaggctaagcaacaataataatctagctgaaatttcaagcgcgcaaaagagatgaaagatattgttattgctgcgctgaaattaaacatgaacttgaccttgggccgcattgcgagttttttgcgttactaattttgttttctgtcttctttctctttgcagcataactgctgacacactaaacaaaactgaaaaaagaaccaagggcgaaagctgtttattttgtttaggcacctaagtttggccaaattataatcaaaaaacgagtggcgaaaaaaacagcaagtcagagagagcgctcgacgttcggccccaaggtcgtgggcccaaacccccaggatccatttccaacaaccccatccaaccacccgagaaaccagaatggatgacgatcagcagttttgtttgcggtggaacaaccaccagagcacactgatcagcgtgttcgacacgttgctggagaacgagactctagtcgattgcacgctagccgccgagggcaaatttctcaaggcccacaaggtggtgctgtcagcatgcagtccctactttgctgtaagtgttaccaaattcatagtttcggaaaactctgttaacactaaaaatacacttttttcagaccttactacaagaacagtacgacaaacatcccatctttatactcaaggatgtcaagtaccaagagctgcgcgccatgatggactacatgtaccgcggcgaggtcaatatctcgcaggatcagctggccgctctgctcaaggccgccgaatcgcttcagatcaagggcctttcggacaatcgcactggcggcggagtagctcccaagccagagtcctccggccatcatcgcggcggtaagctgagcggtgcctacacactggagcaaactaagcgggctcgactggccaccggcggagcgatggatacgtctggcgatgtgtccggttcgcgcgagggctcctcgagtccgtcgcgtcgtcgccgaaaagtccgacgtcgcagcatggagaatggtgagttgtcaagcgattaggattatcttacatatttgccgaatataaaaaaaagttccaatgcgggaatgttcttcaaacgaaattagcgttaatcaaaaatcttcaatttggcacaattaataaattgaaattgctttgctaataatatatttatgcaacacaacaaaatttcctcctaagtacaaacttatttattaaaattgttcttatttttttgcagatgcccacgacaactcaaactcgtccgtgttacaagccgccgcctcgaatcagtcaatcctccagcagacaggggccggtttggccgtctccgctttggtcaccacccagttgtccagcggaccggcagccggaaccagcagccaagcgtcgtcgacccaacaacagcagccattgaccagcaccaacgttaccaaaaagactgaaagcgctaaactaacatcctcgacagccgccccagcgagcggagcatctgcgtcagcggctgtacaacaggcccatctgcatcagcagcaggcgcagaccacaagcgatgccattaacaccgagaatgtacaagcccagagccaaggtggcgcccaaggcgtccaaggcgatgacgaggacattgatgagggtagtgccgttggcggaccaaactcggccaccggacccaatcccgcctccgcctctgcatccgccgtccatgccggagttgtggtaaagcagctggccagcgttgtggacaaatcgtcgtcgaatcacaaacataagatcaaagacaacagcgtgtcatcagtgggctccgaaatggttattgaacccaaagccgaatacgatgacgatgcgcacgatgagaatgttgaggatttgacactggacgaggaggacatgacaatggaggagctggaccagacggccggcaccagccagggtggcgaaggatctagtcaaagtgagtttgcattctaatcttcttgtttccttacaactaatggttggtttttttcaaatagcatatgcaacatggcagcacgacagatctcaggatgaacttggactaatggcacaggatgcacagcaacgggatccccaaggtgagtgtttgttgcctctgaaatcgataatatgagctatgaacaaatgaaaaagcaaaaagtatagcttagcctagaagtattagatgagatgttttttcgaatcagcgagcacgacaaacaacaagcttaaattcaaatgcagattaaagattgaaatccaacttttcaaggtcacaactccatttttttcacacaaacatttaaatatacaaatttatttttgcccattttaatgtacactacaacaaaagtcgtgctccgaaaaaaagctctaaaacgttgaagaagaaaaaagatgaaaaagtcgtagaatttgttcaaatatgattttcaacaagatagcagacgaaaaaagcaagcaacaagaaaaagtacaaatacaaacccaaaataacaagatttgtgagcgagagtttggcgcagagaaaaaaaaaacaatatgaaaaacagcaaaattaataacgaagagcaacaatttacgactcttatttgagtttttttttaatgagagcatttgaaatgctggttttgataattttttgtttttgcctgcgtcgctcatttcgccacagataaattaacccgaaacaagaataatttgtgcaagttgaaagtattacttaaaaactctttctttacttaatatgattttttacgaaactaatatttttttaattatgacacacataattcgtataactagtaatctttttttgtacatatctattataattaatttttaacacacacacacacttttgaaaagaaaatgagaaacatttaccactcacacaccacaaacatatataattgctatataccacaaaacccaaccaccaaccatcccctaacattctcattttatcattatctatatatatgtatgattccatgtatgatcatttgttgttgaattttcgtaatacgtttcattacaattggtgtttgattaactcttaattttgctttattttatcttaccgtatatataaatcgcataattctacattcccaacatttttagttgctcgccctatctatcttccttccccacctgtattcccctctttccgacattatgccgttagctgcagagtaatgaaacaggaaatataaattgaaagtatttttcataataattcataaaccatggtcacactgactcacccacaaacacacaaccacccacactgcagctttgacctaggcagaaatctcgaagaaatgcccttatcttttaagttagcgtttaaacttacgtatcaacagtgttctatttgtgtgcgtt

SEQ ID NO: 27029 - DNA, 2055 bp, DROSOPHILA
tttcattcggtttcgtgcgctcggggattttgtttggttctctgctctgtgcggcagatcgcgaggcaacgcgtgcggtttgctggctaaattctacatatacacattcaacatccgacggccgaagcggagctagaataggaaaaccaacctttgcagtgctaattatttacaacacaacacataactgctgacacactaaacaaaactgaaaaaagaaccaagggcgaaagctgtttattttgtttaggcacctaagtttggccaaattataatcaaaaaacgagtggcgaaaaaaacagcaagtcagagagagcgctcgacgttcggccccaaggtcgtgggcccaaacccccaggatccatttccaacaaccccatccaaccacccgagaaaccagaatggatgacgatcagcagttttgtttgcggtggaacaaccaccagagcacactgatcagcgtgttcgacacgttgctggagaacgagactctagtcgattgcacgctagccgccgagggcaaatttctcaaggcccacaaggtggtgctgtcagcatgcagtccctactttgctaccttactacaagaacagtacgacaaacatcccatctttatactcaaggatgtcaagtaccaagagctgcgcgccatgatggactacatgtaccgcggcgaggtcaatatctcgcaggatcagctggccgctctgctcaaggccgccgaatcgcttcagatcaagggcctttcggacaatcgcactggcggcggagtagctcccaagccagagtcctccggccatcatcgcggcggtaagctgagcggtgcctacacactggagcaaactaagcgggctcgactggccaccggcggagcgatggatacgtctggcgatgtgtccggttcgcgcgagggctcctcgagtccgtcgcgtcgtcgccgaaaagtccgacgtcgcagcatggagaatgatgcccacgacaactcaaactcgtccgtgttacaagccgccgcctcgaatcagtcaatcctccagcagacaggggccggtttggccgtctccgctttggtcaccacccagttgtccagcggaccggcagccggaaccagcagccaagcgtcgtcgacccaacaacagcagccattgaccagcaccaacgttaccaaaaagactgaaagcgctaaactaacatcctcgacagccgccccagcgagcggagcatctgcgtcagcggctgtacaacaggcccatctgcatcagcagcaggcgcagaccacaagcgatgccattaacaccgagaatgtacaagcccagagccaaggtggcgcccaaggcgtccaaggcgatgacgaggacattgatgagggtagtgccgttggcggaccaaactcggccaccggacccaatcccgcctccgcctctgcatccgccgtccatgccggagttgtggtaaagcagctggccagcgttgtggacaaatcgtcgtcgaatcacaaacataagatcaaagacaacagcgtgtcatcagtgggctccgaaatggttattgaacccaaagccgaatacgatgacgatgcgcacgatgagaatgttgaggatttgacactggacgaggaggacatgacaatggaggagctggaccagacggccggcaccagccagggtggcgaaggatctagtcaaacatatgcaacatggcagcacgacagatctcaggatgaacttggactaatggcacaggatgcacagcaacgggatccccaaggtgagtgtttgttgcctctgaaatcgataatatgagctatgaacaaatgaaaaagcaaaaagtatagcttagcctagaagtattagatgagatgttttttcgaatcagcgagcacgacaaacaacaagcttaaattcaaatgcagattaaagattgaaatccaacttttcaaggtcacaactccatttttttcacacaaacatttaaatatacaaatttatttttgcccattttaatgtacactacaacaaaagtcgtgctccgaaaaaaagctctaaaacgttgaagaag

SEQ ID NO: 27030 - protein, 465 aa, DROSOPHILA
MDDDQQFCLRWNNHQSTLISVFDTLLENETLVDCTLAAEGKFLKAHKVVLSACSPYFATLLQEQYDKHPIFILKDVKYQELRAMMDYMYRGEVNISQDQLAALLKAAESLQIKGLSDNRTGGGVAPKPESSGHHRGGKLSGAYTLEQTKRARLATGGAMDTSGDVSGSREGSSSPSRRRRKVRRRSMENDAHDNSNSSVLQAAASNQSILQQTGAGLAVSALVTTQLSSGPAAGTSSQASSTQQQQPLTSTNVTKKTESAKLTSSTAAPASGASASAAVQQAHLHQQQAQTTSDAINTENVQAQSQGGAQGVQGDDEDIDEGSAVGGPNSATGPNPASASASAVHAGVVVKQLASVVDKSSSNHKHKIKDNSVSSVGSEMVIEPKAEYDDDAHDENVEDLTLDEEDMTMEELDQTAGTSQGGEGSSQTYATWQHDRSQDELGLMAQDAQQRDPQGECLLPLKSII

SEQ ID NO: 27031 - DNA, 1836 bp, DROSOPHILA
ttatatgtcacgttccatcgaagctgatggaagagcggcgtccttgaggtgtctaaccctgaactggaaatctccgttttgctatttattttgcagagaagacaatcaaaatgcttttcgatggcgaaaccggcaatgggcaaggtcagggccagaataccctgaatccattggggccaggccaggaggagcccgccctatgcgagcagtactatctgctgggcgatggttccatcattctgcgcaaccattccatcgacttgtcgaatccgcccctgaaatcgcgctgctgccagctcccaacactcatccacgacatatgcgtcaactgcgtgatggatctctgcgaggagtgtggctactcctgcggcgagtgcgccaagtttatttgccgcaactgcgtgactttattgtgagttaagtcccagaaggaagaagcatccccctagggaaacccgttagtttaaaaatcaatcgaccatcatcttatttccagtggtaatcgaattgaagaagaggaggctccgctgtgcgagcactgccagatgttcctcagctagggcatcaaacaatcaagcaaatgtcaaatgtattacgttttaaagaatatagagctatatagtatttaacattaagcaaaaatctttgatctattctttggaatgctagaaaacttaaatcatgaccttgagttggccaatggcgtttccttaacgtaaaacacaccttttcgaacagcgtcgtgggcctttcggttgctaccatttggcgaatggtgaagataagcaggaagggtgcgacttttcacggccagtgcctgcgtggcgcgcactgtggccattacagtggccagtttcagacccaagtccgccaaaccatccacctccgtttcacttatgtcctgtgtcagctttctttccgcgcgatagctaatgatggcctggattagatcctgccacaggacactgagctaggctgatcggggtgacatcagggttacttgtgttgtgctgttacaatcaggttgtctgtgctgccaactgccgccgtggctgatcaagtgcttgatgtctacatccaacatgctgccaaaaaggcaatccagggactctcctgtgagagggaccgtacgattcccagccagattgcgctgggcctctaggagtcatagggcatgaccagaatatgccaagtctttgggttccggttgaaatggtcattaagcatctaaagagaacattatggaacgagaataaggtactggggaagactcaccgctcccttcacgctgctcaacgagcatttggcaaagagagccaaaagggttagcacattttggagcgccatgtgctgcgtttgcgacgcagggcgtgccacttactccacttgtgaggagagacggcgcaggagcagtaggaaatcctcgttagtcttatagccaaggatcagcttaatggccggctccagacaatccagtgctgaactggcaaatgtgtcgcccacctcaatgtctgtattcaattgcctccaatagctgcttagcacgaactctatctcatccggatccaaatgcaaacgttgacgatgggtgagcgccacattcagcaagcgtgtcgcattagcatcgcgatagttcaactaaaaatatagcaacattgttgtttgggtttgttcaatacttataaacacgaaaagcacccacccgagtgacaagaggacgaacagttttcgaattgttctcttctaacagcttttcaggctcctgagagcggcgaaccatctctgccagctgcttgatcacagaacctacaaactctgattccagtagtcttggct

SEQ ID NO: 27032 - DNA, 476 bp, DROSOPHILA
agccaagactactggaatcagagtttgtaggttctgtgatcaagcagctggcagagatggttcgccgctctcaggagcctgaaaagctgttagaagagaacaattcgaaaactgttcgtcctcttgtcactcggttgaactatcgcgatgctaatgcgacacgcttgctgaatgtggcgctcacccatcgtcaacgtttgcatttggatccggatgagatagagttcgtgctaagcagctattggaggcaattgaatacagacattgaggtgggcgacacatttgccagttcagcactggattgtctggagccggccattaagctgatccttggctataagactaacgaggatttcctactgctcctgcgccgtctctcctcacaagtggacatgttggatgtagacatcaagcacttgatcagccacggcggcagttggcagcacagacaacctgattgtaacagcacaacacaa

SEQ ID NO: 27033 - protein, 140 aa, DROSOPHILA
MVRRSQEPEKLLEENNSKTVRPLVTRLNYRDANATRLLNVALTHRQRLHLDPDEIEFVLSSYWRQLNTDIEVGDTFASSALDCLEPAIKLILGYKTNEDFLLLLRRLSSQVDMLDVDIKHLISHGGSWQHRQPDCNSTTQ

SEQ ID NO: 27034 - DNA, 6299 bp, DROSOPHILA
tgcaaagatgagttcagtttaaaccgttaaacacgagaacaaaaaatggagcaaagcagcgaccacaaatttacgaggataaccccacgaagagattggcaataaactgctacagtgttcagaaattcgcaattgcaagtaagaatcgattggaaactaatcgattttgtgatttactgattttggcattttgaatagggtcaagtcagcttgtttcccgcgatcggtctcactattttactgtcattgcaatttggaaattttaagggttctgattgcacttctcgctgacctcaaacaaatcaagtaaatattcttttttttttgctgttatatgtcacgttccatcgaagctgatggaagagcggcgtccttgaggtgtctaaccctgaactggaaatctccgttttgctatttattttgcagagaagacaatcaaaatgcttttcgatggcgcaaccggcaatgggcacggtcagggccagaataccctgaatccattggggccaggccaggaggagcccgccctatgcgagcagtactatctgctgggcgatggttccatcattctgcgcaaccattccatcgacttgtcgaatccgcccctgaaatcgcgctgctgccagctcccaacactcatccacgacatatgccgtcaactgcgtgatggatctctgcgagggagtgtggctactcctgcggcgagtgcgccaagtttatttgccgcaactgcgtgactttattgtgagttaagtcccagaaggaagaagcatccccctagggaaacccgttagtttaaaaatcaatcgaccatcatcttatttccagtggtaatcgaattgaagaagaggaggctccgctgtgcgagcactgccagatgttcctcagctagggcatcaaacaatcaagcaaatgtcaaatgtattacgttttaaagaatatagagctatatagtatttaacattaagcaaaaatctttgatctattctttggaatgctagaaaacttaaatcatgaccttgagttggccaatggcgtttccttaacgtaaaacacaccttttcgaacagcgtcgtgggcctttcggttgctaccatttggcgaatggtgaagataagcaggaagggtgcgacttttcacggccagtgcctgcgtggcgcgcactgtggccattacagtggccagtttcagacccaagtccgccaaaccatccacctccgtttcacttatgtcctgtgtcagctttctttccgcgcgatagctaatgatggcctggattagatcctgccacaggacactgagctaggctgatcggggtgacatcaggttactgtgttgtgctgttacaatcaggttgtctgtgctgccaactgccgccgtggctgatcaaagtgcttgatgtctatatccaacatgctgctaagaaggcaatccagggactctcctgtgagagggaccgtacgattcccagccagattgcgctgggcctccaggagtcgaagggcatgaccagaatatgccaagtctttgggttccggtagacgcagtgcaacactcacactgatcacctcgagaatgctcattaagcatctaaagagaacattattaactatggaaccgaggacaaggtgctggagaagactcaccgctcccttcacgctgctcaacgagcatttggcaaagagagccaaaagggttagcacattctggagcgccgtgtgctccgtttgcgacgcagggcgtgccatttgctccacttgtgaggaaagacggtgcaggagcagtaggaaatcctcgttagtcttatagccaatgatcagcttaatggccggctccagacaatccagtgctgaactggaaaatgtgtcgcccacctcaatgtctgtattcaattgcctccaatagctgcttagcacgaactctatctcatccggatccaaatgcaaacgttgacgatgggtgagcgccacattcagcaagcgtgtcgcattagcatcgcgatagttcaactaaaaatatagcaatattgttgtttggtttgttcaatacttataaacacgaaaagcacccaccgagtgaccaatgtatatcttacagatacgtcgaaagttttcatctatgagtttcggctgcctctgctttccattgtcctccaactcctgaatcttcgctgtctctggatccctatttttcttcttgtggtctacttttggctcagccttcgttttttctgaactctccgactcatttctcttcttctgctcttcccgctcccacctgactacgctatttatgcaattgctcacgtaagttgcataacctgatagcgtgctatccacgaactccttataagcagacgcctcctttttcttggagcgaaacttgtgagtcaccatttcgccatagatctgaataagtggctgtagctggccttgcaatcgcctgccctgagctccagttacactgctaagtgtttcgatggccagcagcaaaagacgacgctcttccgctggcaatttgtttaacgcagccagttgatccttaaaaaagcccgtgcaacttgcaagaaatgcttcactaccggcaccctgtcggcgaatgcaacgtgcaaaaagtgtttcgtagaagctccaacccaccgtcgagctggtggggataaggcaaagcagttcgcttagccgcgggaagtagctgcatatgggaagcggatggccgaaatgcataagatctgcaagcaagtagtttatccaacaaatgagtttgaagtataaattcgattaaattatttacctattagtagctccagaatctgattggcgttctcctcctgatggctaagactgagatccctgtatagaacaaagatcaccagccaaaggcgcgatcgaatgttacggggcaactgagccaatggaaggccctgcagagtcttgaccagtacctgggctgggggcaaatgcaagtcaatttccaccgacgcgttatcccttaggaattgtgtcagcgagttctcctccacctgctcttccagtttcagtttcaccaatagtgaccccttggccttcgcttctttggcctctgctccatattccttaagcagctgcaatgtaaggatctcaatgctctccgaatcatttagatggggttccaagctttgattatgtttcctttgatgcaaacggagctgcttctgtggtctggaaagccgaaagagttgatacggtgggactaactcagccagggcatccgaacaattggctcccctttgatccttcagcaaccaaccactctcaacaagctgcagctccaaacgctgcaatctcagccggcagcagttcttgccaaagttgtacaccctttgctggatcaacgtccactcggcggtgggcaggaaacccctcagctggactggccgctggctggcggggaaaccatctggccagtagtacgccaatagaagctcaaaaccgctggctctctcagtgcactccagaaaggcattcataagccggcggttgtgctcttggcgtagtaaaagccgtccgaactgctccaggacctggcaagtgtgctgtagttgttgctccacttgcagctgataaagttgcacttgctcagccagtcgagtgccgtttaagtattggcaaaggagcgcagcatgcagttcccgagcaaagtccaggttttcgggcagcacttctttcggctgatcctcctcaagcagctccgcgaaggaatgcaacagacttttccaaatcaccagagatggtttgctcatcaggttgctaattaaacgagtgaaagccacaccggctgagtggcttggccacgtttggcacagctgcttgaaagcgtcattggccgaaggagctgtggctaaaggggttctattaaaaattatgcctagaaagcgctcctccaactgatggccttcagcttcaataattttagagtcctggatgcgtcgcttcttagcttcattagggggaacatccaaagtgtactttcccaaccatgctcctaggaccttgaggagattgatgatgaaccgctctgcgcgactaagacggcgaaacatgtccagcagtagaataaggtactccgaatacagctcctccacttgggcattctccttgggagtcgtgagcatccaaacggttatctggtaaacactctgctccagcaggagaggattataccgcaacgcagaacagagaagtattaaaacctcttttaagttggacttcttgtactcgcgcaccaaacgcagcagctgatcagaaacataggcaaacgcggtgatcgatagattttccaatttaaactgcagggatacattgtatttacgcagtgacataaggaaatgggcggtcagttgaagcgatgactgcgataatgcctccgtgttaaatatacacagtaagatggtgctgatgttagctgtttggaagcgattattcaggacactagcctccaaaaggatcaggctgacatgcagcggaaggtccttaatccgtgtgatgtcaaactccgccttgatttgcttttccagctcggccagttcgtctaggcatgaagtttttaaggtcagatgcagctccacaagaggacgaacagttttcgaattgtactcttctaaaagcttttcaggctcctgagagcggcgaaccatctctgtcagctgcttgatcacaggaactacaaactctgcatcccagtggtcttggctctcagtccgatccttgttatccttgcgaagttcgacgcacttttgatggcatctgaacaggctgccatagcattcgaatagaagcttgttgctggaccgcaaggcatcctggagcagctcagaactgagaaccatgggcaggacttccagtgccgactcgtttgcgttctcctcccgggagacaatctcgtagagagcgtgaatcaactggcatttcgttgtctgagtaacccagccaggctgcgccctcagcctcaggaaatccttgagttgttggaagggtaaatccttgcacccacccaatgatttcgccagccagtcggcgatgacctcgtacttattgaggtaggggaactccacggactgccataccttcagagcgaactcaacacgtgccgcgaacggcttgttcgtttcagtcagccaggacttcagcgctgcaaatggacgtggagcttactgacctggtccatcggaacggtattataaagcacttaccctcgcctgtgtccatgttgcctcgtccagtgaagtacaaaaaaatgcaatctcaaatcgaaatttattttactgcggcacgtgcggaataaacaaaaaatttatcgatacaccgatgcgatttcgatatcgatttgcgatatgcgtaagcgctgtttgtagctgttgtagctacgtcaaatctggctattttatagccgctacagaaacacattctattttgagttcttggcccaattggatattaatatggttaataggtagccataatacctcggtggctttgtaataaaataccaacagatttggcaagtggtgagatttggtagtgttttcgcttcatatcaagctaaatttggacatttttagctatttgtcaaaaacactgctggaacagctgatcgtccaccaccgagaaagaagcagagcaccgttacagattcgtgttgtttattttataattcgaatcattttaaaaaatccactgtttttttttgtacatttctgaatgagacaagaatcacaatgctgttaaactgtacgaggctcacacacctctgcacgactctccgggtcaggaaaagcagccaaataaggttgtccacatcatataatcaccatttgggcaggtgcctccaccatcgaaccgcccggtcgcttcaacacagccttccaccgccgaaccgttaccatagccacctgcacccaacactccgcatgccgtggtggtgcatgcgacgtggatttgcacagagcagcaagtggttagccaggaatgcaaaggcgaacttaccaactgcagttggagccggaatcgtgcccgcccccgtcaaaatgggcagatcccagtacggccgcctgctcagcctgactaaatcggagaaatgggtgctgacaggttactagcatacaacgcattttgaaatttcccaaatccttatgttctttatttctcagcgggcattggctgtctggtagtttcttcagctatcaccatgtcggttcctctgttcctgggcaaggtcattgatgtagtctttaataaatcgggcatggatagcgcagccatggc

SEQ ID NO: 27035 - DNA, 3434 bp, DROSOPHILA
taaaataaatttcgatttgagattgcatttttttgtacttcactggaagtcctgcccatggttctcagttctgagctgctccaggatgccttgcggtccagcaacaagcttctattcgaatgctatggcagcctgttcagatgccatcaaaagtgcgtcgaacttcgcaaggataacaaggatcggactgagagccaagaccactgggatgcagagtttgtagttcctgtgatcaagcagctgacagagatggttcgccgctctcaggagcctgaaaagcttttagaagagtacaattcgaaaactgttcgtcctcttgtggagctgcatctgaccttaaaaacttcatgcctagacgaactggccgagctggaaaagcaaatcaaggcggagtttgacatcacacggattaaggaccttccgctgcatgtcagcctgatccttttggaggctagtgtcctgaataatcgcttccaaacagctaacatcagcaccatcttactgtgtatatttaacacggaggcattatcgcagtcatcgcttcaactgaccgcccatttccttatgtcactgcgtaaatacaatgtatccctgcagtttaaattggaaaatctatcgatcaccgcgtttgcctatgtttctgatcagctgctgcgtttggtgcgcgagtacaagaagtccaacttaaaagaggttttaatacttctctgttctgcgttgcggtataatcctctcctgctggagcagagtgtttaccagataaccgtttggatgctcacgactcccaaggagaatgcccaagtggaggagctgtattcggagtaccttattctactgctggacatgtttcgccgtcttagtcgcgcagagcggttcatcatcaatctcctcaaggtcctaggagcatggttgggaaagtacactttggatgttccccctaatgaagctaagaagcgacgcatccaggactctaaaattattgaagctgaaggccatcagttggaggagcgctttctaggcataatttttaatagaacccctttagccacagctccttcggccaatgacgctttcaagcagctgtgccaaacgtggccaagccactcagccggtgtggctttcactcgtttaattagcaacctgatgagcaaaccatctctggtgatttggaaaagtctgttgcattccttcgcggagctgcttgaggaggatcagccgaaagaagtgctgcccgaaaacctggactttgctcgggaactgcatgctgcgctcctttgccaatacttaaacggcactcgactggctgagcaagtgcaactttatcagctgcaagtggagcaacaactacagcacacttgccaggtcctggagcagttcggacggcttttactacgccaagagcacaaccgccggcttatgaatgcctttctggagtgcactgagagagccagcggttttgagcttctattggcgtactactggccagatggtttccccgccagccagcggccagtccagctgaggggtttcctgcccaccgccgagtggacgttgatccagcaaagggtgtacaactttggcaagaactgctgccggctgagattgcagcgtttggagctgcagcttgttgagagtggttggttgctgaaggatcaaaggggagccaattgttcggatgccctggctgagttagtcccaccgtatcaactctttcggctttccagaccacagaagcagctccgtttgcatcaaaggaaacataatcaaagcttggaaccccatctaaatgattcggagagcattgagatccttacattgcagctgcttaaggaatatggagcagaggccaaagaagcgaaggccaaggggtcactattggtgaaactgaaactggaagagcaggtggaggagaactcgctgacacaattcctaagggataacgcgtcggtggaaattgacttgcatttgcccccagcccaggtactggtcaagactctgcagggccttccattggctcagttgccccgtaacattcgatcgcgcctttggctggtgatctttgttctatacagggatctcagtcttagccatcaggaggagaacgccaatcagattctggagctactaatagatcttatgcatttcggccatccgcttcccatatgcagctacttcccgcggctaagcgaactgctttgccttatccccaccagctcgacggtgggttggagcttctacgaaacactttttgcacgttgcattcgccgacagggtgccggtagtgaagcatttcttgcaagttgcacgggcttttttaaggatcaactggctgcgttaaacaaattgccagcggaagagcgtcgtcttttgctgctggccatcgaaacacttagcagtgtaactggagctcagggcaggcgattgcaaggccagctacagccacttattcagatctatggcgaaatggtgactcacaagtttcgctccaagaaaaaggaggcgtctgcttataaggagttcgtggatagcacgctatcaggttatgcaacttacgtgagcaattgcataaatagcgtagtcaggtgggagcgggaagagcagaagaagagaaatgagtcggagagttcagaaaaaacgaaggctgagccaaaagtagaccacaagaagaaaaatagggatccagagacagcgaagattcaggagttggaggacaatggaaagcagaggcagccgaaactcatagatgaaaactttcgacgtatctgtaagatatacattggtcactcgttgaactatcgcgatgctaatgcgacacgcttgctgaatgtggcgctcacccatcgtcaacgtttgcatttggatccggatgagatagagttcgtgctaagcagctattggaggcaattgaatacagacattgaggtgggcgacacattttccagttcagcactggattgtctggagccggccattaagctgatcattggctataagactaacgaggatttcctactgctcctgcaccgtctttcctcacaagtggagcaaatggcacgccctgcgtcgcaaacggagcacacggcgctccagaatgtgctaacccttttggctctctttgccaaatgctcgttgagcagcgtgaagggagcggatctaatccaggccatcattagctatcgcgcggaaagaaagctgacacaggacataagtgaaacggaggtggatggtttggcggacttgggtctgaaactggccactgtaatggccacagtgcgcgccacgcaggcactggccgtgaaaagtcgcacccttcctgcttatcttcaccattcgccaaatggtagcaaccgaaaggcccacgacgctgttcgaaaaggtgtgttttacgttaaggaaacgccattggccaactcaaggtcatgatttaagttttc

SEQ ID NO: 27036 - protein, 1121 aa, DROSOPHILA
MVLSSELLQDALRSSNKLLFECYGSLFRCHQKCVELRKDNKDRTESQDHWDAEFVVPVIKQLTEMVRRSQEPEKLLEEYNSKTVRPLVELHLTLKTSCLDELAELEKQIKAEFDITRIKDLPLHVSLILLEASVLNNRFQTANISTILLCIFNTEALSQSSLQLTAHFLMSLRKYNVSLQFKLENLSITAFAYVSDQLLRLVREYKKSNLKEVLILLCSALRYNPLLLEQSVYQITVWMLTTPKENAQVEELYSEYLILLLDMFRRLSRAERFIINLLKVLGAWLGKYTLDVPPNEAKKRRIQDSKIIEAEGHQLEERFLGIIFNRTPLATAPSANDAFKQLCQTWPSHSAGVAFTRLISNLMSKPSLVIWKSLLHSFAELLEEDQPKEVLPENLDFARELHAALLCQYLNGTRLAEQVQLYQLQVEQQLQHTCQVLEQFGRLLLRQEHNRRLMNAFLECTERASGFELLLAYYWPDGFPASQRPVQLRGFLPTAEWTLIQQRVYNFGKNCCRLRLQRLELQLVESGWLLKDQRGANCSDALAELVPPYQLFRLSRPQKQLRLHQRKHNQSLEPHLNDSESIEILTLQLLKEYGAEAKEAKAKGSLLVKLKLEEQVEENSLTQFLRDNASVEIDLHLPPAQVLVKTLQGLPLAQLPRNIRSRLWLVIFVLYRDLSLSHQEENANQILELLIDLMHFGHPLPICSYFPRLSELLCLIPTSSTVGWSFYETLFARCIRRQGAGSEAFLASCTGFFKDQLAALNKLPAEERRLLLLAIETLSSVTGAQGRRLQGQLQPLIQIYGEMVTHKFRSKKKEASAYKEFVDSTLSGYATYVSNCINSVVRWEREEQKKRNESESSEKTKAEPKVDHKKKNRDPETAKIQELEDNGKQRQPKLIDENFRRICKIYIGHSLNYRDANATRLLNVALTHRQRLHLDPDEIEFVLSSYWRQLNTDIEVGDTFSSSALDCLEPAIKLIIGYKTNEDFLLLLHRLSSQVEQMARPASQTEHTALQNVLTLLALFAKCSLSSVKGADLIQAIISYRAERKLTQDISETEVDGLADLGLKLATVMATVRATQALAVKSRTLPAYLHHSPNGSNRKAHDAVRKGVFYVKETPLANSRS

SEQ ID NO: 27037 - DNA, 8482 bp, DROSOPHILA
tttgtcattggttattacatacatatattgatttatatctgttaatggttatatgcatgtgaagtgcctgggtgagttgagatggacattgaacgagattgattctaataagctttaagggcgacatattgtacacgctacgaatattgctaaaaatacctgcattcggatttggaattggatttcgatttcgttttcgccattaatctttggttttttctctaattaatttcgattttgttcgtgccccaatgtgttggtaggcaaagcactttgggcaggcgcttgtagaatcaattagttaatacattaaacgtactgtatgctgtatcttcagaacaagttgggtacaatatgtgctgagagctgtggctctctgaatctgaatctgaatctgaatctgatcctgaatcagattctgattctgatcctgattggctatcggttgtgatgggggcaatgtgttcgggtggagtgtgtgagatctagatatcatatcgttacatacacgtacatatatatgctctaattaccgcctcgtctattactcgtaacattgaaatatacaaacatatatgtatgcctcgtcgagctaactaagtcctgtggataaccaacgtattttgtgtctagcgcttaatttaatcgttgaactgtctggattccgctttcaatcgaacctttcgagctattctcaaacacaacagtaatgatagcgcgcacgtaaacaaaacgcagcaaatgaatcgcttgtatattttcactagactttgggattattagcttttgctgctggcttcatttcttttttgtttgttgtttttttttccagccgactacgcttgctgtttttgtataagtaaacttgcttgaaaacatttaactgccttttctctggcggcccgtcgattcaaattcatctttttggattatacatttcgaatatcatatttgcgtaactttacttaggaacaaagcttagatttcatttctttggtttcgcgtctgttccgaaatagttatgattctgttagttttgtctagtcgatttgctaaggaaactgagttcaaagagctgcgaacatcgggaagcgaccgcctgtcctcctgcttccactggcgctccttgttgccagtgcagcgtagagatgctagttccgtatagggtggtagtacagggtagtggttggagtcactcgtaatattcaagttccatatatttgtatttgtatttagatttgtatttatatttataattatatataccgttttatgcatgaaataatgtaaccataaacaaattagcaacaacttcaaattgtccggagcgtctgcattagatttagtattaatattatgacgtaagttacttaaaacctctcacaccaactcgtgcacatcgtctaagtgaaaattattattgagttttcattgcaattctcgagattttctagtttaactgagttttcctttcttggttttcttttgtcttctctgctttgttttcgcccgctgaaggagcacactaatcgagaaactttcgtcctggcagcgggattgcttacacgccgccgtgatcgccagctcctgccgatcctcctgctcctgctccgtctcctgctcctgccgcatccaccagcgatgactgtcctccggctggctgctgcggtggcggcggcggtggctgcatgtactgtgggggatactggtactgtggcggctgctccccgcctatgagtccaagtttatctgttttaaaatgatgcaagaattagtagggcacgacatgtgatggctctttgcgctctttagccaatctcagacaacgatacacgagtatacgccaaaaatattacacttcaaggcttaaaagctcactcatgacggaatatagcaagtggacatgggatgtggacggtgggtgggggcggacagcagggacaactgcatcgaacaggtatggatatatatatatatatatacatatatatttatgtacatttaggcagtcactggaagctgtcttcctttgagcctcccgaagagaagtcctctcgcttttggtgcaataaacttaggccaattttaaaatacatacaacattgaattgtaaaaatcaaataataaggcactaatcacacatagacatcgattaactcacatacatgcggctaaggctggcggtaaacgatgagacaccgtttacagccagccgaaataatataaaaccagaggaacggcggaaacggaagtgggagcacaaacggaaacggaagtaagaagaagcgcaggtgtcaaattactgggtatgattatttgcattgatatgttgccgttttttcgtttgcttacagtgtatcggattagatcgattttgtcaatggtacaaagaaagtgtgaaatgttttcttttcgattttgattaattttgactatggttctacggatgcgtcttggtggttaatcgatggctgattagtttggttggttggttggttggttggttggttgaatgttggttttcaagagagatcgtgagcgttctattgtccagtcgccacttcattcgacggactctgtgggtggtcggtcaatttctcggccaatggtttctcgagtgtcggtggttcagattttagattttgtgtatggtggtgtggttgtagttgttgttcttgttgttgtagtagttgtggtggtggtggtggtgctgaatcaggtgcagttgccgatgccggagccacctgctgctgcaaggcaggaggctgcggagcagcattatcatccgacatgtacggttctacgagaaatttttcggtgagttcatgttgttgtttaattcaaatcgatttgttttcaaagcgagcagataaagatgataacaataaagtataaatatagaaacggttttgagcgatgtaaaacaaaggatttatcaactggtgcacctagcaataaatgtggcgtatgagtaataaataaaagattgctctcgctgtttacctcacacacaaagtgttatattgggtaaattgatttgcttatggttaataaaattgtacaaagctgaagctttctgtgtgattattcttcgtctttctctgtaattgttcaaaaatatggttcggtgttgagagtgtgtcaaatcaaggtgaaaacattaaaaaaaaacttaggtaaatgaagaagaatggcagtactttatgcttttgctgtggttcagtggcacaagaaaggctggcttttccaatccgaaggccgttgcgcttgcgtggaggcttagtaacgagtaacgagtaacgagttgcgtgaaggcttagtattgagtaacgagttacgagaagggactacttttactggggaagtggattcaagttttgtattttacacaggacatggcacagtcgtgtgtctgtggctggggtgctgctgccaatatcagaacgaaacaaacgaaaaacggatacggatacggatacggttaacgaaacactgaacaaaccacaaactttacgattacggcttacgggagttagaactagctagctagaacttaaggtcctacggataaggctaacgggcaccattgagtatcggtccatctccgccagatcggcttctggccggggtccttccattgtcgtccagaccctcagccgcaacccacatggacggagctggcggatccgatactcggcgtgatctcaacttgattactggtggtggttaggcaacgtaacgaaacgaaacaacacaggacacgactttcagtgggcatcaaatgaaatctttaccgaacctgtgcgtatgctcgtatggaaccagatgatgttgggcttgggcatacatggtacacaatacaaatactcgcatatgtatgccacttagcatttagttattgttctagtggtggctgaagcgcatgacatgatatgatcgatcgatctatagttatgggaatttcgcaaggcatctaggtcgaatcggttgagcgaacggtcagttggactgtgagttcgcagctctactcatagcagttgtgaatgagttgaatttggtttcggttttggtttcgatttggatttcgattggttcttattgggttgattgattggcttttgatttggtttcgatttgcattgcattgcggctaagaactaaattcttacggattagatagttagcaatctacataaagttacctagagaaaaaaagtggcggaattaagaacgcaatttagattcggtgtgtagataaacgaaagcgatttgggccaacgaaatcagcgctaaatcaaggcgaactcaaaagacaaacacaactgggtaactgggtgatcttgaaagtatcttcggttctgtgtgtgcgtggtgagtcgagtggtgtggtgtggtgtggcgtgggtcaaggtcagtttctctggggtatgtgtgtcccagaaatgagtgcaccaagttcgcccaggatctgtcaacttacttgcaataatgcccacgacaaccaggccaatcacgcccatgatgatcatcatctgtgcggagaaaacaaagattgaagttcggtccgacaaggtaactgccatcgtcgcacttacctttaagttctgaagccagaatttcctcttgagcttgcccgcctgctgctcaaactgcgaggcaccctgctgcaaggcatcggcacggtcgtccagctccgacagcttgctgtcgcgctccagcaccttctccacgttcgtgcgcatgatgtccacgacctggtcggggattcagggttgcagtggttaatggaatggctgatctgtgatcgactttcagtcccggaactcacctcatcgacctgcgcctgcgtctgctgcagacgcttctgtgccgcgatctgctgcggattgtgtggtccgcccacaatctcgccatcgccgccctctccggccggggctccggcattgggtggtgcatcgccagctggtgcagcgtccgccctgcggaggaggtcgtcattagtcatcggatgcgagaacaagaatagctcgggccaagattaatcaacttccaacgggggctctcgcattaaatacagtacttagattacacaaagagtgggtgtgggtgggtggttacgaacgactatggtttctagctttaatcgaaatatctccaagatacgtgtgggctacggacagtgctggagtatagttctagccagctaccctttaacttggagagacacttactgttccttgttcttgtctttctttcccatctcagacccccaaaaactttgacctttaactcggcttctgggctctgcggggccaaaggaagggaaattgttaattttaaataaaagaattacaataggcgaagctacttatgctggactagtttgtatggtttctacgtgatgcatattttttagtgaaacaaacaatagagtgaagtatctcagtattatccatagtcatttggtcatttggtattggttattgttgttggcaaaatgttttcatcgaaccgtatttccctttcccacgacaaagaaaaagaaatcaatatcttaccctaatccctacgaccggcgacaattggttttttttttttacctacgtggagggaatatttttggatttctcaactttccccggcttttattggcaaaatcaattttatatggaatcaaagagcattatcaacaacttgtatgtgtgtataagacgagcttttcttttgatcatgacacatatcttatgtttggtttcaagcgaccaaaagaaataggtgcaacttagtttgcatgtcctgactcacgggtgcgaatcgtgtttttattgattttgcggtgtgagagacttggccatgtgatgccacaacgtcatcgccaagtgattcatgcctagcgaaccgaaacggcagctgcagctggcccgtgttccttttacggattttacgggcgcgagcacttggacaaatgacaaatgaaatgagcgacccatgctgcgtatacttaatgcggctatcaaacgagcattccctctgtgacggcgaaaagcaaggcggggaatcgaaacccccatttccccgccggaaaacgaatcaataacgtccatccacttacatggctctggtggctgtgtggttgcttctgtggtttggctggtggtgctctggtggcctcagcgaattcggctgtcgatgattaggatgaaggtactctatgcacgatgcacttggcctctttcactgtcttccactggcgcaggtcgggatgtgggatggtcagtgggcggtggtggcgttggtggtgtaggtagtgggtggtggtgcagctgaactctgtttcgttgtttttgttctagagggttgcgctctcagtgccgcttctctctctctctctctgtttctctctctctctgtcgctcttccgccagagctttttcgccccgtcgtcaatgaaaattcactccactccacggggggattggctggatctggatgatgtgtatgtgtgcgggtaacacttgccacgacagcctttcgcaggaattttctggctcagcgctggaactgggctctggtggctgtgtggttgcttctgtggtttggctggtggtgctctggtggcctcagcgaattcggctgtcgatgattaggatgaaggtactctatgcacgatgcacttggcctctttcactgtcttccactggcgcaggtcgggatgtgggatggtcagtgggcggtggtggcgttggtggtgtaggtagtgggtggtggtgcagctgaactctgtttcgttgtttttgttctagagggttgcgctctcagtgccgcttctctctctctctctctgtttctctctctctctgtcgctcttccgccagagctttttcgccccgtcgtcaatgaaaattcactccactccacggggggattggctggatctggatgatgtgtatgtgtgcgggtaacacttgccacgacagcctttcgcaggaattttctggctcagcgctggaactgctgctgaatagagtgcgaaaatagttgcaactatttttagtacatcggttaatgcttgaaatgggcagctatgggattctaattgggacgtaagaggactatttgggtggcagcaacacgcccagccatgaggcatgtccttcctcatttccgttgcatacccccaggggcacctaagatgtcttcaaaatgcaaaacgttttaaaaataatttcaagtgcccaactggccaacgtgggctcagaagaaaaaatcaatgaaattctgcacgacaagggttttcgctgactttggttgacatttcgtttgatcttcgttttcctaatcaatcagttttagcacttttgatcagaatcactttacttttgctcgggcaacttgagtttacaaaaaccaggcttaactaatattttacgaatttttttacgcagcaccaggaaaattttcacttacgacgtttttggccaactgcgaaaacttgcagctttcctaactgttatgtgtatttggggaaaaagctgcctggatggccagcagcgaatggtgttccagcgagaagcttttccttagcgatttccaagtgccgatggccaaggggtgggaaatttaaaaacaagccgggctttccatcaagaaaaagaaatgctcaaagttctagtaatattacagtttgaagttttaactttgtatttttaaatatatcgtgtaaataattatatcaattgatttgaacaaggtttaaaatgcacagaactattcgtctaaattgatttaaagcggtttcctgaactttgtctgaatccacacgcggtacattttcaagccgcgacagcgattaacttgcagtcttcggtccacaatgagctgctcctcctgcagccccgcttgagtcatcataccccgcagttcttcctccgtgaagaagtacaccatggtgccgtcgcctcgcacgtagaagttgtcctccatacacttgccgctcttgaagcgcagctgtgccaggtcgtatcgtccgtagtcgcggaagaggagcaagccaccgggacgcaggtagcgatagcaattgtccaatacccgctgcattttctttggctcaattgcggacagcacaaaaatcatcacaataatgtcctgtgagttttcctcgaagggcacctgccaatgatccagcgtggcatccatgacaaacacctcgcagcgcttctcgtcgaactgccgttggcttcgcaggatttcaatggcccgggcggagaagtcacatccgaaaaccttgagctgcggttcagagctgtactgtagaaggggtaaaattgtgtttcctactccacagcccagttcgaaaatgctacgtggttgcagtaccgccgaatccgccgccagaggagctagttcggggaactccgtaaacagccagtggcgatccttgaagaagcggttgtcgtgaatgccgtagaaggaatcccaaaac

SEQ ID NO: 27038 - DNA, 2028 bp, DROSOPHILA
ttggccaaaaacgtccagttccagcgctgagccagaaaattcctgcgaaaggctgtcgtggcaagtgttacccgcacacatacacatcatccagatccagccaatccccccgtggagtggagtgaattttcattgacgacggggcgaaaaagctctggcggaagagcgacagagagagagagaaacagagagagagagagagaagcggcactgagagcgcaaccctctagaacaaaaacaacgaaacagagttcagctgcaccaccacccactacctacaccaccaacgccaccaccgcccactgaccatcccacatcccgacctgcgccagtggaagacagtgaaagaggccaagtgcatcgtgcatagagtaccttcatcctaatcatcgacagccgaattcgctgaggccaccagagcaccaccagccaaaccacagaagcaaccacacagccaccagagcccagttccagcgctgagccagaaaattcctgcgaaaggctgtcgtggcaagtgttacccgcacacatacacatcatccagatccagccaatccccccgtggagtggagtgaattttcattgacgacggggcgaaaaagctctggcggaagagcgacagagagagagagaaacagagagagagagagagaagcggcactgagagcgcaaccctctagaacaaaaacaacgaaacagagttcagctgcaccaccacccactacctacaccaccaacgccaccaccgcccactgaccatcccacatcccgacctgcgccagtggaagacagtgaaagaggccaagtgcatcgtgcatagagtaccttcatcctaatcatcgacagccgaattcgctgaggccaccagagcaccaccagccaaaccacagaagcaaccacacagccaccagagccatggcggacgctgcaccagctggcgatgcaccacccaatgccggagccccggccggagagggcggcgatggcgagattgtgggcggaccacacaatccgcagcagatcgcggcacagaagcgtctgcagcagacgcaggcgcaggtcgatgaggtcgtggacatcatgcgcacgaacgtggagaaggtgctggagcgcgacagcaagctgtcggagctggacgaccgtgccgatgccttgcagcagggtgcctcgcagtttgagcagcaggcgggcaagctcaagaggaaattctggcttcagaacttaaagatgatgatcatcatgggcgtgattggcctggttgtcgtgggcattattgcaaataaacttggactcataggcggggagcagccgccacagtaccagtatcccccacagtacatgcagccaccgccgccgccaccgcagcagccagccggaggacagtcatcgctggtggatgcggcaggagcaggagacggagcaggagcaggaggatcggcaggagctggcgatcacggcggcgtgtaagcaatcccgctgccaggacgaaagtttctcgattagtgtgctccttcagcgggcgaaaacaaagcagagaagacaaaagaaaaccaagaaaggaaaactcagttaaactagaaaatctcgagaattgcaatgaaaactcaataataattttcacttagacgatgtgcacgagttggtgtgagaggttttaagtaacttacgtcataatattaatactaaatctaatgcagacgctccggacaatttgaagttgttgctaatttgtttatggttacattatttcatgcataaaacggtatatataattataaatataaatacaaatctaaatacaaatacaaatatatggaacttgaatattacgagtgactccaaccactaccctgtactaccaccctatacggaactagcatctctacgctgcactggcaacaaggagcgccagtggaagcaggaggacaggcggtcgcttcccgatgttcgcagctctttgaactcagtttccttagcaaatcgactagacaaaactaacagaatcataactatttcggaacagacgcg

SEQ ID NO: 27039 - protein, 183 aa, DROSOPHILA
MADAAPAGDAPPNAGAPAGEGGDGEIVGGPHNPQQIAAQKRLQQTQAQVDEVVDIMRTNVEKVLERDSKLSELDDRADALQQGASQFEQQAGKLKRKFWLQNLKMMIIMGVIGLVVVGIIANKLGLIGGEQPPQYQYPPQYMQPPPPPPQQPAGGQSSLVDAAGAGDGAGAGGSAGAGDHGGV

SEQ ID NO: 27040 - DNA, 3253 bp, DROSOPHILA
actgtcttccactggcgcaggtcgggatgtgggatggtcagtgggcggtggtggcgttggtggtgtaggtagtgggtggtggtgcagctgaactctgtttcgttgtttttgttctagagggttgcgctctcagtgccgcttctctctctctctctctgtttctctctctctctgtcgctcttccgccagagctttttcgccccgtcgtcaatgaaaattcactccactccacggggggattggctggatctggatgatgtgtatgtgtgcgggtaacacttgccacgacagcctttcgcaggaattttctggctcagcgctggaactgctgctgaatagagtgcgaaaatagttgcaactatttttagtacatcggttaatgcttgaaatgggcagctatgggattctaattgggacgtaagaggactatttgggtggcagcaacacgcccagccatgaggcatgtccttcctcatttccgttgcatacccccaggggcacctaagatgtcttcaaaatgcaaaacgttttaaaaataatttcaagtgcccaactggccaacgtgggctcagaagaaaaaatcaatgaaattctgcacgacaagggttttcgctgactttggttgacatttcgtttgatcttcgttttcctaatcaatcagttttagcacttttgatcagaatcactttacttttgctcgggcaacttgagtttacaaaaaccaggcttaactaatattttacgaatttttttacgcagcaccaggaaaattttcacttacgacgtttttggccaactgcgaaaacttgcagctttcctaactgttatgtgtatttggggaaaaagctgcctggatggccagcagcgaatggtgttccagcgagaagcttttccttagcgatttccaagtgccgatggccaaggggtgggaaatttaaaaacaagccgggctttccatcaagaaaaagaaatgctcaaagttctagtaatattacagtttgaagttttaactttgtatttttaaatatatcgtgtaaataattatatcaattgatttgaacaaggtttaaaatgcacagaactattcgtctaaattgatttaaagcggtttcctgaactttgtctgaatccacacgcggtacattttcaagccgcgacagcgattaacttgcagtcttcggtccacaatgagctgctcctcctgcagccccgcttgagtcatcataccccgcagttcttcctccgtgaagaagtacaccatggtgccgtcgcctcgcacgtagaagttgtcctccatacacttgccgctcttgaagcgcagctgtgccaggtcgtatcgtccgtagtcgcggaagaggagcaagccaccgggacgcaggtagcgatagcaattgtccaatacccgctgcattttctttggctcaattgcggacagcacaaaaatcatcacaataatgtcctgtgagttttcctcgaagggcacctgccaatgatccagcgtggcatccatgacaaacacctcgcagcgcttctcgtcgaactgccgttggcttcgcaggatttcaatggcccgggcggagaagtcacatccgaaaaccttgagctgcggttcagagctgtactgtagaaggggtaaaattgtgtttcctactccacagcccagttcgaaaatgctacgtggttgcagtaccgccgaatccgccgccagaggagctagttcggggaactccgtaaacagccagtggcgatccttgaagaagcggttgtcgtgaatgccgtagaaggaatcccaaaacttgggggcgtctgtctgaaatcgctccttctgctccgcttccatctttgaggtcgaattcttggctacagccgccttcgcggccagttcctgctcttcatcccattgcacgtggtccctgtgaatccatgtttagagggattttcatgagtactgaacggcagataagtaccaggcgttaaactcgaacacctctcgcgcgtcggtgagcacccggctgcccgctcccgacggttttttacgctggcgagtgtgttcccaacttttgctggccaatctccggaggatttgccacccatatttaccaagcattgtgcttgaagacgtcgtcagcatccgtgagcaggcgggttccgaactgcggtcgcttttcgttctccgcggcggggttgtcactcatatcggacaggaatgacggtatatatcacctgtttgtgcgatccaaattatatattttggtaaacacgccgccagtgtggccgtgcaccgatccaataaagttaaaccgttagtattttcgaagcggctctcttccgagcgggaaatcggatgtacccgttatcgcccttttttccaaaagcaattgtgaaatatgtgttctatgtgtgtttagtttgtggcgtgttgagtacgcatcgagtttttaccgaaaccccttagagaaaagggaaaaataaagttgaaaattgcgggcaaatgtaatcgtgctgccagaccatcaatagtttattttagggatgtactcgtgactgaataccttggcggatatcgtttcatggttaaaatgcatgatataaaaactggtaaattaaatatgaaacccgtaggtaagtaaaatgaatatgtattgttatgtttgcgacttatatccataattcgaatgaataataagaataagtttttggtgctcgtgccgtgcttttgcttccatcgctacgttttgacttctccactatttcccagtggcaacgccgcgtcagttggtatatcaaaaccgcaaaccaacctttttgttgtattgtgcgttgtttttttcgacggaggcgagaaatttaaacaattagcattcagagtgctaagatacaagagcttattgtgtatacgcagaaggctcgtcgaaggagcgaccaaaagaaacccatccagggtaccgagttccagggattattgtgtgcacgcagcggtctgcagaagcacccatagaaacataccctattcagcgttccatcgagcggacgaatcgcgaaaacccgttaaaatgatgaacgaggcggcacttgccaatatgataccctacgacaccatcggattgtatgaacagccaaagccgcgcttcatcttcaagatgcctcgtgtggtcccggaccagaagtccaagttcgagagcgacgaacttttccggaggctcagtcgggagagcgaggttcggtacacgggctatcgggaacgaagcatcga

SEQ ID NO: 27041 - DNA, 1253 bp, DROSOPHILA
caaaatatataatttggatcgcacaaacaggtgatatataccgtcattcctgtccgatatgagtgacaaccccgccgcggagaacgaaaagcgaccgcagttcggaacccgcctgctcacggatgctgacgacgtcttcaagcacaatgcttggtaaatatgggtggcaaatcctccggagattggccagcaaaagttgggaacacactcgccagcgtaaaaaaccgtcgggagcgggcagccgggtgctcaccgacgcgcgagaggtgttcgagtttaacgcctggtacttatctgccgttcagtactcatgaaaatccctctaaacatggattcacagggaccacgtgcaatgggatgaagagcaggaactggccgcgaaggcggctgtagccaagaattcgacctcaaagatggaagcggagcagaaggagcgatttcagacagacgcccccaagttttgggattccttctacggcattcacgacaaccgcttcttcaaggatcgccactggctgtttacggagttccccgaactagctcctctggcggcggattcggcggtactgcaaccacgtagcattttcgaactgggctgtggagtaggaaacacaattttaccccttctacagtacagctctgaaccgcagctcaaggttttcggatgtgacttctccgcccgggccattgaaatcctgcgaagccaacggcagttcgacgagaagcgctgcgaggtgtttgtcatggatgccacgctggatcattggcaggtgcccttcgaggaaaactcacaggacattattgtgatgatttttgtgctgtccgcaattgagccaaagaaaatgcagcgggtattggacaattgctatcgctacctgcgtcccggtggcttgctcctcttccgcgactacggacgatacgacctggcacagctgcgcttcaagagcggcaagtgtatggaggacaacttctacgtgcgaggcgacggcaccatggtgtacttcttcacggaggaagaactgcggggtatgatgactcaagcggggctgcaggaggagcagctcattgtggaccgaagactgcaagttaatcgctgtcgcggcttgaaaatgtaccgcgtgtggattcagacaaagttcaggaaaccgctttaaatcaatttagacgaatagttctgtgcattttaaaccttgttcaaatcaattgatataattatttacacgatatatttaaaaatacaaagttaaaacttc

SEQ ID NO: 27042 - protein, 246 aa, DROSOPHILA
MEAEQKERFQTDAPKFWDSFYGIHDNRFFKDRHWLFTEFPELAPLAADSAVLQPRSIFELGCGVGNTILPLLQYSSEPQLKVFGCDFSARAIEILRSQRQFDEKRCEVFVMDATLDHWQVPFEENSQDIIVMIFVLSAIEPKKMQRVLDNCYRYLRPGGLLLFRDYGRYDLAQLRFKSGKCMEDNFYVRGDGTMVYFFTEEELRGMMTQAGLQEEQLIVDRRLQVNRCRGLKMYRVWIQTKFRKPL

SEQ ID NO: 27043 - DNA, 3814 bp, DROSOPHILA
tgcgacgctggaaattcgtataccaattttgaacgacggagaagggcacaaaggtctcgctcgagatgggcgggatgtctctggctgccactccgaagctggaggcgtagttgaagaagttctccagcattcgctgaccaaattgcttgttgtcgttggcagtggactgaaaattggaaatggggttagatttgaatcgcaattattgcgccaatcaaatcggttggcaactactgatcttcagaacttaccacggctggcgtctgttgggccaccgttagctccggttcgagggaaactccaatctgtgcgatgtgtgagatctcctggctgccgaagaccatcccgtgagcctgggcctccagctcgtgactcttcttcagctgggcgattttgaagatggcggagggcttggtgttgtttatgtgacccagatactgccatgtgggtgctgcgttcgcgtccggccagctgaaatatatcgcagcggaggtgccgacgggcaggggtgatacgccggtgaggaatactaccaggtagttgacggattctatgtcgggcacattcacgagcaacttggtggcgtccacggccacaaaatccgattggggcaggcgtccggagactatcagaccgaatagcgacattttcgagcggtggactattccagaattcgatatgcccgctttgttgggggaggagatgttatggagatgagcaaaaaggaactaccttatcgatgctttctttcctaatggtgtacagcccactacgtttctaacaaaaaaatatattgaagtatattggaatttgttgcttgcatatgttctgacagttgatgcatattccaaaatcctaaaaaaagatttttttttaaattttaaatggaactagttcaggcgactgctacttggcttgccattcacagcgatacggcaactccaaacagctgacgctgccatgcgaatgctgatatcgtagcaaaaacacagggacggtgcgaaagaagagggattttattttgttttcgcctggcaattgagtaatggccggactccttcacctgaccaagcagtgcagcatccacctacccgcccacttgggacgcgcgaaatgctacacactcgctaagggaccgggaacacacgtgcaggcaagagtggtgagtgctcggcctctagacccatttcaaggccacctgccagactatctagactagattacggtttcgtaattacgcgtaaatacgcaataaattggcggtttgattgagtggggacagccggcgatcggcggggaaaacagtctgcgtgtgcgttgttttggtccttctccacttccatccgatcaatcttgaattaatgctccacgctatggcttatttcgttgcagcaagcatagagttagaccaaaacagcgcgcacgcacacagacttggaggatcgatcgggtattggggacaatgggtcgcacgcagcgtcgccggcatcagagggccaagaagtctgacgagaattcgggctccctgcacgacctctacgttcatctacactccgttggctggcagaaccacactcacttgtcggcccaatactacgaacagacaggtcgaggactatgctctaaacagaagaccttttctccggaggatgagctcattcgcctgcccattggctgtctcataagcatagcgactctggaatctgatgggccattcaaaagtcttttcgacgaagagttatttgacaaggactccagaatttcctttcaggcactgatagcctgttatattttgtaccacaagcacttgcaggagtgtacgctagggactcactcctctacttacgctgcatatttggacaccctgcccaggtgctactccactccgtatttctgctccatacccgagctacagtgtctgccagaatccctgctagagcggaccgtggcccagaaccgtcagataagaggttactttgaaattattaagaacattgtacacaaatgcgattgctgtgggaagagctacggccaggagatttggacactcgcagactttaagtgggcctacttcagcgtgaacactaggagcgtccacctcagttcccgctttctgaaaaagcagagcaactactttcagccgcttatcagtggcgacaccaacctggcattggctccgtttctggatctttttaaccactcagatcaagtggaaatcacagcagggattgagggtcccgattacgttcttacattgaaatctctgccattttccgagaccaaaccatatgatcaattgttcatcagctacggtgctttgcccaactttaagctattgacggaatatggcttttggctaagagaaaataagcacgattactttgaagtctccctactggacattgagcacatgattaagcaaaacaaggagctatcaacgcaaacctttcaccggaacatctttaaattcatcagggagcacaatctgaacgatcaaatgttcgtgcacatcgacgatggatgctctcacaatctaagggttgtgctgcacctgatcttcaagcagcaggcctactttcccaacatcctcaaccagattgcctttggagacgccgagcagtttcaggacgtgcagccagagctgtcgtacctcgtagaatataaaataaaggaatacgagatctttggaggagagctggataagcttcctaaattgacagaaagtggtgcagtggcacggtcttacctccaagagtgtatccgttacctcgttgactttcaatcggtgcatctagctgcatagaagctgtctaggctgagcttagaatttaaaacaaggcgtttaatattgaaatgaatagtaatagatgttaaagaaaaactacttaagtttatattatttgaggcatttaaattttttttaataaatcacagaaaactgtaaactttattttgtaaatgacccctttcagctgtactcttcgctgactaaggttgatgataagaacagcagcgatgccaagcggaagaagattaccccgtttacgcccacgccgggtagcaagctcctgggtggagtattcggcaagaaggccaaaggtaggtgccgtggggcagcatcagttacccagtaaataaccaatgctcgagtatcctgattaatacagcacccctgcagatatccgcaggctttttatttagtactagcctctcacgctttttttttattgactaaccaacccaaaattgattttgttttgtggaccgagtacgtgcgtccgtttgtttctttgtttgtttgtgcgcttgttgtgttgagcgcctgtctgaatttggctgcatccaagtgaattcaatgcaggtggagccccagcagcagcagcagcaaaaacaacaacgctacagcggcagcgaccttaccgcccacaacaacagcaatcacgactatgtcatgttcatatagggggcggcagcgatggtggctcgggattgggcaagctagacgcgccggaggtcacctccaaggatatgctgcgtgccatgatggcctacatctggccaaaggaggatccactggtgcgaaagcggtaagttcatctgactatgactgagaatactttaatatctattgttttccaaattgacagggtgggtatttccctgggtctgttggctggctccaagctgctgaccgtctgtgtccccttcttgttcaaaggagctgtggacacgatgacaacgctgaacatggacactgccccggatgcggtcctctccgcagccaccgcactgatgttgggatgtaggtttctta

SEQ ID NO: 27044 - DNA, 1584 bp, DROSOPHILA
cgaaagaagagggattttattttgttttcgcctggcaattgagtaatggccggactccttcacctgaccaagcagtgcagcatccacctacccgcccacttgggacgcgcgaaatgctacacactcgctaagggaccgggaacacacgtgcaggcaagagtgcaagcatagagttagaccaaaacagcgcgcacgcacacagacttggaggatcgatcgggtattggggacaatgggtcgcacgcagcgtcgccggcatcagagggccaagaagtctgacgagaattcgggctccctgcacgacctctacgttcatctacactccgttggctggcagaaccacactcacttgtcggcccaatactacgaacagacaggtcgaggactatgctctaaacagaagaccttttctccggaggatgagctcattcgcctgcccattggctgtctcataagcatagcgactctggaatctgatgggccattcaaaagtcttttcgacgaagagttatttgacaaggactccagaatttcctttcaggcactgatagcctgttatattttgtaccacaagcacttgcaggagtgtacgctagggactcactcctctacttacgctgcatatttggacaccctgcccaggtgctactccactccgtatttctgctccatacccgagctacagtgtctgccagaatccctgctagagcggaccgtggcccagaaccgtcagataagaggttactttgaaattattaagaacattgtacacaaatgcgattgctgtgggaagagctacggccaggagatttggacactcgcagactttaagtgggcctacttcagcgtgaacactaggagcgtccacctcagttcccgctttctgaaaaagcagagcaactactttcagccgcttatcagtggcgacaccaacctggcattggctccgtttctggatctttttaaccactcagatcaagtggaaatcacagcagggattgagggtcccgattacgttcttacattgaaatctctgccattttccgagaccaaaccatatgatcaattgttcatcagctacggtgctttgcccaactttaagctattgacggaatatggcttttggctaagagaaaataagcacgattactttgaagtctccctactggacattgagcacatgattaagcaaaacaaggagctatcaacgcaaacctttcaccggaacatctttaaattcatcagggagcacaatctgaacgatcaaatgttcgtgcacatcgacgatggatgctctcacaatctaagggttgtgctgcacctgatcttcaagcagcaggcctactttcccaacatcctcaaccagattgcctttggagacgccgagcagtttcaggacgtgcagccagagctgtcgtacctcgtagaatataaaataaaggaatacgagatctttggaggagagctggataagcttcctaaattgacagaaagtggtgcagtggcacggtcttacctccaagagtgtatccgttacctcgttgactttcaatcggtgcatctagctgcatagaagctgtctag

SEQ ID NO: 27045 - protein, 446 aa, DROSOPHILA
MGRTQRRRHQRAKKSDENSGSLHDLYVHLHSVGWQNHTHLSAQYYEQTGRGLCSKQKTFSPEDELIRLPIGCLISIATLESDGPFKSLFDEELFDKDSRISFQALIACYILYHKHLQECTLGTHSSTYAAYLDTLPRCYSTPYFCSIPELQCLPESLLERTVAQNRQIRGYFEIIKNIVHKCDCCGKSYGQEIWTLADFKWAYFSVNTRSVHLSSRFLKKQSNYFQPLISGDTNLALAPFLDLFNHSDQVEITAGIEGPDYVLTLKSLPFSETKPYDQLFISYGALPNFKLLTEYGFWLRENKHDYFEVSLLDIEHMIKQNKELSTQTFHRNIFKFIREHNLNDQMFVHIDDGCSHNLRVVLHLIFKQQAYFPNILNQIAFGDAEQFQDVQPELSYLVEYKIKEYEIFGGELDKLPKLTESGAVARSYLQECIRYLVDFQSVHLAA

SEQ ID NO: 27046 - DNA, 10426 bp, DROSOPHILA
gagtttggtggcgactccctgttccaacgattgatgcaaaaacttgacacctacgtggccaacaatgacgagattcgaaccgagatcaagccgcagctaaagaagattattcagaggctcaggcaatctcccagctacgtaaaggccctgcacaagtctctattctacttggacgccagcaagtaccagctgtccaagcgcaccacgggcatcaactacgtactaatccgtcactggctgcagccggaattctcgctgtacggctacaagatactgggcgtaatcactttcctgcaggtcagcgtttccttggccattagtggatgggatgcctggagagagcacaagcgccagcagctagaatcaataaagcaggctggaaagaatttcctgcaaagatcttcgagtacaaaggacgtagatccaaacaccccacagtgcatcctttgcctggagccacgttctgacagcagtttgactccatgcggccacatcttttgctggagctgcctgctcgagtggctggaggagcgggatgagtgccccttgtgccgggagtcgctgaaaaagtcccaagtgatattactgcaaaactatgcctaagattggattaagactttttatattcatgttataggaagtatttttgtgtctatgtaatatattttattcatataaatgaaacaagttttatttatttattcacaatttgtaatgtcaaaaaaatggtataaatcttcaacttaaattacgtgaagtcttaaaaagactaaagaaaggatgcacagaaacaaaatataatgatacttcatcgttgatgttaatgatagtttcccagtcgctcgctgggttttgtatgcttaaacgcatttcttacacggtttattcgatttatttaaacaagtttatgtacatgctgcttatatatataatatttttggtgtctggcttaacattatctatttacattatacaattatttgggctctaagctcattgcctagatgatatccaggtagacagtgcggttaaatatctgcttcttgcggcgcgattcgaaggcagaccttgcctccgaaggggactcgaaagcgacgcgagtgtcgccggtgggtttgccttcatcattgaaacgccttataatgtcatccgggctaagcttgtagtcgctaaagaagcgcatgatgtcctttagctccgccttgaaagggacattgcgcatagccactacgcatcccggccgattgaacttgtccgggattatggatgtgggaacgggcaccggagaggttggcttgacttgaccctgattgctgggcgagagggagctgctgctcagaggaggatctggtcgagcgaagggattgaagtgctgtttaacgggtgcgttcgagctagtgctgctgttgtcctccctttccagggatagcggtcgatcctgctgttgcgatggctgttcctgcggcttatcaaagcggctgggtcctcgacgacgagacggctgcgcactggctttatttccacctgcaccgtcattcgcattgttagtttccgctttcctgggaccatttccacccggcagataatccatgaagggctttttcatcctatcagcgatttcctggggcgtgatggccaccactcgcagtccccttcctcgaaagcgtctattgtggaactccctgatggccagtttgcaactggcaggatcactgaactccacaataaactcgccggagctctggttgcgttcattgaaaagctgttcgatatgctcgattcgtaggtgctcgagggaaaacagttcacccaaatcattggctctcgtggcgtactcgcagttgtggacacgaacgaagacatcctcttggcggggtcgctggatgacaccagcgcctccattatcatttggatagttgggtccgttcccattggaattcccgttatagttatagttgttattcatattgaagggaaagttattgacaccgttctgctgaagcggcggcatgtggaagggcatgttgccaccattgacaaagggagccatcatgttgggactcatgttggaattaaaattgggtcccatattcatctgttgctgctgctgctgatcttccgcctggcgtctccttggatcagcggcgaatctgttggcctgaatattctcattctcctgctgctgctgcttctgtcgcctttgctgatcttttaggagctcttcccgctgatcggcttcctcctttagcagctgctcattggctcttcgttgcttctccttggcattctgcatgtcctcctcgctgctggatctcactctcagctggcggaaccctatatagtgcttgctggtatcctgcagagcagagtcggcttcagcttccctggcaaaaaggacaaaggcaacggattctcgtcgattttttggactggggctcagtaggatgtccacaacggtatagctggcggagaacatcttcatgatatcttgctcagtggtggtctgtggcaaatcctctatatagaggacattggtaacgggtctgggaacgggaacaggtgcgccaccgcctcgttcacctctgtcaccaccattatgattgccatgactcctgctgccgtcctgcccctggcgactagcacgttcctccgccatctcaaactcatcgtcgcccacgggaacaatctgaatcaggcgatctcgaaacattgtgttattccgctgcactgccttttgggcactggacacacgagagaactccacgtaggccactccggtgcgactgccattcaccatcatgatcttgatgccattgtgcggaatgtacatgccctggaagtacttgcgaatatcgctgtacgacgtgttttggcacatgccactcatccgaatgtaacaggtgtccgcaacaacctggggcgtgctgcctccgcccggagagccacccatggtgggcgacactttggcctgtgtctgttgctgctggagtagcatctgctgctgctggaagagctgcgggtacatctgggcatagggatttacgctggcaaaggcaatgggctcgctctcggatttcgaaggctgcgctggagccgcactgccgctggacacctgctgcaaagcggtcagtagctggacactggtagcacttggttcgagattgtagttgttggtcacatttgtggtggtcgtactagtggtgtagctctgtagagagggtatctgcggcagattcaggttcaagcccatgttgagacccagtcccacagctggcaactgattctgaggtggttgcgcccatggagatggcagtgcaccaccgccggcaaccattttcagctccctttcctggcttttatccaaccggtcggagcgacgtttgcgacctcgttcccgttcccgttgacgatcccgctcccgctccctatcgctatcatcggaactggacgatctgctgcgactgcggcgacctgtgacatcagagagcgtgatccccgcctgctgttggtaggtcagaaaagagggcactgtccctgtggccacacccttgacttgaccttgacccaagaaggtgtttaggcccccaataatcggaggcagtggcgcagccggaccagccacctttgccgccgtaacggggacgacaacgggcataggaactggaaccgatactggcgcttgagcggacgccgctttccgagcagtctcaataaccttttgcatctcggcccgcgaggatagcagcaggcgcacctggatctccattagtttctcgcgatccttcagcattgcgcagcgggcatcctcgtcggtgctattggtttgtagaaattggggaaaaaaaaatcaaaggcgaaaaatcaggggtgttacataataagggtgagggcaatatcccgagcagttttcgagaattcggcgtgtttaatggccccatatttgtcatcagccagcattttaggcagtcaaaataatagcactttatgtatatttattccatatgttatctgcatcatcatccacgttcctggtggaaccattcttgatttgccataacatgaacctaggatcacagaacttgaactcaatttacccgatttaatctatttaaaaccaaacaactaatttcaaatcatcagcgaattcccgataaaagcacaaaggtaaaaggaaatgaatccttatctttacacagcccactaaatgtaatataaagatcaaaactaaggtctgctaaaactgcacgctaaaatcgttggcgatttgaaacctttttacattctgaagttacggtggtcccattataattcgaaaatatttcggtttcatatacattgacgtacttacttcggttacttccaatgccaaacatatatttaaaaaaaatgatccaccaaaaataataacattttccgattttgccgctttctgaatttaaatctatcgatatttgaaatatatatgaaatcatagggtttttgagatatgcattctggaatgcttattatggaatccgagtgataaaatgtgccataactagcccgatgagataactctaaatggaatgaaatagccgaggggctcgttattacctgttatttcagtccataaaaccatgagctatgcaagtattttcatgtgaactttcttagtgctattactttgaccaccgccttgggtacatgcaagttaggagcgtctctggccccgacccaagtccaggccggctggagctccgagattgctaggggtttacttatagatcagtttgtggctaactacctgaaagcgatgaaagcgtcgcccatctcgccgccgattatgtggacaccgccctcgggaattgagaggcccgagaagaagtttcgaatgtcgcgcgcatttgccgtccacggcaaattttgtaaccgaataatcacactcatcttgatcaatcaattgcttagctttgattacttatttatttcgtttctagtacagactgtcttcacttgcgctccacttccattgactggtcgctggctcctccgttggacatcagacgcgtattgacctgatattgatgatactgatgccgctgcccgtggattcttaaatctgtaacgataatcgcatacttatggaggatttaccaacaaaatgaaatgtcttaaaataaagatttcagctcagtttaaggaataaaagagaacagaccgctgcaatccattattgatgaatcacttaacattcattgtatacccttcagctaatcttccaatataagatgcttatgcactatcagcggatcacacaagttttaaccaaaatctttcggaagaatttagattaaacaatgactttaataaaaactacagaagaccaataagatgataccctgtaggcgcctggcaattctgtatttcctacattactactttccaacttccttgggggaaaagctgtgctctgctcctgattaaatctcgagttgatcgctcggttgcacacacattagacccactatttcatggattcgcatggcagtttctcatgacaatctttgaggctggccaagacaagcgtgcgttttggtattgcgtaagacgaccagtttgcagccagccagctaggaggagctactctctccctagcttttcgccagaataaaggtctaattgagatgtctcacttacagtagcagctggtgactttcgcacatgatcttaccaaggacatgaggcattgtgtagaaaaaagaaaactatctctacttaagctgtgtggttaacaggcagccacccactggagctaccacagatccacatgctccacgatcattagccagattcaatttcctcattagtcgcactcaattatgtgccgacgagacggctccgcagcgtccactggaggatgagggatcaatagttcggggctggcgggaggatcggcggcaactgctttcccaaaacagtagtggctggagaaaactcgttgatcgttttggacgtaatgggaaagctattatgcagctttaattcaatcggcctgctagttgtgtgctctgagctaatgcgattggctcgttgtcggattgtttgtatctcggtgtcaaagactttagatatccagagccggggagctacaggaaacccaaaccgaagctccactccttccgcctggctatataaaaagcattgttgccatctcggccggcagtaggaaattcgaattgaccgcgttaccgtcaccgtcaccgtctccttgcccgccgcagtcggccgtcattgatcctcgtcacaattatcatcgcatcgcattgctcatttcatcgttaaacgatcggatcatttgattgatcgatcgcatgtgcgaaggattaaagcgatgagaagatcgaaagtgagtgatcgatgtgcatgggattattacccttaaaagtgtgccatgaataggagtagtgatttggtggcagtgattttgagcatatccttggactacatgctaatcgatcgattttacataacaacatgtttgattcacaaaagcaacttactgttcgacttctgatcgggtcttcacttgaaccaaacaatcttcacctcttacttatccatgaccgatagacttaacttgcagtgccatccagttgaaataagagattcaatctttattactgctgatttattccaaactctgttcataacacatttaaaagaataacatgcagaccaccactgcaatacacaatttaaaacttgattatttccttggattgacttgcataacatttacgaatcgcttgatgaacttaccaacatcattcgattaaaggtctaaataggcgggacttaaattagtattagattaaagccccaatcacaacaatcccttattaaattgaataagatgatcacaaaaactagggccttactaacccaaattggattcgaaaacgaaagagtgcaaatgaagagagttataactagaaaaccaaatttcccagattgcccgctttcacacaatggccgcgttgggcctactgctgctggtgggcgtgcatggagccacgataatcagcatcaagtacccggataagcccgccgtggagccgcagccggccaagagggatctcagcctgagctacgcagccaccaacatcgactccaaggagggtacccgcgtgaagaccatcacggtgatcaagaatgtgggaggcatttcggcgcccgaagaagctgcggccttgggatcctccatcgccagcagccacaaccacaagcagcagccgaaactgatcattgatcccagtctgcacaagagcgaggagtgggcaagtgctttccgagacaactttgactcctacggagcactgcccgatgtgcccgacatagatgacctattcgagtttgtcaatcgcaagaagcccgagggtgaaaagaaaccggaggaggtgcccagccagaaggaggaaagggtgccgaaggagttgcaaaagccggcggaggagaccaccaccaagaaagccggagccagtgagcaaagcgagggcgggatcgtacccagtggcaacatcgatagcgacgaggctgtggtcgagaagataaagggtgatgccgaactgttgccgcacattaagcaggccaacatcctgcgcctccaggcggcccacgcccaagcccgctcgggagtacgaaccaaggagtcgctgatcgccgtcaactactccacgcccatgcatcaggtgagccagtacttcgacaactatgtccaagcggtgccaaatggctacgactacccaaagccctgtggcatgcagcctggcaacagtatccaagtgaccacgccttcaggccgcacctacgacattccgcagagcaacagcagtggcactggtggtggcaaccacccgtacttggctccagcgctcacaaagaagacgcagattccgccgatcacggtgcagcctccggtgcaacagcagcagcctcagcctcccaattactcctccgtgaactcgattgtgccgcctatagtgcaaccgcagcctcagggcaatgcaaatcttccacagcagccgcaacagcctccggtggtgaatcctccaaacggaggtatcctgccgcctctgggaacgggcggtatctccaccagccagcgtccctatgtggcgcccaggctgcgaaacaacggcctaggcatcagcagggcgcccagcactccgggcccgattcagattcccgggcaacctggcctcgtgggtaacaacaatccacagcagaccccgaacttccgcacgagcatttttggcggtggctcaaatcgtcccaacacgctgcgatcgcgtggtctaaagtattgaaaacttaaactaagtgtacactcttaaaaacagtcgaaattatagttcttagagggagattaccatcaaaattgccaatcgaagccagcattgtggctgcatttatccatatatcatttataattatagaaatatattttaaaaattgtttgatagccttaaagttatgtaccaatatgaaatagtggtatgttttccgatcaaacagctattaagactatttaatggtaagcgctataaaacccaattgatatgttgccttggcaatgctaaacaaatccgttgttttattttctgcattttattagcatgcttgttaataagagatctttcagttcctgagtgatcctagctaagcaagactttgtatcggactacctatgtttcggtttaaagccaattcaggtatgttcgctaatacaggtatttactacgaccaagagcaatatatatatttctacccccgaatgtgtgacaggcggtacacaatttattcgcggaaatgtatttacataatgcctttcatcttgaaatcgaatctggaacggggctgctagtagaaccgagactgtaccctaagcataaaatatgaattgcacaccgaaacgaaacagagcgcaaagaggaatctgcgagtcgttaagcaccaatcaatactgatcaacatacttttgggtaatggttttaaccgattttcactgtttccagcagtttcttggtttttcttctcgctcccgtgcagtgttgttgttgctgcttcgaagtcgttgatgttgaagcatctccacgggaagaagcagaagcgaaacgaacgaagaggagaagcggagggggcgaggtgtcgctgttttaagtacgagtactgaatttattcaatgaactttactcaccatgaaaaccattcaaaactccacttattctggaccaccaatgcacaaaaacagttgggtttgttttggctcaattgctatatatttattttgattattcctgctgatgatcggcctgaaaaatttatattttcctggcaacacaaaaagtgaaatgctgttttgtaattcctacgcttgcgagggtttggtgacagaaaacaacatggctgacacgaaaagtgtgacctgtagtcgtgcagcagaaaaaaatcactccgaagaccacgggcaccctgtgagcaaaatatgaaggggtttctgaaatgcgatttggttaattgttaaaaacaattctaattcgttagtcactatatgacgtttatttaaaacaataaagtaaccaaacaattacatttattaaccttttaaattttaatataatctatggtatatgttgatcttgcaagattgtgctggagtattgaacaattgaacattaacgagtcttaaatgtgcaagtgctacaaaatatttttccctgttaatttaattgttactgctaacttaagtttgttaccatattagttggaattgcttatgttattttatccgaagtcaagcggagcgcaagtgataagatgcgcctgtgcgcgtgatgcacagtgtgaacacttgtggtatttaattagcaaacgaaaagaaaataactacgcagcactcccacgcaaatactgtaaaacatatgtttcggtattttttatgtattggcacgcagattttagcgcttagtgtagttaggtcacacaccaacacgattcgtgcgtagttttcatttattttgctccgctttccttcgctgttttcacacccacgatccgcgaaaaaaacatccaggaatcgtgttcaaacattggcaaacatattgcgtaccgccgcggccataagtcaaccgctgtaggccattcttttagccccaaacaagagcgacgacgtcagtgggcgacgcgactggcgtcaggtgaaaaaaagaaagaaaaacgtattgagatttgaaaatctatataaaacgggtgcagcgaaattaaacggaatttgcaactgtgaaaacgctctaaagcgtggagagttgcatttgaaaaaaggtaattagcgtaccaattaaaaaaggaattgttcagtttgtgcgtgcaggttttctgcatgtgtgtg

SEQ ID NO: 27047 - DNA, 3434 bp, DROSOPHILA
ccaaaccctcgcaagcgtaggaattacaaaacagcatttcactttttgtgttgccaggaaaatataaatttttcaggccgatcatcagcaggaataatcaaaataaatatatagcaattgagccaaaacaaacccaactgtttttgtgcattggtggtccagaataagtggagttttgaatggttttcatgatgcttcaacatcaacgacttcgaagcagcaacaacaacactgcacgggagcgagaagaaaaaccaagaaactgctggaaacagtgaaaatcggttaaaaccattacccaaaaatttaagaatccacgggcagcggcatcagtatcatcaatatcaggtcaatacgcgtctgatgtccaacggaggagccagcgaccagtcaatggaagtggagcgcaagtgaagacagtctgtactagaaacgaaataaataagtaatcaaagctaagcaattgattgatcaagatgagtgtgattattcggttacaaaatttgccgtggacggcaaatgcgcgcgacattcgaaacttcttctcgggcctctcaattcccgagggcggtgtccacataatcggcggcgagatgggcgacgctttcatcgctttcagcaccgacgaggatgcccgctgcgcaatgctgaaggatcgcgagaaactaatggagatccaggtgcgcctgctgctatcctcgcgggccgagatgcaaaaggttattgagactgctcggaaagcggcgtccgctcaagcgccagtatcggttccagttcctatgcccgttgtcgtccccgttacggcggcaaaggtggctggtccggctgcgccactgcctccgattattgggggcctaaacaccttcttgggtcaaggtcaagtcaagggtgtggccacagggacagtgccctcttttctgacctaccaacagcaggcggggatcacgctctctgatgtcacaggtcgccgcagtcgcagcagatcgtccagttccgatgatagcgatagggagcgggagcgggatcgtcaacgggaacgggaacgaggtcgcaaacgtcgctccgaccggttggataaaagccaggaaagggagctgaaaatggttgccggcggtggtgcactgccatctccatgggcgcaaccacctcagaatcagttgccagctgtgggactgggtctcaacatgggcttgaacctgaatctgccgcagataccctctctacagagctacaccactagtacgaccaccacaaatgtgaccaacaactacaatctcgaaccaagtgctaccagtgtccagctactgaccgctttgcagcaggtgtccagcggcagtgcggctccagcgcagccttcgaaatccgagagcgagcccattgcctttgccagcgtaaatccctatgcccagatgtacccgcagctcttccagcagcagcagatgctactccagcagcaacagacacaggccaaagtgtcgcccaccatgggtggctctccgggcggaggcagcacgccccaggttgttgcggacacctgttacattcggatgagtggcatgtgccaaaacacgtcgtacagcgatattcgcaagtacttccagggcatgtacattccgcacaatggcatcaagatcatgatggtgaatggcagtcgcaccggagtggcctacgtggagttctctcgtgtgtccagtgcccaaaaggcagtgcagcggaataacacaatgtttcgagatcgcctgattcagattgttcccgtgggcgacgatgagtttgagatggcggaggaacgtgctagtcgccaggggcaggacggcagcaggagtcatggcaatcataatggtggtgacagaggtgaacgaggcggtggcgcacctgttcccgttcccagacccgttaccaatgtcctctatatagaggatttgccacagaccaccactgagcaagatatcatgaagatgttctccgccagctataccgttgtggacatcctactgagccccagtccaaaaaatcgacgagaatccgttgcctttgtcctttttgccagggaagctgaagccgactctgctctgcaggataccagcaagcactatatagggttccgccagctgagagtgagatccagcagcgaggaggacatgcagaatgccaaggagaagcaacgaagagccaatgagcagctgctaaaggaggaagccgatcagcgggaagagctcctaaaagatcagcaaaggcgacagaagcagcagcagcaggagaatgagaatattcaggccaacagattcgccgctgatccaaggagacgccaggcggaagatcagcagcagcagcaacagatgaatatgggacccaattttaattccaacatgagtcccaacatgatggctccctttgtcaatggtggcaacatgcccttccacatgccgccgcttcagcagaacggtgtcaataactttcccttcaatatgaataacaactataactataacgggaattccaatgggaacggacccaactatccaaatgataatggaggcgctggtgtcatccagcgaccccgccaagaggatgtcttcgttcgtgtccacaactgcgagtacgccacgagagccaatgatttgggtgaactgttttccctcgagcacctacgaatcgagcatatcgaacagcttttcaatgaacgcaaccagagctccggcgagtttattgtggagttcagtgatcctgccagttgcaaactggccatcagggagttccacaatagacgctttcgaggaaggggactgcgagtggtggccatcacgccccaggaaatcgctgataggatgaaaaagcccttcatggattatctgccgggtggaaatggtcccaggaaagcggaaactaacaatgcgaatgacggtgcaggtggaaataaagccagtgcgcagccgtctcgtcgtcgaggacccagccgctttgataagccgcaggaacagccatcgcaacagcaggatcgaccgctatccctggaaagggaggacaacagcagcactagctcgaacgcacccgttaaacagcacttcaatcccttcgctcgaccagatcctcctctgagcagcagctccctctcgcccagcaatcagggtcaagtcaagccaacctctccggtgcccgttcccacatccataatcccggacaagttcaatcggccgggatgcgtagtggctatgcgcaatgtccctttcaaggcggagctaaaggacatcatgcgcttctttagcgactacaagcttagcccggatgacattataaggcgtttcaatgatgaaggcaaacccaccggcgacactcgcgtcgctttcgagtccccttcggaggcaaggtctgccttcgaatcgcgccgcaagaagcagatatttaaccgcactgtctacctggatatcatctag

SEQ ID NO: 27048 - protein, 985 aa, DROSOPHILA; identical to SEQ ID NO: 17463

SEQ ID NO: 27049 - DNA, 3635 bp, DROSOPHILA
agaaacttcttcatcccaatcagagagtgagcaactaaactaatgtacaaatcgcttgcccaagcccagatcagttggtcgggcgtagcgggggcgggactgtagtgttgtgtgcgtgtagcctgcgctactgattgtgcgactctgtgtgcgtgccgcttgctgataagaagctgacgcggcgtttgtcccgcgcgcccaagcgataacccagcggctgggggtgggggagcagtggagagatagctcctccagctggtcgctggcccgcagaagctacaacaaactagtgtgtcgcggtattccgattgcgatctctcccgctcattaaaaaaccattacgatgcgccatcgatgcgcgtcaattaaggcggacggtggtcggtcagctgtgaaaactcccattgcagccggtgtacatttgtccagttggccgccctgctcctacggattggaccctaaatggaatgaccctcctccacttacggcttggctggggctctggctctccgccggcgtgtcggtcagctcaaacacctcgtcgccgaatgagggagtgtggaactgattcatgacgctcctgcaattctcccaggcttatttacaaataaaattaaacaatgccaggcgttttattatcgtgggccttaattagtgtgaccgccggcgggtatgtgctaaatgcgttgggacagtattttcaagcactggcttgctcctcaaatggaaccagttcaaattcataactgacaaatatttgttgtttaactatgctaaacttttttgaaaatatatatgtattttcttaacaataattcaataatttaagtttttgaaaccaatataatagctgtatagaaacgaaaataaaagagaaccacttctgttccagcacagttccggttccgcttctgaagtaccgttgttaaaaatattcagtcgacgctgctgtaatcaaaattgacagttttattaaaaatagattagatgcaatagaattattttttggaccgtaaagtgcaaaattttcatatgatctgtgtcaaaagaatgccgtggagcaatgttcgcatatttctgaagctcgcttcccagcgatgccagctcctaagtgtgggctccatccaagaggcgtctgcaggacaccgatcgggctccttcgaatcggatgccctgtcgagcacttcgaatgccaggcacatggagtgcctgttcgccaagtggctgggggacactagctcggtcaatggagtgggttatatgacctgcggtcaaaatacctatttacattgccttttgatttcgcagacctggcagaatttcttcaagggaatggtagagaaacaaatagactcgcaaccgcctcggaataaagaagcagaaggagatgttcttccctcggtaatttcgatcttctttaatatgctttttattcttcaatttctttctttaatcacagataggaaccacaacgccaacagatgcagcgattggggctccagttttgggaaggagaaaagcagtctcttcttcggcacagcagagtcctttggacacttcggaagcggacttcaacagttgcgtggctcagtctcaaaagcatgatattggagtgctttcacactcaacggatatcagaacttctggcatatacgacaaacagaaactgcccacattgcccaaagatggcattctgaaaggctgttcaataaacggatcaaatatagccagtgaagctcattcatcgattttattggggaatgaagtggcacacaacatttccaaaaacttgaccagaaaaatgtcgcaaaaaaatactccagacaagccagaaaaaccacataagcatgaagaaatcttgacgggttccagaagaaccggaaactcgcgcaacaactttcaaaagaaattcggctcattcgaaatttttatgaaattctggaaacacgcacatgcattggataagtataagcggcatattggtccagtaatggttgtgaagaagcgttcaaaaaccaattcaaagccaattaacgtcatgtacttcaaaaattattacgaaaagggtttacgtctaaggaaggaaaggttgaataaaatcaaaagcaataagaaaattaaaatgccttcaaaaagccctaaggagtccgtagctaaagaaatcattgaaaatgccaatataccacaatctcacccagaaacaaagaaatccacatatgtttcaaaacacaagagcgatacatatgcgacccttgaggaactgatcaacgatattgatgacatcgccataaatgagaagttgtctgaatcgattgagccagtgaaaaccaagaaagacagtaaaacaccgaagctgttggagaacactcccaaaaagaagccaaagaatttcaaaacggcacttagggttttcaagcccgaagagaaggttatcccaaaatcggataatatgccgagctcaaatatcaagcccaatcccgtttccaagttggacaaatccaaattaagtaagccgaagactgaaaaatacattcctttgagggttttcaatacaccaaaagaagacgaagacaagtcatggatatattgggatgagttggcagtgaaaagcctgcgaaaaccaactcaagactagcacttcatcctcagaaacccaagaaggaagttgggcagcctcttcatcctttgaactgaaactaacctaacgaatctcagcacgtcttgccacaagtgattcctactatgagctgatctcacaactttctcagccttcgaaccctaagcaccaaattcaaaatttaacaggtatttcggtagtcccttctagaacatgaaccaatgtcgtctgaggagcctggcgcggatcaggaggagcctgacactgggtttgcggggaactgaccaacacgtcctcgcccgtcaagccctccgcaccattcaaacgacctcacagcggcgaggtgtccatgatctggactccttcgccaatggatgcagtgccgcctacatcgagggactctacaacaagtggaagcgcaatcccagttccgtagatgaggtgagtcctataattactttatatttataacgtttgaataattatattatatatttataataataataaaatgtgtatttatccaattgaatctgcgtccagtcctggaacgagctcttcagcagcaacgattggtccagccccaagagaagtcctcttcaggtttcgcactcccggaagtacagacgtcctccggttgaaaggatagctgtgaaggctcggtcgggcgaaaggacggcttccggtggcgcatctgcagctccagccgcacctcccagcgactggaagaacattgatgaccaccacgtgatccaggccatcatccgtgcctatcaatcgcgcggtcacttggccgccgatctggatcccttgggtattgttggtccgaagaagcgtacgtcggtggatggcacccagcgacatgccgccagggaggtgctccgccagcacttctcctatatatttagtaagccaattattgtggttagaagttatctaactgaataactgaatctatatacctttattgcagatgacctcaataccgtgttcaagttgccctcatccacaatgatag

SEQ ID NO: 27050 - DNA, 1520 bp, DROSOPHILA
attttttggaccgtaaagtgcaaaattttcatatgatctgtgtcaaaagaatgccgtggagcaatgttcgcatatttctgaagctcgcttcccagcgatgccagctcctaagtgtgggctccatccaagaggcgtctgcaggacaccgatcgggctccttcgaatcggatgccctgtcgagcacttcgaatgccaggcacatggagtgcctgttcgccaagtggctgggggacactagctcggtcaatggaacctggcagaatttcttcaagggaatggtagagaaacaaatagactcgcaaccgcctcggaataaagaagcagaaggagatgttcttccctcgataggaaccacaacgccaacagatgcagcgattggggctccagttttgggaaggagaaaagcagtctcttcttcggcacagcagagtcctttggacacttcggaagcggacttcaacagttgcgtggctcagtctcaaaagcatgatattggagtgctttcacactcaacggatatcagaacttctggcatatacgacaaacagaaactgcccacattgcccaaagatggcattctgaaaggctgttcaataaacggatcaaatatagccagtgaagctcattcatcgattttattggggaatgaagtggcacacaacatttccaaaaacttgaccagaaaaatgtcgcaaaaaaatactccagacaagccagaaaaaccacataagcatgaagaaatcttgacgggttccagaagaaccggaaactcgcgcaacaactttcaaaagaaattcggctcattcgaaatttttatgaaattctggaaacacgcacatgcattggataagtataagcggcatattggtccagtaatggttgtgaagaagcgttcaaaaaccaattcaaagccaattaacgtcatgtacttcaaaaattattacgaaaagggtttacgtctaaggaaggaaaggttgaataaaatcaaaagcaataagaaaattaaaatgccttcaaaaagccctaaggagtccgtagctaaagaaatcattgaaaatgccaatataccacaatctcacccagaaacaaagaaatccacatatgtttcaaaacacaagagcgatacatatgcgacccttgaggaactgatcaacgatattgatgacatcgccataaatgagaagttgtctgaatcgattgagccagtgaaaaccaagaaagacagtaaaacaccgaagctgttggagaacactcccaaaaagaagccaaagaatttcaaaacggcacttagggttttcaagcccgaagagaaggttatcccaaaatcggataatatgccgagctcaaatatcaagcccaatcccgtttccaagttggacaaatccaaattaagtaagccgaagactgaaaaatacattcctttgagggttttcaatacaccaaaagaagacgaagacaagtcatggatatattgggatgagttggcagtgaaaagcctgcgaaaaccaactcaagactag

SEQ ID NO: 27051 - protein, 489 aa, DROSOPHILA
MPWSNVRIFLKLASQRCQLLSVGSIQEASAGHRSGSFESDALSSTSNARHMECLFAKWLGDTSSVNGTWQNFFKGMVEKQIDSQPPRNKEAEGDVLPSIGTTTPTDAAIGAPVLGRRKAVSSSAQQSPLDTSEADFNSCVAQSQKHDIGVLSHSTDIRTSGIYDKQKLPTLPKDGILKGCSINGSNIASEAHSSILLGNEVAHNISKNLTRKMSQKNTPDKPEKPHKHEEILTGSRRTGNSRNNFQKKFGSFEIFMKFWKHAHALDKYKRHIGPVMVVKKRSKTNSKPINVMYFKNYYEKGLRLRKERLNKIKSNKKIKMPSKSPKESVAKEIIENANIPQSHPETKKSTYVSKHKSDTYATLEELINDIDDIAINEKLSESIEPVKTKKDSKTPKLLENTPKKKPKNFKTALRVFKPEEKVIPKSDNMPSSNIKPNPVSKLDKSKLSKPKTEKYIPLRVFNTPKEDEDKSWIYWDELAVKSLRKPTQD
